(19) United States
(12) Patent Application Publication
(10) Pub. No.: US 2008/0114160 A1
(43) Pub. Date: May 15, 2008

(54) Plant Genome Sequence and Uses Thereof

(76) Inventors: Andrey Boukharov, Chesterfield, MO (US); Yongwei Cao, Chesterfield, MO (US); David Kovalic, Clayton, MO (US); Jingdong Liu, Chesterfield, MO (US); James McIninch, Burlington, MA (US); Wei Wu, St. Louis, MO (US)

Correspondence Address: ARNOLD & PORTER, LLP, 555 TWELFTH STREET, N.W., ATTN: IP DOCKETING, WASHINGTON, DC, 20004, UNITED STATES, 202-942-5000, IP_DOCKETING@APORTER.COM

(21) Appl. No.: 09/702,134

(22) Filed: Oct. 31, 2000

(51) Int. Cl. C07H 21/04

(52) U.S. Cl. 536/23.6; 536/24.3

(57) ABSTRACT

The present invention is in the field of plant biochemistry and genetics. More specifically the invention relates to nucleic acid molecules from plant cells, in particular, genomic DNA sequences from rice plants and nucleic acid molecules that contain markers, in particular, single nucleotide polymorphism (SNP) and repetitive element markers. In addition, the present invention provides nucleic acid molecules having regulatory elements or encoding proteins or fragments thereof. The invention also relates to proteins and fragments of proteins so encoded and antibodies capable of binding the proteins. The invention also relates to methods of using the nucleic acid molecules, markers, repetitive elements and fragments of repetitive elements, regulatory elements, proteins and fragments of proteins, and antibodies, for example for genome mapping, gene identification and analysis, plant breeding, preparation of constructs for use in plant gene expression, and transgenic plants.

[0001] Two copies of the sequence listing (Copy 1 and Copy 2) and a computer readable form of the sequence listing, all on CD-ROMs, each containing the file named Pa_{—}00319.rpt, which is 329,481,825 bytes and was created on Oct. 27, 2000, are herein incorporated by reference.

### INCORPORATION OF TABLE 1

[0002] Two copies of Table 1 on CD-ROMs, each containing 40,543,640 bytes and all having the file name Rice Table (51237)F.txt all created on Oct. 27, 2000, are herein incorporated by reference.

### FIELD OF THE INVENTION

[0003] The present invention is in the field of plant biochemistry and genetics. More specifically the invention relates to nucleic acid molecules from plant cells, in particular, genomic DNA sequences from Oryza sativa (rice) plants and nucleic acid molecules that contain markers, in particular, single nucleotide polymorphism (SNP) and repetitive element markers. In addition, the present invention provides nucleic acid molecules having regulatory elements or encoding proteins or fragments thereof. The invention also relates to proteins and fragments of proteins so encoded and antibodies capable of binding the proteins. The invention also relates to methods of using the nucleic acid molecules, markers, repetitive elements and fragments of repetitive elements, regulatory elements, proteins and fragments of proteins, and antibodies, for example for genome mapping, gene identification and analysis, plant breeding, preparation of constructs for use in plant gene expression, and transgenic plants.

### BACKGROUND OF THE INVENTION

I. Rice

[0004] Rice is one of three cereals produced annually at worldwide levels of approximately half a billion tons and more than 90% of produced rice is for human consumption (Goff, S. A. Curr. Opin. Plant Biol. 2:86-89 (1999), the entirety of which is herein incorporated by reference). Rice, however, is not only a commercially important crop, it is also a model for other cereal crops. The identification in Oryza sativa (rice) of proteins, genetic and physical markers, biological agents such as plant promoters, open reading frames, plant gene intron regions, plant gene intron/exon junctions, and regulatory elements, etc., is important in the development of nutritionally enhanced or agriculturally enhanced crops, in particular cereal crops. Such agents are useful in, for example, marker development, genetic mapping or linkage analysis, marker assisted breeding, physical genome mapping, transgenic crop production, crop monitoring diagnostics, antibody production and gene modification. Such agents can also have pharmaceutical or nutriceutical applications.

[0005] Rice can be used as a model for other cereal genomes because it has a genome size smaller than the other major cereals. The size of the rice genome is estimated at 420 to 450 megabase pairs. Sorghum, maize, barley and wheat have larger genomes (1000, 3000, 5000 and 16000 Mpb respectively). The smaller genome size of rice results in a higher gene density relative to the other cereals. Based on estimates of 30,000 genes in a cereal genome, rice will have on average one gene approximately every 15 Kbp. Similarly, maize and wheat have one gene approximately every 100 and 500 kpb, respectively. It has been reported that this higher gene density in rice makes it a target for cereal gene discovery efforts and genomic sequence analysis (Goff, S. A Curr. Opin. Plant Biol. 2:86-89 (1999), the entirety of which is herein incorporated by reference). Although the genes in rice are present at a higher relative density than in other cereals, they are predicted to be arranged in a similar general order within the genome (Goff, S. A Curr. Opin. Plant Biol. 2:86-89 (1999)). Comparisons of the physical and genetic maps of cereal genomes have lead to reports that colinearity of gene order exists among the various cereal genomes studied.

[0006] In addition to the general conservation of gene order among the cereals, studies of a number of individual genes demonstrate that there is also considerable homology among various cereal gene families. This conservation of gene and protein sequence suggests that studies on the functions of genes or proteins from one cereal could lead to the elucidation of the functions of orthologous genes/proteins in other cereals. Non-coding regulatory regions of the genome may also retain similar function between the various cereals. For example, strong constitutive or tissue-specific promoters from one cereal are likely to retain function when introduced as a portion of a transgene in another species (Goff, S. A Curr. Opin. Plant Biol. 2:86-89 (1999).

II. Gene Prediction and Sequence Comparisons

[0007] Three types of information are used in predicting gene structures: “signals” in the sequence, such as splice sites; “content” statistics, such as codon bias; and similarity to known genes (Stormo, G., Genome Research 10: 394-397 (2000)).

[0008] One type of features to identify are the splice junctions, the donor and acceptor sites. It has been reported that the most common method for predicting them has been the “weight matrix.” This is a matrix with a score for each possible base at every position within a “site.” There are separate weight matrices for acceptor and donor sites, and the scores for each base depend on the frequencies of each base at each position in the known sites. It has been reported that it is more common to use a log-odds ratio between the frequency of each base in the collection of sites and the expected frequency of that base in the genome. This gives positive scores to the bases that are preferred in the sites and negative scores to bases that are discriminated against. More complicated site descriptors have also been tried. For example, one can use a “weight array matrix” that has a score for each dinucleotide and thereby takes into account the nonindependence of adjacent positions in the sites. In addition, neural networks have been employed to detect splice sites. Neural networks are a pattern recognition technique that takes as input positive and negative examples (i.e., true splice sites and similar sites that are not functional splice sites) and discover the features that distinguish the two sets. The essential distinguishing features may include correlations in the positions of the sites.

[0009] Other signals can also be useful in predicting exons. The start and stop codons are used to predict the correct gene and can enable the categorization of exons into four classes: single exon genes that begin with a start codon and end with a stop codon; initial exons that begin with a start codon and end with a donor site; terminal exons that begin with an acceptor site and end with a termination codon; and internal exons that begin with an acceptor site and end with a donor site. It has been reported that initial and terminal exons tend to be the most difficult to identify, both because the signals are less informative and because they are often much shorter than internal exons and therefore harder to identify by content measures.

[0010] Some programs also look for sites associated with promoters, such as TATA boxes, transcription factor (TF) binding sites, and CpG islands. Identifying promoters can sometimes add information that is useful for predicting genes. Poly(A) addition signals are also used sometimes to aid in identifying the proper carboxyl terminus of agene.

[0011] Coding regions have statistical properties that can help to distinguish them from noncoding regions. In prokaryotes, simply the length of most coding ORFs is statistically significant. In eukaryotes, the lengths of typical exons are not especially significant, but they have other properties that are useful. For example, every species employs a bias in its choice of codons, such that synonomous codons are not used with the same frequency. So knowing the codon bias for a species can help to identify the genes from the DNA sequence. It has been reported that coding regions have asymmetries and periodicities that help to distinguish them from noncoding sequences. Other statistical tests have also been applied to the problem of distinguishing coding from noncoding sequences based on their sequences.

[0012] Neural networks have also been used to distinguish coding from noncoding sequences. It has been reported that a network was trained to classify whether a particular nucleotide was coding or not based on the surrounding nucleotides, using regions of 100-400 bases. In the GRAIL method (Uberbacher, E. C., Y. Xu, and R. J. Mural. Methods Enzymol. 266: 259-281 (1996)), a region of sequence, typically ˜100 bases, was first analyzed by various statistical tests of coding potential. The neural network was then trained, using both coding and noncoding sequences, to find combinations of those statistical tests that had a high accuracy of predicting exons.

Similarity Measures

[0013] A region of genomic DNA that is significantly similar to a known sequence will usually have the same, or very similar, function. This can be used as both positive and negative evidence about the coding likelihood of the region. For example, if the region matches well to a known repetitive sequence it is unlikely to be protein coding. Some repetitive sequences contain coding regions, but sometimes one is interested in identifying other genes and would like to ignore the repetitive elements. Programs like RepeatMasker (Smit, A. F. A. and P. Green. 1999) use a database of known repetitive elements to locate their positions in the genomic DNA, which can then be ignored by the gene-finding program.

[0014] If a region of DNA is similar, after translation, to a known protein or protein family, that is evidence that the region codes for a protein, and provides information about its likely function. This information has been used to compare predicted genes with protein databases and provide added confidence for predictions with matches. But it is also possible to include database searches in the initial analysis and use the resulting matches to help guide the prediction process. One approach uses protein homology exclusively to identify probable coding regions in genomic DNA. EST and cDNA databases can be used similarly. When a region of genomic DNA matches a sequenced cDNA that is evidence that it is transcribed and likely to be part of a coding region. In general, similarities between genomic DNA and sequences that correspond to genes, whether from protein, cDNA, or EST databases, can provide evidence for the occurrence of protein coding regions.

[0015] Genome sequence information from rice allows comparisons of rice sequences with other rice sequences as well as with those of other flowering plant genome sequences, particularly other cereal plant species, and also with genome sequences and gene sequences from other organisms, including bacteria, humans, and yeast. Such information provides valuable insights into the translation of plant genetic information into a flowering plant and also reveals genetic differences involved in the differentiation of the plant kingdom. In addition, genome sequencing and mapping provides increased opportunities for identification and isolation of agents associated with plant traits, as well as insight into mechanisms of genome interactions.

[0016] Rice sequences can be compared, for example, to sequences that encode promoters or proteins or other sequences. These homologies can be determined by similarity searches (Adams, et al., Science 252:1651-1656 (1991), the entirety of which is herein incorporated by reference).

[0017] A characteristic feature of a DNA sequence is that it can be compared with other DNA sequences. Sequence comparisons can be undertaken by determining the similarity of the test or query sequence with sequences in publicly available or propriety databases (“similarity analysis”) or by searching for certain motifs (“intrinsic sequence analysis”)(e.g., cis elements)(Coulson, Trends in Biotechnology, 12:76-80 (1994), the entirety of which is herein incorporated by reference; Birren, et al., Genome Analysis, 1:543-559 (1997), the entirety of which is herein incorporated by reference). Similarity analysis includes database search and alignment. Examples of public databases include the DNA Database of Japan (DDBJ)(http://www.ddbj.nig.ac.jp/); Genebank (http://www.ncbi.nlm.nih.gov/web/Genbank/Index.htlm); and the European Molecular Biology Laboratory Nucleic Acid Sequence Database (EMBL) (http://www.ebi.ac.uk/ebi_docs/embl_db.html). A number of different search algorithms have been developed, one example of which are the suite of programs referred to as BLAST programs. There are five implementations of BLAST, three designed for nucleotide sequences queries (BLASTN, BLASTX, and TBLASTX) and two designed for protein sequence queries (BLASTP and TBLASTN) (Coulson, Trends in Biotechnology, 12:76-80 (1994); Birren, et al., Genome Analysis, 1:543-559 (1997)).

[0018] BLASTN takes a nucleotide sequence (the query sequence) and its reverse complement and searches them against a nucleotide sequence database. BLASTN was designed for speed, not maximum sensitivity, and may not find distantly related coding sequences. BLASTX takes a nucleotide sequence, translates it in three forward reading frames and three reverse complement reading frames, and then compares the six translations against a protein sequence database. BLASTX is useful for sensitive analysis of preliminary (single-pass) sequence data and is tolerant of sequencing errors (Gish and States, Nature Genetics, 3:266-272 (1993), the entirety of which is herein incorporated by reference).

[0019] Given a coding nucleotide sequence and the protein it encodes, it is often preferable to use the protein as the query sequence to search a database because of the greatly increased sensitivity to detect more subtle relationships. This is due to the larger alphabet of proteins (20 amino acids) compared with the alphabet of nucleic acid sequences (4 bases), where it is far easier to obtain a match by chance. In addition, with nucleotide alignments, only a match (positive score) or a mismatch (negative score) is obtained, but with proteins, the presence of conservative amino acid substitutions can be taken into account. Here, a mismatch may yield a positive score if the non-identical residue has physical/chemical properties similar to the one it replaced. Various scoring matrices are used to supply the substitution scores of all possible amino acid pairs. A general purpose scoring system is the BLOSUM62 matrix (Henikoff and Henikoff, Proteins, 17:49-61 (1993), the entirety of which is herein incorporated by reference), which is currently the default choice for BLAST programs. BLOSUM62 is tailored for alignments of moderately diverged sequences and thus may not yield the best results under all conditions. Altschul, J. Mol. Biol. 36:290-300 (1993), the entirety of which is herein incorporated by reference, uses a combination of three matrices to cover all contingencies. This may improve sensitivity, but at the expense of slower searches. In practice, a single BLOSUM62 matrix is often used but others (PAM40 and PAM250) may be attempted when additional analysis is necessary. Low PAM matrices are directed at detecting very strong but localized sequence similarities, whereas high PAM matrices are directed at detecting long but weak alignments between very distantly related sequences.

[0020] Homologues in other organisms are available that can be used for comparative sequence analysis. Multiple alignments are performed to study similarities and differences in a group of related sequences. CLUSTAL W is a multiple sequence alignment package available that performs progressive multiple sequence alignments based on the method of Feng and Doolittle, J. Mol. Evol. 25:351-360 (1987), the entirety of which is herein incorporated by reference. Each pair of sequences is aligned and the distance between each pair is calculated; from this distance matrix, a guide tree is calculated, and all of the sequences are progressively aligned based on this tree. A feature of the program is its sensitivity to the effect of gaps on the alignment; gap penalties are varied to encourage the insertion of gaps in probable loop regions instead of in the middle of structured regions. Users can specify gap penalties, choose between a number of scoring matrices, or supply their own scoring matrix for both the pairwise alignments and the multiple alignments. CLUSTAL W for UNIX and VMS systems is available at: ftp.ebi.ac.uk. Another program is MACAW (Schuler et al., Proteins, Struct. Func. Genet, 9:180-190 (1991), the entirety of which is herein incorporated by reference, for which both Macintosh and Microsoft Windows versions are available. MACAW uses a graphical interface, provides a choice of several alignment algorithms, and is available by anonymous ftp at: ncbi.nlm.nih.gov (directory/pub/macaw).

[0021] Sequence motifs are derived from multiple alignments and can be used to examine individual sequences or an entire database for subtle patterns. With motifs, it is sometimes possible to detect distant relationships that may not be demonstrable based on comparisons of primary sequences alone. Currently, the largest collection of reported sequence motifs is PROSITE (Bairoch and Bucher, Nucleic Acid Research, 22:3583-3589 (1994), the entirety of which is herein incorporated by reference). PROSITE may be accessed via either the ExPASy server on the World Wide Web or anonymous ftp site. Many commercial sequence analysis packages also provide search programs that use PROSITE data.

[0022] A resource for searching protein motifs is the BLOCKS E-mail server developed by S. Henikoff, Trends Biochem Sci., 18:267-268 (1993), the entirety of which is herein incorporated by reference; Henikoff and Henikoff, Nucleic Acid Research, 19:6565-6572 (1991), the entirety of which is herein incorporated by reference; Henikoff and Henikoff, Proteins, 17:49-61 (1993). BLOCKS searches a protein or nucleotide sequence against a database of protein motifs or “blocks.” Blocks are defined as short, ungapped multiple alignments that represent highly conserved protein patterns. The blocks themselves are derived from entries in PROSITE as well as other sources. Either a protein or nucleotide query can be submitted to the BLOCKS server; if a nucleotide sequence is submitted, the sequence is translated in all six reading frames and motifs are sought in these conceptual translations. Once the search is completed, the server will return a ranked list of significant matches, along with an alignment of the query sequence to the matched BLOCKS entries.

[0023] Conserved protein domains can be represented by two-dimensional matrices, which measure either the frequency or probability of the occurrences of each amino acid residue and deletions or insertions in each position of the domain. This type of model, when used to search against protein databases, is sensitive and usually yields more accurate results than simple motif searches. Two popular implementations of this approach are profile searches (such as GCG program ProfileSearch) and Hidden Markov Models (HMMs) (Krough, et al., J. Mol. Biol. 235:1501-1531 (1994); Eddy, Current Opinion in Structural Biology 6:361-365 (1996), both of which are herein incorporated by reference in their entirety). In both cases, a large number of common protein domains have been converted into profiles, as present in the PROSITE library, or HHM models, as in the Pfam protein domain library (Sonnhammer, et al., Proteins 28:405-420 (1997), the entirety of which is herein incorporated by reference). Pfam contains more than 500 HMM models for enzymes, transcription factors, signal transduction molecules, and structural proteins. Protein databases can be queried with these profiles or HMM models, which will identify proteins containing the domain of interest. For example, HMMSW or HMMFS, two programs in a public domain package called HMMER (Sonnhammer, et al., Proteins 28:405-420 (1997)) can be used.

[0024] PROSITE and BLOCKS represent collected families of protein motifs. Thus, searching these databases entails submitting a single sequence to determine whether or not that sequence is similar to the members of an established family. Programs working in the opposite direction compare a collection of sequences with individual entries in the protein databases. An example of such a program is the Motif Search Tool, or MoST (Tatusov, et al., Proc. Natl. Acad. Sci. 91:12091-12095 (1994), the entirety of which is herein incorporated by reference). On the basis of an aligned set of input sequences, a weight matrix is calculated by using one of four methods (selected by the user); a weight matrix is simply a representation, position by position in an alignment, of how likely a particular amino acid will appear. The calculated weight matrix is then used to search the databases. To increase sensitivity, newly found sequences are added to the original data set, the weight matrix is recalculated, and the search is performed again. This procedure continues until no new sequences are found.

III. Contig Assembly

[0025] A characteristic feature of a large scale shotgun sequencing project is that the sequence data can be processed and assembled into contiguous sequences (contigs), which represent a reconstruction of the original genome sequence from the cloned fragments. Likewise, individual Bacterial Artificial Chromosome (BAC) clones within a BAC library can be shot gun sequenced and these data can be assembled into contigs. Programs are available in the public domain that can analyze the sequence output and assemble the sequences into larger sequence regions representing contiguous sequences of the target genome. Examples of such programs can be found at, for example, http://genome.wustl.edu/gsc, http://www.sanger.ac.uk, and http://www.mbt.washington.edu. An example of sequence reading program is Phred (http://www.mbt.washington.edu). Phred reads DNA sequencer trace data, calls bases, assigns quality values to the bases, and writes the base calls and quality values to output files.

[0026] The process of assembling DNA sequence fragments generally involves three phases; the overlap phase, the layout phase and the multi-alignment, or consensus, phase. In the overlap phase, each fragment is compared against every other fragment to determine if they share a common subsequence, an indication that they were potentially sampled from overlapping stretches of the original DNA strand. Pairs of fragments are compared in two ways; 1) with both fragments in the same relative orientation, and 2) with one of the fragments having been reverse complemented. In the layout phase, a series of alternate assemblies or layouts of the fragments based on the pairwise overlaps is generated. A layout specifies the relative locations and orientations of the fragments with respect to each other and is typically visualized as an arrangement of overlapping directed lines, one for each fragment. The general criterion for the layout phase is to produce plausible assemblies of maximum likelihood. In this manner, it can be determined if there is more than one way to put the pieces together and if different solutions appear equally plausible. The multi-alignment, or consensus, phase uses more information than just the pairwise alignments in the layout. The sequences of all the fragments in a layout are simultaneously aligned, giving a final set of contigs representing regions of the target genome. An example of an assembly program is PHRAP, which can be found at http://chimera.biotech.washington.edu/UWGC/tools/phrap.htm.

IV. Gene Mapping and Marker Assisted Introgression of Plant Traits

[0027] Genome sequence information from rice provides markers that will assist in the development of improved plants. Marker assisted introgression of traits into plants have been reported. An initial step in that process is the localization of the trait by gene mapping. Gene mapping is the process of determining a gene's position relative to other genes and genetic markers through linkage analysis. The basic principle for linkage mapping is that the closer together two genes are on the chromosome, the more likely they are to be inherited together (Rothwell, Understanding Genetics. 4^{th} Ed. Oxford University Press, New York, p. 703 (1988), the entirety of which is herein incorporated by reference). Briefly, a cross is made between two genetically compatible but divergent parents relative to traits under study. Genetic markers are then used to follow the segregation of traits under study in the progeny from the cross (often a backcross, F₂, or recombinant inbred population).

[0028] Linkage analysis is based on the level at which markers and genes are co-inherited (Rothwell, Understanding Genetics. 4^{th} Ed. Oxford University Press, New York, p. 703 (1988). Statistical tests like chi-square analysis can be used to test the randomness of segregation or linkage (Kochert, The Rockefeller Foundation International Program on Rice Biotechnology, University of Georgia Athens, Ga., pp. 1-14 (1989), the entirety of which is herein incorporated by reference). In linkage mapping, the proportion of recombinant individuals out of the total mapping population provides the information for determining the genetic distance between the loci (Young, Encyclopedia of Agricultural Science, Vol. 3, pp. 275-282 (1994), the entirety of which is herein incorporated by reference).

[0029] Classical mapping studies utilize easily observable, visible traits instead of molecular markers. These visible traits are also known as naked eye polymorphisms. These traits can be morphological like plant height, fruit size, shape and color or physiological like disease response, photoperiod sensitivity or crop maturity. Visible traits are useful and are still in use because they represent actual phenotypes and are easy to score without any specialized lab equipment. By contrast, the other types of genetic markers are arbitrary loci for use in linkage mapping and often not associated to specific plant phenotypes (Young, Encyclopedia of Agricultural Science, Vol. 3, pp. 275-282 (1994). Many morphological markers cause such large effects on phenotype that they are undesirable in breeding programs. Many other visible traits have the disadvantage of being developmentally regulated (i.e., expressed only certain stages; or at specific tissue and organs). Oftentimes, visible traits mask the effects of linked minor genes making it nearly impossible to identify desirable linkages for selection (Tanksley et al., Biotech. 7:257-264 (1989), the entirety of which is herein incorporated by reference).

[0030] Although a number of important agronomic characters are controlled by loci having major effects on phenotype, many economically important traits, such as yield and some forms of disease resistance, are quantitative in nature. This type of phenotypic variation in a trait is typically characterized by continuous, normal distribution of phenotypic values in a particular population (polygenic traits) (Beckmann and Soller, Oxford Surveys of Plant Molecular Biology, Miffen. (ed.), Vol. 3, Oxford University Press, UK., pp. 196-250 (1986), the entirety of which is herein incorporated by reference). Loci contributing to such genetic variation are often termed, minor genes, as opposed to major genes with large effects that follow a Mendelian pattern of inheritance. Polygenic traits are also predicted to follow a Mendelian type of inheritance, however the contribution of each locus is expressed as an increase or decrease in the final trait value.

[0031] The advent of DNA markers, such as restriction fragment length polymorphic markers (RFLPs), microsatellite markers, single nucleotide polymorphic markers (SNPs), and random amplified polymorphic markers (RAPDs), allow the resolution of complex, multigenic traits into their individual Mendelian components (Paterson et al., Nature 335:721-726 (1988), the entirety of which is herein incorporated by reference). A number of applications of RFLPs and other markers have been suggested for plant breeding. Among the potential applications for RFLPs and other markers in plant breeding include: varietal identification (Soller and Beckmann, Theor. Appl. Genet. 67:25-33 (1983), the entirety of which is herein incorporated by reference; Tanksley et al., Biotech. 7:257-264 (1989), QTL mapping (Edwards et al., Genetics 116:113-115 (1987), the entirety of which is herein incorporated by reference); Nienhuis et al., Crop Sci. 27:797-803 (1987); Osborn et al., Theor. Appl. Genet. 73:350-356 (1987); Romero-Severson et al., Use of RFLPs In Analysis Of Quantitative Trait Loci In Maize, In Helentjaris and Burr (eds.), pp. 97-102 (1989), the entirety of which is herein incorporated by reference; Young et al., Genetics 120:579-585 (1988), the entirety of which is herein incorporated by reference; Martin et al., Science 243:1725-1728 (1989), the entirety of which is herein incorporated by reference; Sarfatti et al., Theor. Appl. Genet. 78:22-26 (1989), the entirety of which is herein incorporated by reference; Tanksley et al., Biotech. 7:257-264 (1989); Barone et al., Mol. Gen. Genet. 224:177-182 (1990), the entirety of which is herein incorporated by reference; Jung et al., Theor. Appl. Genet. 79:663-672 (1990), the entirety of which is herein incorporated by reference; Keim et al., Genetics 126:735-742 (1990), the entirety of which is herein incorporated by reference; Keim et al., Theor. Appl. Genet. 79:465-369 (1990), the entirety of which is herein incorporated by reference; Paterson et al., Genetics 124:735-742 (1990), the entirety of which is herein incorporated by reference; Martin et al., Proc. Natl. Acad. Sci. USA 88:2336-2340 (1991), the entirety of which is herein incorporated by reference; Messeguer et al., Theor. Appl. Genet. 82:529-536 (1991), the entirety of which is herein incorporated by reference; Michelmore et al., Proc. Natl. Acad. Sci. USA 88:9828-9832 (1991), the entirety of which is herein incorporated by reference; Ottaviano et al., Theor. Appl. Genet. 81:713-719 (1991), the entirety of which is herein incorporated by reference; Yu et al., Theor. Appl. Genet. 81:471-476 (1991), the entirety of which is herein incorporated by reference; Diers et al., Crop Sci. 32:377-383 (1992), the entirety of which is herein incorporated by reference; Diers et al., Theor. Appl. Genet. 83:608-612 (1992), the entirety of which is herein incorporated by reference; J. Plant Nut. 15:2127-2136 (1992), the entirety of which is herein incorporated by reference; Doebley et al., Proc. Natl. Acad. Sci. USA 87:9888-9892 (1990), the entirety of which is herein incorporated by reference, screening genetic resource strains for useful quantitative trait alleles and introgression of these alleles into commercial varieties (Beckmann and Soller, Theor. Appl. Genet. 67:3543 (1983), the entirety of which is herein incorporated by reference; marker-assisted selection (Tanksley et al., Biotech. 7:257-264 (1989) and map-based cloning (Tanksley et al., Biotech. 7:257-264 (1989). In addition, DNA markers can be used to obtain information about: (1) the number, effect, and chromosomal location of each gene affecting a trait; (2) effects of multiple copies of individual genes (gene dosage); (3) interaction between/among genes controlling a trait (epistasis); (4) whether individual genes affect more than one trait (pleiotropy); and (5) stability of gene function across environments (G×E interactions).

### SUMMARY OF THE INVENTION

[0032] The present invention provides a substantially purified nucleic acid molecule, the nucleic acid molecule capable of specifically hybridizing to a second nucleic acid molecule having a nucleic acid sequence selected from the group consisting of SEQ ID NO: 1 through SEQ ID NO: 52202 or complements thereof or fragments of either.

[0033] The present invention also provides a substantially purified nucleic acid molecule encoding a rice protein or fragment thereof, wherein the rice protein or fragment thereof is encoded by a nucleic acid sequence selected from the group consisting of 52202 1 through SEQ ID NO: 52202 or complements thereof or fragments of either.

[0034] The present invention also provides a substantially purified protein or fragment thereof encoded by a first nucleic acid molecule which specifically hybridizes to a second nucleic acid molecule, the second nucleic acid molecule having a nucleic acid sequence selected from the group consisting of SEQ ID NO: 1 through SEQ ID NO: 52202 or complements thereof.

[0035] The present invention also provides a substantially purified protein or fragment thereof encoded by a nucleic acid sequence selected from the group consisting of SEQ ID NO: 1 through SEQ ID NO: 52202 or complements thereof or fragments of either.

[0036] The present invention also provides a substantially purified antibody or fragment thereof, the antibody or fragment thereof capable of specifically binding to the protein or fragment thereof encoded by a first nucleic acid molecule which specifically hybridizes to a second nucleic acid molecule, the second nucleic acid molecule having a nucleic acid sequence selected from the group consisting of SEQ ID NO: 1 through SEQ ID NO: 52202 or complements thereof or fragment of either.

[0037] The present invention also provides a transformed plant having a nucleic acid molecule which comprises: (A) an exogenous promoter region which functions in a plant cell to cause the production of an mRNA molecule; which is linked to (B) a structural nucleic acid molecule, wherein the structural nucleic acid molecule is selected from the group consisting of a protein or fragment thereof encoding sequence located within SEQ ID NO: 1 through SEQ ID NO: 52202 or complements thereof; which is linked to (C) a 3′ non-translated sequence that functions in a plant cell to cause termination of transcription and addition of polyadenylated ribonucleotides to a 3′ end of the mRNA molecule.

[0038] The present invention also provides a transformed plant having a nucleic acid molecule which comprises: (A) an exogenous promoter region which functions in a plant cell to cause the production of an mRNA molecule wherein the promoter nucleic acid molecule is selected from the group consisting of SEQ ID NO: 1 through SEQ ID NO: 52202 or complements thereof or fragments of either; which is linked to (B) a structural nucleic acid molecule encoding a protein or fragment thereof; which is linked to (C) a 3′ non-translated sequence that functions in a plant cell to cause termination of transcription and addition of polyadenylated ribonucleotides to a 3′ end of the mRNA molecule.

[0039] The present invention also provides a transformed plant having a nucleic acid molecule which comprises: (A) an exogenous promoter region which functions in a plant cell to cause the production of an mRNA molecule; which is linked to (B) a transcribed nucleic acid molecule with a transcribed strand and a non-transcribed strand, wherein the transcribed strand is complementary to a nucleic acid molecule having a nucleic acid sequence selected from the group consisting of SEQ ID NO: 1 through SEQ ID NO: 52202 or complements thereof and the transcribed strand is complementary to an endogenous mRNA molecule; which is linked to (C) a 3′ non-translated sequence that functions in plant cells to cause termination of transcription and addition of polyadenylated ribonucleotides to a 3′ end of the mRNA molecule.

[0040] The present invention also provides a transformed plant having a nucleic acid molecule which comprises: (A) an exogenous promoter region which functions in a plant cell to cause the production of an mRNA molecule wherein the promoter nucleic acid molecule is selected from the group consisting of SEQ ID NO: 1 through SEQ ID NO: 52202 or complements thereof; which is linked to (B) a transcribed nucleic acid molecule with a transcribed strand and a non-transcribed strand, wherein the transcribed strand is complementary to an endogenous mRNA molecule; which is linked to (C) a 3′ non-translated sequence that functions in plant cells to cause termination of transcription and addition of polyadenylated ribonucleotides to a 3′ end of the mRNA molecule.

[0041] The present invention also provides a computer readable medium having recorded thereon one or more nucleic acid molecules encoding a rice protein or fragment thereof, wherein the rice protein or fragment thereof is encoded by a nucleic acid sequence selected from the group consisting of SEQ ID NO: 1 through SEQ ID NO: 52202 or complements thereof or fragments of either.

[0042] The present invention also provides a method of introgressing a trait into a plant comprising using a nucleic acid marker for marker assisted selection of the plant, the nucleic acid marker complementary to a nucleic acid sequence selected from the group consisting of SEQ ID NO: 1 through SEQ ID NO: 52202 or complements thereof, and introgressing the trait into a plant.

[0043] The present invention also provides a method for screening for a trait comprising interrogating genomic DNA for the presence or absence of a marker molecule that is genetically linked to a nucleic acid sequence complementary to a nucleic acid sequence selected from the group consisting of SEQ ID NO: 1 through SEQ ID NO: 52202 or complements thereof; and detecting the presence or absence of the marker.

[0044] The present invention also provides a method for determining the likelihood of the presence or absence of a trait in a plant comprising the steps of: (A) obtaining genomic DNA from the plant; (B) detecting a marker nucleic acid molecule; wherein the marker nucleic acid molecule specifically hybridizes with a nucleic acid sequence that is genetically linked to a nucleic acid sequence complementary to a nucleic acid sequence selected from the group consisting of SEQ ID NO: 1 through SEQ ID NO: 52202 or complements thereof; (C) determining the level, presence or absence of the marker nucleic acid molecule, wherein the level, presence or absence of the marker nucleic acid molecule is indicative of the likely presence in the plant of the trait.

[0045] The present invention also provides a method for determining a genomic polymorphism in a plant that is predictive of a trait comprising the steps: (A) incubating a marker nucleic acid molecule, under conditions permitting nucleic acid hybridization, and a complementary nucleic acid molecule obtained from the plant, the marker nucleic acid molecule having a nucleic acid sequence selected from the group consisting of SEQ ID NO: 1 through SEQ ID NO: 52202 or complements thereof or fragments of either; (B) permitting hybridization between the marker nucleic acid molecule and the complementary nucleic acid molecule obtained from the plant; and (C) detecting the presence of the polymorphism.

[0046] The present invention also provides a method of determining an association between a polymorphism and a plant trait comprising: (A) hybridizing a nucleic acid molecule specific for the polymorphism to genetic material of a plant, wherein the nucleic acid molecule comprises a nucleic acid sequence selected from the group consisting of SEQ ID NO: 1 through SEQ ID NO: 52202 or complements thereof or fragments of either; and (B) calculating the degree of association between the polymorphism and the plant trait.

[0047] The present invention provides a method for isolating a nucleic acid molecule in a non-rice cereal comprising: (A) defining a genomic region of rice by reference to a marker molecule, wherein said marker molecule comprises a nucleic acid sequence selected from the group consisting of SEQ ID NO: 1 through SEQ ID NO: 52202 or complement thereof or fragment of either; (B) identifying a syntenic genomic region of said non-rice cereal that corresponds to said defined genomic region of rice; and (C) isolating said syntenic genomic region of said non-rice cereal that corresponds to said defined genomic region of rice.

[0048] The present invention provides a method for isolating a nucleic acid molecule in a cereal comprising: (A) defining a genomic region of rice by reference to a marker molecule, wherein said marker molecule comprises a nucleic acid sequence selected from the group consisting of SEQ ID NO: 1 through SEQ ID NO: 52202 or complement thereof or fragment of either; (B) identifying a syntenic genomic region of said cereal that corresponds to said defined genomic region of rice; and (C) isolating said syntenic genomic region of said cereal that corresponds to said defined genomic region of rice.

[0049] The present invention provides a method for interrogating a genomic region of a non-rice cereal comprising interrogating genomic DNA for the presence or absence of two marker molecules, wherein said two marker molecules comprise two nucleic acid sequences selected from the group consisting of SEQ ID NO: 1 through SEQ ID NO: 52202 or complement thereof or fragment of either, and detecting the presence or absence of said two marker molecules.

### DETAILED DESCRIPTION OF THE INVENTION

[0050] Agents of the invention:

[0051] (a) Nucleic Acid Molecules

[0052] Agents of the present invention include nucleic acid molecules and more specifically BACs or nucleic acid fragment molecules thereof.

[0053] Agents of the present invention include plant nucleic acid molecules and more specifically include rice, more preferably Oryza sativa L (japonica type), and more preferably Oryza sativa L (japonica type), cv. Nipponbare. A subset of the nucleic acid molecules of the present invention includes nucleic acid molecules that are marker molecules. Another subset of the nucleic molecules of the present invention includes nucleic acid molecules that are promoters and/or regulatory elements. Another subset of the nucleic acid molecules of the present invention includes nucleic acid molecules that encode a gene or fragment thereof. Another subset of the nucleic acid molecules of the present invention encodes proteins or fragments of proteins. In a preferred embodiment the nucleic acid molecules of the present invention are derived from rice, more preferably Oryza sativa L (japonica type), and more preferably Oryza sativa L (japonica type), cv. Nipponbare.

[0054] Fragment nucleic acid molecules may encode significant portion(s) of, or indeed most of, these nucleic acid molecules. For example, a fragment nucleic acid molecule can encode a rice protein or fragment thereof. Alternatively, the fragments may comprise smaller oligonucleotides (having from about 15 to about 400 nucleotide residues, and more preferably, about 15 to about 30 nucleotide residues, or about 50 to about 100 nucleotide residues, or about 100 to about 200 nucleotide residues, or about 200 to about 400 nucleotide residues, or about 275 to about 350 nucleotide residues).

[0055] As used herein, an agent, be it a naturally occurring molecule or otherwise may be “substantially purified”, if desired, referring to a molecule separated from substantially all other molecules normally associated with it in its native state. More preferably a substantially purified molecule is the predominant species present in a preparation. A substantially purified molecule may be greater than 60% free, preferably 75% free, more preferably 90% free, and most preferably 95% free from the other molecules (exclusive of solvent) present in the natural mixture. The term “substantially purified” is not intended to encompass molecules present in their native state.

[0056] The agents of the present invention will preferably be “biologically active” with respect to either a structural attribute, such as the capacity of a nucleic acid to hybridize to another nucleic acid molecule, or the ability of a protein to be bound by an antibody (or to compete with another molecule for such binding). Alternatively, such an attribute may be catalytic, and thus involve the capacity of the agent to mediate a chemical reaction or response.

[0057] The agents of the present invention may also be recombinant. As used herein, the term recombinant means any agent (e.g., DNA, peptide etc.), that is, or results, however indirect, from human manipulation of a nucleic acid molecule.

[0058] It is understood that the agents of the present invention may be labeled with reagents that facilitate detection of the agent (e.g., fluorescent labels (Prober, et al., Science 238:336-340 (1987); Albarella et al., EP 144914, chemical labels (Sheldon et al., U.S. Pat. No. 4,582,789; Albarella et al., U.S. Pat. No. 4,563,417, modified bases (Miyoshi et al., EP 119448, all of which are hereby incorporated by reference in their entirety).

[0059] It is further understood, that the present invention provides, for example, bacterial, viral, microbial, insect, fungal, algal and plant cells comprising an agent of the present invention.

[0060] Nucleic acid molecules or fragment nucleic acid molecules, or BACs or fragments thereof, of the present invention are capable of specifically hybridizing to other nucleic acid molecules under certain circumstances. As used herein, two nucleic acid molecules are said to be capable of specifically hybridizing to one another if the two molecules are capable of forming an anti-parallel, double-stranded nucleic acid structure. A nucleic acid molecule is said to be the “complement” of another nucleic acid molecule if they exhibit complete complementarity. As used herein, molecules are said to exhibit “complete complementarity” when every nucleotide of one of the molecules is complementary to a nucleotide of the other. Two molecules are said to be “minimally complementary” if they can hybridize to one another with sufficient stability to permit them to remain annealed to one another under at least conventional “low-stringency” conditions. Similarly, the molecules are said to be “complementary” if they can hybridize to one another with sufficient stability to permit them to remain annealed to one another under conventional “high-stringency” conditions. Conventional stringency conditions are described by Sambrook et al., Molecular Cloning, A Laboratory Manual, 2nd Ed., Cold Spring Harbor Press, Cold Spring Harbor, N.Y. (1989), and by Haymes et al., Nucleic Acid Hybridization, A Practical Approach, IRL Press, Washington, D.C. (1985), the entirety of which is herein incorporated by reference. Departures from complete complementarity are therefore permissible, as long as such departures do not completely preclude the capacity of the molecules to form a double-stranded structure. Thus, in order for a nucleic acid molecule, fragment nucleic acid molecule, BAC nucleic acid molecule or fragment BAC nucleic acid molecule to serve as a primer or probe it need only be sufficiently complementary in sequence to be able to form a stable double-stranded structure under the particular solvent and salt concentrations employed.

[0061] Appropriate stringency conditions which promote DNA hybridization are, for example, 6.0× sodium chloride/sodium citrate (SSC) at about 45° C., followed by a wash of 2.0×SSC at 50° C., are known to those skilled in the art or can be found in Current Protocols in Molecular Biology, John Wiley & Sons, N.Y. (1989), 6.3.1-6.3.6. For example, the salt concentration in the wash step can be selected from a low stringency of about 2.0×SSC at 50° C. to a high stringency of about 0.2×SSC at 50° C. In addition, the temperature in the wash step can be increased from low stringency conditions at room temperature, about 22° C., to high stringency conditions at about 65° C. Both temperature and salt may be varied, or either the temperature or the salt concentration may be held constant while the other variable is changed.

[0062] In a preferred embodiment, a nucleic acid of the present invention will specifically hybridize to one or more of the nucleic acid molecules set forth in SEQ ID NO: 1 through SEQ ID NO: 52202 or complements thereof under moderately stringent conditions, for example at about 2.0×SSC and about 40° C.

[0063] In a particularly preferred embodiment, a nucleic acid of the present invention will specifically hybridize to one or more of the nucleic acid molecules set forth in SEQ ID NO: 1 through SEQ ID NO: 52202 or complements thereof under high stringency conditions. In one aspect of the present invention, the nucleic acid molecules of the present invention have one or more of the nucleic acid sequences set forth in SEQ ID NO: 1 through to SEQ ID NO: 52202 or complements thereof. In another aspect of the present invention, one or more of the nucleic acid molecules of the present invention share between 100% and 90% sequence identity with one or more of the nucleic acid sequences set forth in SEQ ID NO: 1 through to SEQ ID NO: 52202 or complements thereof. In a further aspect of the present invention, one or more of the nucleic acid molecules of the present invention share between 100% and 95% sequence identity with one or more of the nucleic acid sequences set forth in SEQ ID NO: 1 through to SEQ ID NO: 52202 or complements thereof. In a more preferred aspect of the present invention, one or more of the nucleic acid molecules of the present invention share between 100% and 98% sequence identity with one or more of the nucleic acid sequences set forth in SEQ ID NO: 1 through to SEQ ID NO: 52202 or complements thereof. In an even more preferred aspect of the present invention, one or more of the nucleic acid molecules of the present invention share between 100% and 99% sequence identity with one or more of the sequences set forth in SEQ ID NO: 1 through to SEQ ID NO: 52202 or complements thereof. In a further, even more preferred aspect of the present invention, one or more of the nucleic acid molecules of the present invention exhibit 100% sequence identity with one or more nucleic acid molecules present within the genomic library herein designated BAC#OJ (Monsanto Company, St. Louis, Mo., United States of America).

[0064] (i) Nucleic Acid Molecule Markers

[0065] One aspect of the present invention concerns nucleic acid molecules SEQ ID NO: 1 through SEQ ID NO: 52202 or complements thereof and other nucleic acid molecules of the present invention, that contain microsatellites, single nucleotide substitutions (SNPs), repetitive elements or parts of repetitive elements or other markers. Microsatellites typically include a 1-6 nucleotide core element that are tandemly repeated from one to many thousands of times. A different “allele” occurs at an SSR locus as a result of changes in the number of times a core element is repeated, altering the length of the repeat region, (Brown et al., Methods of Genome Analysis in Plants, (ed.) Jauhar, CRC Press, Inc, Boca Raton, Fla., USA; London, England, UK, pp. 147-159, (1996), the entirety of which is herein incorporated by reference). SSR loci occur throughout plant genomes, and specific repeat motifs occur at different levels of abundance than those found in animals. The relative frequencies of all SSRs with repeat units of 1-6 nucleotides have been surveyed. The most abundant SSR is AAAAAT followed by Aₙ, AGₙ AAT, AAC, AGC, AAG, AATT, AAAT and AC. On average, 1 SSR is found every 21 and 65 kb in dicots and monocots. Fewer CG nucleotides are found in dicots than in monocots. There is no correlation between abundance of SSRs and nuclear DNA content. The abundance of all tri and tetranucleotide SSR combination jointly have been reported to be equivalent to that of the total di-nucleotide combinations. Mono- di- and tetra-nucleotide repeats are all located in noncoding regions of DNA while 57% of those trinucleotide SSRs containing CG were located within gene coding regions. All repeated trinucleotide SSRs composed entirely of AT are found in noncoding regions, (Brown et al., Methods of Genome Analysis in Plants, ed. Jauhar, CRC Press, Inc, Boca Raton, Fla., USA; London, England, UK, pp. 147-159 (1996)).

[0066] Microsatellites can be observed in SEQ NO: 1 to SEQ NO:52202 or complements thereof by using the BLASTN program to examine sequences for the presence/absence of microsatellites. In this system, raw sequence data is searched through databases, which store SSR markers collected from publications and 692 classes of di-, tri and tetranucleotide repeat markers generated by computer. Microsatellites can also be observed by screening the BAC library of the present invention by colony or plaque hybridization with a labeled probe containing microsatellite markers; isolating positive clones and sequencing the inserts of the positive clones; suitable primers flanking the microsatellite markers.

[0067] Single nucleotide polymorphisms (SNPs) are single base changes in genomic DNA sequence. They generally occur at greater frequency than other markers and are spaced with a greater uniformity throughout a genome than other reported forms of polymorphism. The greater frequency and uniformity of SNPs means that there is greater probability that such a polymorphism will be found near or in a genetic locus of interest than would be the case for other polymorphisms. SNPs are located in protein-coding regions and noncoding regions of a genome. Some of these SNPs may result in defective or variant protein expression (e.g., as a result of mutations or defective splicing). Analysis (genotyping) of characterized SNPs can require only a plus/minus assay rather than a lengthy measurement, permitting easier automation.

[0068] SNPs can be characterized using any of a variety of methods. Such methods include the direct or indirect sequencing of the site, the use of restriction enzymes (Botstein et al., Am. J. Hum. Genet. 32:314-331 (1980), the entirety of which is herein incorporated reference; Konieczny and Ausubel, Plant J. 4:403-410 (1993), the entirety of which is herein incorporated by reference), enzymatic and chemical mismatch assays (Myers et al., Nature 313:495-498 (1985), the entirety of which is herein incorporated by reference), allele-specific PCR (Newton et al., Nucl. Acids Res. 17:2503-2516 (1989), the entirety of which is herein incorporated by reference; Wu et al., Proc. Natl. Acad. Sci. USA 86:2757-2760 (1989), the entirety of which is herein incorporated by reference), ligase chain reaction (Barany, Proc. Natl. Acad. Sci. USA 88:189-193 (1991), the entirety of which is herein incorporated by reference), single-strand conformation polymorphism analysis (Labrune et al., Am. J. Hum. Genet. 48: 1115-1120 (1991), the entirety of which is herein incorporated by reference), primer-directed nucleotide incorporation assays (Kuppuswami et al., Proc. Natl. Acad. Sci. USA 88:1143-1147 (1991), the entirety of which is herein incorporated by reference), dideoxy fingerprinting (Sarkar et al., Genomics 13:441-443 (1992), the entirety of which is herein incorporated by reference), solid-phase ELISA-based oligonucleotide ligation assays (Nikiforov et al., Nucl. Acids Res. 22:4167-4175 (1994), the entirety of which is herein incorporated by reference), oligonucleotide fluorescence-quenching assays (Livak et al., PCR Methods Appl. 4:357-362 (1995a), the entirety of which is herein incorporated by reference), 5′-nuclease allele-specific hybridization TaqMan™ assay (Livak et al., Nature Genet. 9:341-342 (1995), the entirety of which is herein incorporated by reference), template-directed dye-terminator incorporation (TDI) assay (Chen and Kwok, Nucl. Acids Res. 25:347-353 (1997), the entirety of which is herein incorporated by reference), allele-specific molecular beacon assay (Tyagi et al., Nature Biotech 16: 49-53 (1998), the entirety of which is herein incorporated by reference), PinPoint assay (Haff and Smirnov, Genome Res. 7: 378-388 (1997), the entirety of which is herein incorporated by reference), and dCAPS analysis (Neff et al., Plant J. 14:387-392 (1998), the entirety of which is herein incorporated by reference).

[0069] SNPs can be observed by examining sequences of overlapping clones in the BAC library according to the method described by Taillon-Miller et al. Genome Res. 8:748-754 (1998), the entirety of which is herein incorporated by reference. SNPs can also be observed by screening the BAC library of the present invention by colony or plaque hybridization with a labeled probe containing SNP markers; isolating positive clones and sequencing the inserts of the positive clones; suitable primers flanking the SNP markers.

[0070] Genetic markers of the present invention include “dominant” or “codominant” markers. “Codominant markers” reveal the presence of two or more alleles (two per diploid individual) at a locus. “Dominant markers” reveal the presence of only a single allele per locus. The presence of the dominant marker phenotype (e.g., a band of DNA) is an indication that one allele is present in either the homozygous or heterozygous condition. The absence of the dominant marker phenotype (e.g., absence of a DNA band) is merely evidence that “some other” undefined allele is present. In the case of populations where individuals are predominantly homozygous and loci are predominately dimorphic, dominant and codominant markers can be equally valuable. As populations become more heterozygous and multi-allelic, codominant markers often become more informative of the genotype than dominant markers.

[0071] In addition to SSRs and SNPs, repetitive elements can be used as markers. For most eukaryotes, interspersed repeat sequence elements are typically mobile genetic elements (Wright et al., Genetics 142:569-578 (1996), the entirety of which is herein incorporated by reference). They are ubiquitous in most living organisms and are present in copy numbers ranging from just a few elements to tens or hundreds or thousands per genome. In the latter case, they can represent a major fraction of the genome. For example, transposable elements have been estimated to make up greater than 50% of the maize genome (Kidwell, and Lisch Proc. Natl. Acad. Sci. USA 94:7704-7711 (1997), the entirety of which is herein incorporated by reference).

[0072] Transposable elements are classified in families according to their sequence similarity. Two major classes are distinguished by their differing modes of transposition. Class I elements are retroelements that use reverse transcriptase to transpose by means of an RNA intermediate. They include long terminal repeat retrotransposons and long and short interspersed elements (LINES and SINES, respectively). Class II elements transpose directly from DNA to DNA and include transposons such as the Activator-Dissociation (Ac-Ds) family in maize, the P element in Drosophila and the Tc-1 element in Caenhorabditis elegans. Additionally, a category of transposable elements has been discovered whose transpositon mechanism is not yet known. These miniature inverted-repeat transposable elements (MITEs) have some properties of both class I and II elements. They are short (100400 bp in length) and none so far has been found to have any coding potential. They are present in high copy number (3,000-10,000) per genome and have target site preferences for TAA or TA in plants (Kidwell and Lisch, Proc. Natl. Acad. Sci. USA 94:7704-7711 (1997)).

[0073] Insertion elements are found in two areas of the genome. Some are located in regions distant from gene sequences such as in the heterochromatin or in regions between genes; other repeat elements are found in or near single copy sequences. The insertion of an Ac-Ds element into wx-m9, an allele of the waxy locus in maize is an example of a repetitive element found within a coding region. The effect of this insertion is attenuated by the loss through splicing of the transposable element after transcription (Kidwell and Lisch, Proc. Natl. Acad. Sci. USA 94:7704-7711 (1997)).

[0074] The genetic variability resulting from transposable elements ranges from changes in the size and arrangement of whole genomes to changes in single nucleotides. They may produce major effects on phenotypic traits or small silent changes detectable only at the DNA sequence level. Transposable elements may also produce variation when they excise, leaving small footprints of their previous presence (Kidwell and Lisch, Proc. Natl. Acad. Sci. USA 94:7704-7711 (1997)).

[0075] In addition, other markers such as AFLP markers, RFLP markers, RAPD markers, phenotypic markers or isozyme markers can be utilized (Walton, Seed World 22-29, Jul., 1993), the entirety of which is herein incorporated by reference; Burow and Blake, Molecular Dissection of Complex Traits, 13-29, Eds. Paterson, CRC Press, New York (1988), the entirety of which is herein incorporated by reference). DNA markers can be developed from nucleic acid molecules using restriction endonucleases, the PCR and/or DNA sequence information. RFLP markers result from single base changes or insertions/deletions. These codominant markers are highly abundant in plant genomes, have a medium level of polymorphism and are developed by a combination of restriction endonuclease digestion and Southern blotting hybridization. CAPS are similarly developed from restriction nuclease digestion but only of specific PCR products. These markers are also codominant, have a medium level of polymorphism and are highly abundant in the genome. The CAPS result from single base changes and insertions/deletions. Another marker type, RAPDs, are developed from DNA amplification with random primers and result from single base changes and insertions/deletions in plant genomes. They are dominant markers with a medium level of polymorphisms and are highly abundant. AFLP markers require using the PCR on a subset of restriction fragments from extended adapter primers. These markers are both dominant and codominant, are highly abundant in genomes and exhibit a medium level of polymorphism. SSRs require DNA sequence information. These codominant markers result from repeat length changes, are highly polymorphic, and do not exhibit as high a degree of abundance in the genome as CAPS, AFLPs and RAPDs. SNPs also require DNA sequence information. These codominant markers result from single base substitutions. They are highly abundant and exhibit a medium of polymorphism (Rafalski et al., In: Nonmammalian Genomic Analysis, ed. Birren and Lai, Academic Press, San Diego, Calif., pp. 75-134 (1996), the entirety of which is herein incorporated by reference). Methods to isolate such markers are known in the art.

[0076] Long Terminal repeat retrotransposons and MITEs have been found to be associated with the genes of many plants where some of the transposable elements contribute regulatory sequences. MITEs such as the Tourist element in maize and the Stowaway element in Sorghum are found frequently in the 5′ and 3′ noncoding regions of genes and are frequently associated with the regulatory regions of genes of diverse flowering plants (Kidwell and Lisch, Proc. Natl. Acad. Sci. USA 94:7704-7711 (1997)). It is understood that one or more of the Long Terminal repeat retrotransposons and/or MITES may be a marker, and even more preferably a marker for a gene.

[0077] (ii) Nucleic Acid Molecules Comprising Regulatory Elements

[0078] Another class of agents of the present invention are nucleic acid molecules having promoter regions or partial promoter regions within SEQ ID NO: 1 through SEQ ID NO: 52202 or other nucleic acid molecules of the present invention. Such promoter regions are typically found upstream of the trinucleotide ATG sequence at the start site of a protein coding region.

[0079] As used herein, a promoter region is a region of a nucleic acid molecule that is capable, when located in cis to a nucleic acid sequence that encodes for a protein or fragment thereof to function in a way that directs expression of one or more mRNA molecules that encodes for the protein or fragment thereof.

[0080] Promoters of the present invention can include between about 300 bp upstream and about 10 kb upstream of the trinucleotide ATG sequence at the start site of a protein coding region. Promoters of the present invention can preferably include between about 300 bp upstream and about 5 kb upstream of the trinucleotide ATG sequence at the start site of a protein coding region. Promoters of the present invention can more preferably include between about 300 bp upstream and about 2 kb upstream of the trinucleotide ATG sequence at the start site of a protein coding region. Promoters of the present invention can include between about 300 bp upstream and about 1 kb upstream of the trinucleotide ATG sequence at the start site of a protein coding region. While in many circumstances a 300 bp promoter may be sufficient for expression, additional sequences may act to further regulate expression, for example, in response to biochemical, developmental or environmental signals.

[0081] It is also preferred that the promoters of the present invention contain a CAAT and a TATA cis element. Moreover, the promoters of the present invention can contain one or more cis elements in addition to a CAAT and a TATA box.

[0082] By “regulatory element” it is intended a series of nucleotides that determines if, when, and at what level a particular gene is expressed. The regulatory DNA sequences specifically interact with regulatory or other proteins. Many regulatory elements act in cis (“cis elements”) and are believed to affect DNA topology, producing local conformations that selectively allow or restrict access of RNA polymerase to the DNA template or that facilitate selective opening of the double helix at the site of transcriptional initiation. Cis elements occur within, but are not limited to promoters, and promoter modulating sequences (inducible elements). Cis elements can be identified using known cis elements as a target sequence or target motif in the BLAST programs of the present invention.

[0083] Promoters of the present invention include homologues of cis elements known to effect gene regulation that show homology with the nucleic acid molecules of the present invention. These cis elements include, but are not limited to, oxygen responsive cis elements (Cowen et al., J. Biol. Chem. 268(36):26904-26910 (1993) the entirety of which is herein incorporated by reference), light regulatory elements (Bruce and Quaill, Plant Cell 2 (11):1081-1089 (1990) the entirety of which is herein incorporated by reference; Bruce et al., EMBO J. 10:3015-3024 (1991), the entirety of which is herein incorporated by reference; Rocholl et al., Plant Sci. 97:189-198 (1994), the entirety of which is herein incorporated by reference; Block et al., Proc. Natl. Acad. Sci. USA 87:5387-5391 (1990), the entirety of which is herein incorporated by reference; Giuliano et al., Proc. Natl. Acad. Sci. USA 85:7089-7093 (1988), the entirety of which is herein incorporated by reference; Staiger et al., Proc. Natl. Acad. Sci. USA 86:6930-6934 (1989), the entirety of which is herein incorporated by reference; Izawa et al., Plant Cell 6:1277-1287 (1994), the entirety of which is herein incorporated by reference; Menkens et al., Trends in Biochemistry 20:506-510 (1995), the entirety of which is herein incorporated by reference; Foster et al., FASEB J. 8:192-200 (1994), the entirety of which is herein incorporated by reference; Plesse et al., Mol Gen Gene 254:258-266 (1997), the entirety of which is herein incorporated by reference; Green et al., EMBO J. 6:2543-2549 (1987), the entirety of which is herein incorporated by reference; Kuhlemeier et al., Ann. Rev Plant Physiol. 38:221-257 (1987), the entirety of which is herein incorporated by reference; Villain et al., J. Biol. Chem. 271:32593-32598 (1996), the entirety of which is herein incorporated by reference; Lam et al., Plant Cell 2:857-866 (1990), the entirety of which is herein incorporated by reference; Gilmartin et al., Plant Cell 2:369-378 (1990), the entirety of which is herein incorporated by reference; Datta et al., Plant Cell 1:1069-1077 (1989) the entirety of which is herein incorporated by reference; Gilmartin et al., Plant Cell 2:369-378 (1990), the entirety of which is herein incorporated by reference; Castresana et al., EMBO J. 7:1929-1936 (1988), the entirety of which is herein incorporated by reference; Ueda et al., Plant Cell 1:217-227 (1989), the entirety of which is herein incorporated by reference; Terzaghi et al., Annu. Rev. Plant Physiol. Plant Mol. Biol. 46:445-474 (1995), the entirety of which is herein incorporated by reference; Green et al., EMBO J. 6:2543-2549 (1987), the entirety of which is herein incorporated by reference; Villain et al., J. Biol. Chem. 271:32593-32598 (1996), the entirety of which is herein incorporated by reference; Tjaden et al., Plant Cell 6: 107-118 (1994), the entirety of which is herein incorporated by reference; Tjaden et al., Plant Physiol. 108:1109-1117 (1995), the entirety of which is herein incorporated by reference; Ngai et al., Plant J. 12:1021-1234 (1997), the entirety of which is herein incorporated by reference; Bruce et al., EMBO J. 10:3015-3024 (1991), the entirety of which is herein incorporated by reference; Ngai et al., Plant J. 12:1021-1034 (1997), the entirety of which is herein incorporated by reference), elements responsive to gibberellin, (Muller et al., J. Plant Physiol. 145:606-613 (1995), the entirety of which is herein incorporated by reference; Croissant et al., Plant Science 116:27-35 (1996), the entirety of which is herein incorporated by reference; Lohmer et al., EMBO J. 10:617-624 (1991), the entirety of which is herein incorporated by reference; Rogers et al., Plant Cell 4:1443-1451 (1992), the entirety of which is herein incorporated by reference; Lanahan et al., Plant Cell 4:203-211 (1992) the entirety of which is herein incorporated by reference; Skriver et al., Proc. Natl. Acad. Sci. USA 88:7266-7270 (1991) the entirety of which is herein incorporated by reference; Gilmartin et al., Plant Cell 2:369-378 (1990), the entirety of which is herein incorporated by reference; Huang et al., Plant Mol. Biol. 14:655-668 (1990), the entirety of which is herein incorporated by reference, Gubler et al., Plant Cell 7:1879-1891 (1995), the entirety of which is herein incorporated by reference), elements responsive to abscisic acid, (Busk et al., Plant Cell 9:2261-2270 (1997), the entirety of which is herein incorporated by reference; Guiltinan et al., Science 250:267-270 (1990), the entirety of which is herein incorporated by reference; Shen et al., Plant Cell 7:295-307 (1995) the entirety of which is herein incorporated by reference; Shen et al., Plant Cell 8:1107-1119 (1996), the entirety of which is herein incorporated by reference; Seo et al., Plant Mol. Biol. 27:1119-1131 (1995), the entirety of which is herein incorporated by reference; Marcotte et al., Plant Cell 1:969-976 (1989) the entirety of which is herein incorporated by reference; Shen et al., Plant Cell 7:295-307 (1995), the entirety of which is herein incorporated by reference; Iwasaki et al., Mol Gen Genet. 247:391-398 (1995), the entirety of which is herein incorporated by reference; Hattori et al., Genes Dev. 6:609-618 (1992), the entirety of which is herein incorporated by reference; Thomas et al., Plant Cell 5:1401-1410 (1993), the entirety of which is herein incorporated by reference), elements similar to abscisic acid responsive elements, (Ellerstrom et al., Plant Mol. Biol. 32:1019-1027 (1996), the entirety of which is herein incorporated by reference), auxin responsive elements (Liu et al., Plant Cell 6:645-657 (1994) the entirety of which is herein incorporated by reference; Liu et al., Plant Physiol. 115:397-407 (1997), the entirety of which is herein incorporated by reference; Kosugi et al., Plant J. 7:877-886 (1995), the entirety of which is herein incorporated by reference; Kosugi et al., Plant Cell 9:1607-1619 (1997), the entirety of which is herein incorporated by reference; Ballas et al., J. Mol. Biol. 233:580-596 (1993), the entirety of which is herein incorporated by reference), a cis element responsive to methyl jasmonate treatment (Beaudoin and Rothstein, Plant Mol. Biol. 33:835-846 (1997), the entirety of which is herein incorporated by reference), a cis element responsive to abscisic acid and stress response (Straub et al., Plant Mol. Biol. 26:617-630 (1994), the entirety of which is herein incorporated by reference), ethylene responsive cis elements (Itzhaki et al., Proc. Natl. Acad. Sci. USA 91:8925-8929 (1994), the entirety of which is herein incorporated by reference; Montgomery et al., Proc. Natl. Acad. Sci. USA 90:5939-5943 (1993), the entirety of which is herein incorporated by reference; Sessa et al., Plant Mol. Biol. 28:145-153 (1995), the entirety of which is herein incorporated by reference; Shinshi et al., Plant Mol. Biol. 27:923-932 (1995), the entirety of which is herein incorporated by reference), salicylic acid cis responsive elements, (Strange et al., Plant J. 11:1315-1324 (1997), the entirety of which is herein incorporated by reference; Qin et al., Plant Cell 6:863-874 (1994), the entirety of which is herein incorporated by reference), a cis element that responds to water stress and abscisic acid (Lam et al., J. Biol. Chem. 266:17131-17135 (1991), the entirety of which is herein incorporated by reference; Thomas et al., Plant Cell 5:1401-1410 (1993), the entirety of which is herein incorporated by reference; Pla et al., Plant Mol Biol 21:259-266 (1993), the entirety of which is herein incorporated by reference), a cis element essential for M phase-specific expression (Ito et al., Plant Cell 10:331-341 (1998), the entirety of which is herein incorporated by reference), sucrose responsive elements (Huang et al., Plant Mol. Biol. 14:655-668 (1990), the entirety of which is herein incorporated by reference; Hwang et al., Plant Mol Biol 36:331-341 (1998), the entirety of which is herein incorporated by reference; Grierson et al., Plant J. 5:815-826 (1994), the entirety of which is herein incorporated by reference), heat shock response elements (Pelham et al., Trends Genet. 1:31-35 (1985), the entirety of which is herein incorporated by reference), elements responsive to auxin and/or salicylic acid and also reported for light regulation (Lam et al., Proc. Natl. Acad. Sci. USA 86:7890-7897 (1989), the entirety of which is herein incorporated by reference; Benfey et al., Science 250:959-966 (1990), the entirety of which is herein incorporated by reference), elements responsive to ethylene and salicylic acid (Ohme-Takagi et al., Plant Mol. Biol. 15:941-946 (1990), the entirety of which is herein incorporated by reference), elements responsive to wounding and abiotic stress (Loake et al., Proc. Natl. Acad. Sci. USA 89:9230-9234 (1992), the entirety of which is herein incorporated by reference; Mhiri et al., Plant Mol. Biol. 33:257-266 (1997), the entirety of which is herein incorporated by reference), antoxidant response elements (Rushmore et al., J. Biol. Chem. 266:11632-11639, the entirety of which is herein incorporated by reference; Dalton et al., Nucleic Acids Res. 22:5016-5023 (1994), the entirety of which is herein incorporated by reference), Sph elements (Suzuki et al., Plant Cell 9:799-807 1997), the entirety of which is herein incorporated reference), Elicitor responsive elements, (Fukuda et al., Plant Mol. Biol. 34:81-87 (1997), the entirety of which is herein incorporated by reference; Rushton et al., EMBO J. 15:5690-5700 (1996), the entirety of which is herein incorporated by reference), metal responsive elements (Stuart et al., Nature 317:828-831 (1985), the entirety of which is herein incorporated by reference; Westin et al., EMBO J. 7:3763-3770 (1988), the entirety of which is herein incorporated by reference; Thiele et al., Nucleic Acids Res. 20:1183-1191 (1992), the entirety of which is herein incorporated by reference; Faisst et al., Nucleic Acids Res. 20:3-26 (1992), the entirety of which is herein incorporated by reference), low temperature responsive elements, (Baker et al., Plant Mol. Biol. 24:701-713 (1994), the entirety of which is herein incorporated by reference; Jiang et al., Plant Mol. Biol. 30:679-684 (1996), the entirety of which is herein incorporated by reference; Nordin et al., Plant Mol. Biol. 21:641-653 (1993), the entirety of which is herein incorporated by reference; Zhou et al., J. Biol. Chem. 267:23515-23519 (1992), the entirety of which is herein incorporated by reference), drought responsive elements, (Yamaguchi et al., Plant Cell 6:251-264 (1994), the entirety of which is herein incorporated by reference; Wang et al., Plant Mol. Biol. 28:605-617 (1995), the entirety of which is herein incorporated by reference; Bray E A, Trends in Plant Science 2:48-54 (1997), the entirety of which is herein incorporated by reference) enhancer elements for glutenin, (Colot et al., EMBO J. 6:3559-3564 (1987), the entirety of which is herein incorporated by reference; Thomas et al., Plant Cell 2:1171-1180 (1990), the entirety of which is incorporated by reference; Kreis et al., Philos. Trans. R. Soc. Lond., B314:355-365 (1986), the entirety of which is herein incorporated by reference), light-independent regulatory elements, (Lagrange et al., Plant Cell 9:1469-1479 (1997), the entirety of which is herein incorporated by reference; Villain et al., J. Biol. Chem. 271:32593-32598 (1996), the entirety of which is herein incorporated by reference), OCS enhancer elements, (Bouchez et al., EMBO J. 8:4197-4204 (1989), the entirety of which is herein incorporated by reference; Foley et al., Plant J. 3:669-679 (1993), the entirety of which is herein incorporated by reference), ACGT elements, (Foster et al., FASEB J. 8:192-200 (1994), the entirety of which is herein incorporated by reference; Izawa et al., Plant Cell 6:1277-1287 (1994), the entirety of which is herein incorporated by reference; Izawa et al., J. Mol. Biol. 230:1131-1144 (1993) the entirety of which is herein incorporated by reference), negative cis elements in plastid related genes, (Zhou et al., J. Biol. Chem. 267:23515-23519 (1992), the entirety of which is herein incorporated by reference; Lagrange et al., Mol. Cell. Biol. 13:2614-2622 (1993), the entirety of which is herein incorporated by reference; Lagrange et al., Plant Cell 9:1469-1479 (1997), the entirety of which is herein incorporated by reference; Zhou et al., J. Biol. Chem. 267:23515-23519 (1992), the entirety of which is herein incorporated by reference), prolamin box elements, (Forde et al., Nucleic Acids Res. 13:7327-7339 (1985), the entirety of which is herein incorporated by reference; Colot et al., EMBO J. 6:3559-3564 (1987), the entirety of which is herein incorporated by reference; Thomas et al., Plant Cell 2:1171-1180 (1990), the entirety of which is herein incorporated by reference; Thompson et al, Plant Mol. Biol. 15:755-764 (1990), the entirety of which is herein incorporated by reference; Vicente et al., Proc. Natl. Acad. Sci. USA 94:7685-7690 (1997), the entirety of which is herein incorporated by reference), elements in enhancers from the IgM heavy chain gene (Gillies et al., Cell 33:717-728 (1983), the entirety of which is herein incorporated by reference; Whittier et al., Nucleic Acids Res. 15:2515-2535 (1987), the entirety of which is herein incorporated by reference).

[0084] (iii) Nucleic Acid Molecules Comprising Genes or Fragments Thereof

[0085] Nucleic acid molecules of the present invention can comprise one or more genes or fragments thereof. Such genes or fragments thereof include homologues of known genes or protein coding regions in other organisms or genes or fragments thereof that elicit only limited or no matches with known genes or protein coding regions.

[0086] Genomic sequences can be screened for the presence of protein homologues or genes utilizing one or a number of different search algorithms have that been developed, one example of which are the suite of programs referred to as BLAST programs. Other examples of suitable programs that can be utilized are known in the art, several of which are described above in the Background and under the section titled “Uses of the Agents of the Invention.” In addition, unidentified reading frames may be screened for protein coding regions by prediction software such as GenScan, which is located at http://gnomic.standford.edu/GENSCANW.html.

[0087] In a preferred embodiment of the present invention, the rice protein or fragment thereof of the present invention is a homologue of another plant protein. In another preferred embodiment of the present invention, the rice protein or fragment thereof is a homologue of a plant protein. In another preferred embodiment of the present invention, the rice protein or fragment thereof of the present invention is a homologue of a cereal protein. In another preferred embodiment of the present invention, the rice protein or fragment thereof of the present invention is a homologue of a fungal protein. In another preferred embodiment of the present invention, the rice protein or fragment thereof of the present invention is a homologue of a mammalian protein. In another preferred embodiment of the present invention, the rice protein or fragment thereof of the present invention is a homologue of a bacterial protein. In another preferred embodiment of the present invention, the rice protein or fragment thereof of the present invention is a homologue of an algal protein.

[0088] In a preferred embodiment of the present invention, the rice protein or fragments thereof or nucleic acid molecule or fragment thereof has a BLAST score of more than 200, preferably a BLAST score of more than 300, even more preferably a BLAST score of more than 400 with its homologue.

[0089] In another preferred embodiment of the present invention, the nucleic acid molecule encoding the rice protein or fragment thereof and/or nucleic acid molecule or fragment thereof exhibits a % identity with its homologue of between about 25% and about 40%, more preferably of between about 40 and about 70%, even more preferably of between about 70% and about 90%, and even more preferably between about 90% and 99%. In another preferred embodiment, of the present invention, the nucleic acid molecule encoding the rice protein or fragment thereof exhibits a % identity with its homologue of 100%.

[0090] In a preferred embodiment of the present invention, the rice protein or fragment thereof or nucleic acid molecule or fragment thereof exhibits a % coverage of between about 0% and about 33%, more preferably of between about 34% and about 66%, and even more preferably of between about 67% and about 100%.

[0091] Genomic sequences can be screened for the presence of proteins utilizing one or a number of different search algorithms have that been developed, one example of which are the suite of programs referred to as BLAST programs. Other examples of suitable programs that can be utilized are known in the art, several of which are described above in the Background. Nucleic acid molecules of the present invention also include non-rice homologues. Preferred non-rice homologues are selected from the group consisting of alfalfa, Arabidopsis barley, Brassica, broccoli, cabbage, citrus, cotton, garlic, oat, oilseed rape, onion, canola, flax, an ornamental plant, maize, pea, peanut, pepper, potato, rye, sorghum, soybean, strawberry, sugarcane, sugarbeet, tomato, wheat, poplar, pine, fir, eucalyptus, apple, lettuce, lentils, grape, banana, tea, turf grasses, sunflower, oil palm, and Phaseolus.

[0092] In a preferred embodiment, nucleic acid molecules having SEQ ID NO: 1 through SEQ ID NO: 52202 or complements and fragments of either or other nucleic acid molecules of the present invention can be utilized to obtain such homologues.

[0093] The degeneracy of the genetic code, which allows different nucleic acid sequences to code for the same protein or peptide, is known in the literature. (U.S. Pat. No. 4,757,006, the entirety of which is herein incorporated by reference). As used herein a nucleic acid molecule is degenerate of another nucleic acid molecule when the nucleic acid molecules encode for the same amino acid sequences but comprise different nucleotide sequences. An aspect of the present invention is that the nucleic acid molecules of the present invention include nucleic acid molecules that are degenerate of those set forth in SEQ ID NO: 1 through to SEQ ID NO: 52202 or complements thereof.

[0094] In a further aspect of the present invention, one or more of the nucleic acid molecules of the present invention differ in nucleic acid sequence from those encoding a rice protein or fragment thereof in SEQ ID NO: 1 through SEQ ID NO: 52202 or complements thereof due to the degeneracy in the genetic code in that they encode the same protein but differ in nucleic acid sequence. In another further aspect of the present invention, one or more of the nucleic acid molecules of the present invention differ in nucleic acid sequence from those encoding a rice homologue or fragment thereof in SEQ ID NO: 1 through SEQ ID NO: 52202 or complements thereof due to the fact that the different nucleic acid sequence encodes a protein having one or more conservative amino acid residues. In such amino acid sequences, one or more amino acids in the fundamental sequence are substituted with another amino acid(s), the charge and polarity of which are similar to that of the native amino acid, i.e., a conservative amino acid substitution, resulting in a silent change.

[0095] Substitutes for an amino acid within the fundamental polypeptide sequence can be selected from other members of the class to which the naturally occurring amino acid belongs. Amino acids can be divided into the following four groups: (1) acidic amino acids, (2) basic amino acids, (3) neutral polar amino acids, and (4) neutral nonpolar amino acids. Representative amino acids within these various groups include, but are not limited to, (1) acidic (negatively charged) amino acids such as aspartic acid and glutamic acid; (2) basic (positively charged) amino acids such as arginine, histidine, and lysine; (3) neutral polar amino acids such as glycine, serine, threonine, cysteine, cystine, tyrosine, asparagine, and glutamine; and (4) neutral nonpolar (hydrophobic) amino acids such as alanine, leucine, isoleucine, valine, proline, phenylalanine, tryptophan, and methionine.

[0096] Conservative amino acid changes within the fundamental polypeptides sequence can be made by substituting one amino acid within one of these groups with another amino acid within the same group.

[0097] It is also understood that certain amino acids may be substituted for other amino acids in a protein structure without appreciable loss of interactive binding capacity with structures such as, for example, antigent-binding regions of antibodies or binding sites on substrate molecules. Because it is the interactive capacity and nature of a protein that defines that protein's biological functional activity, certain amino acid sequence substitutions can be made in a protein sequence and, of course, its underlying DNA coding sequence and, nevertheless, obtain a protein with like properties.

[0098] In making such changes, the hydropathic index of amino acids may be considered. The importance of the hydropathic amino acid index in conferring interactive biological function on a protein is generally understood in the art (Kyte and Doolittle, J. Mol. Biol. 157, 105-132 (1982), herein incorporated by reference in its entirety). It is accepted that the relative hydropathic character of the amino acid contributes to the secondary structure of the resultant protein, which in turn defines the interaction of the protein with other molecules, for example, enzymes, substrates, receptors, DNA, antibodies, antigens, and the like.

[0099] Each amino acid has been assigned a hydropathic index on the basis of its hydrophobicity and charge characteristics (Kyte and Doolittle, J. Mol. Biol. 157, 105-132 (1982); these are isoleucine (+4.5), valine (+4.2), leucine (+3.8), phenylalanine (+2.8), cysteine/cystine (+2.5), methionine (+1.9), alanine (+1.8), glycine (−0.4), threonine (−0.7), serine (−0.8), tryptophan (−0.9), tyrosine (−1.3), proline (−1.6), histidine (−3.2), glutamate (−3.5), glutamine (−3.5), aspartate (−3.5), asparagine (−3.5), lysine (−3.9), and arginine (−4.5).

[0100] It is known in the art that certain amino acid may be substituted by other amino acids having a similar hydropathic index or score and still result in a protein with similar biological activities, i.e., still obtain a biologically functional equivalent protein. In making such changes, the substitution of amino acids whose hydropathic indices are within ±2 is preferred, those which are within ±1 are particularly preferred, and those within ±0.5 are even more particularly preferred.

[0101] It is also understood in the art that the substitution of like amino acids can be made effectively on the basis of hydrophilicity. U.S. Pat. No. 4,554,101, incorporated herein by reference in its entirety, states that the greatest local average hydrophilicity of a protein, as govern by the hydrophilicity of its adjacent amino acids, correlates with a biological property of the protein.

[0102] As detailed in U.S. Pat. No. 4,554,101, the following hydrophilicity values have been assigned to amino acid residues: arginine (+3.0), lysine (+3.0), aspartate (+3.0±1), glutamate (+3.0±1), serine (+0.3), asparagine (+0.2), glutamine (+0.2), glycine (0), threonine (−0.4), proline (−0.5±1), alanine (−0.5), histidine (−0.5), cysteine (−1.0), methionine (−1.3), valine (−1.5), leucine (−1.8), isoleucine (−1.8), tyrosine (−2.3), phenylalanine (−2.5), and tryptophan (−3.4).

[0103] It is known in the art that certain amino acid may be substituted by other amino acids having a similar hydrophilicity value and still result in a protein with similar biological activities, i.e., still obtain a biologically functional equivalent protein. In making such changes, the substitution of amino acids whose hydrophilicity values are within ±2 is preferred, those which are within ±1 are particularly preferred, and those within ±0.5 are even more particularly preferred.

[0104] (iv) Nucleic Acid Molecules Comprising Introns and/or Intron/Exon Junctions

[0105] Nucleic acid molecules of the present invention can comprise an intron and/or one or more intron/exon junction. Sequences of the present invention can be screened for introns and intron/exon junctions utilizing one or a number of different search algorithms that have that been developed, one example of which are the suite of programs referred to as BLAST programs. Other examples of suitable programs that can be utilized are known in the art, several of which are described above in the Background and in the section entitled “Uses of the Agents of the Present Invention.”

[0106] (b) Protein and Peptide Molecules

[0107] A class of agents includes one or more of the protein or peptide molecules, including those encoded by nucleic acid molecules disclosed in Table 1, fragments thereof or complements thereof or one or more of the proteins encoded by a nucleic acid molecule or fragment thereof or peptide molecules encoded by other nucleic acid agents of the present invention. Protein and peptide molecules can be identified using known protein or peptide molecules as a target sequence or target motif in the BLAST programs of the present invention. In a preferred embodiment, the protein or peptide molecules of the present invention are derived from rice and more preferably Oryza sativa L (japonica type), more preferably Oryza sativa L (japonica type), cv. Nipponbare. As used herein, the term “protein molecule” or “peptide molecule” includes any molecule that comprises five or more amino acids. It is well known in the art that proteins or peptides may undergo modification, including post-translational modifications, such as, but not limited to, disulfide bond formation, glycosylation, phosphorylation, or oligomerization. Thus, as used herein, the term “protein molecule” or “peptide molecule” includes any protein molecule that is modified by any biological or non-biological process. The terms “amino acid” and “amino acids” refer to all naturally occurring L-amino acids. This definition is meant to include norleucine, ornithine, homocysteine, and homoserine.

[0108] One or more of the protein or fragments of peptide molecules may be produced via chemical synthesis, or more preferably, by expression in a suitable bacterial or eukaryotic host. Suitable methods for expression are described by Sambrook et al., Molecular Cloning, A Laboratory Manual, 2nd Edition, Cold Spring Harbor Press, Cold Spring Harbor, N.Y. (1989), or similar texts.

[0109] A “protein fragment” is a peptide or polypeptide molecule whose amino acid sequence comprises a subset of the amino acid sequence of that protein. A protein or fragment thereof that comprises one or more additional peptide regions not derived from that protein is a “fusion” protein. Such molecules may be derivatized to contain carbohydrate or other moieties (such as keyhole limpet hemocyanin, etc.). Fusion protein or peptide molecules of the present invention are preferably produced via recombinant means.

[0110] Another class of agents comprises protein or peptide molecules encoded by SEQ ID NO: 1 through SEQ ID NO: 52202 or complements thereof or, fragments or fusions thereof in which conservative, non-essential, or not relevant, amino acid residues have been added, replaced, or deleted. An example of such a homologue is the homologue protein of all non-rice plant species, including but not limited to alfalfa, barley, Brassica, broccoli, cabbage, citrus, cotton, garlic, oat, oilseed rape, onion, canola, flax, an ornamental plant, pea, peanut, pepper, potato, maize, rye, sorghum, soybean, strawberry, sugarcane, sugarbeet, tomato, wheat, poplar, pine, fir, eucalyptus, apple, lettuce, peas, lentils, grape, banana, wheat, tea, turf grasses, etc. Particularly preferred non-rice plants to utilize for the isolation of homologues would include alfalfa, barley, cotton, oat, oilseed rape, maize, canola, ornamentals, sugarcane, sugarbeet, tomato, potato, wheat, and turf grasses. Such a homologue can be obtained by any of a variety of methods. Most preferably, as indicated above, one or more of the disclosed sequences (SEQ ID NO: 1 through SEQ ID NO: 52202 or complements thereof) will be used to define a pair of primers that may be used to isolate the homologue-encoding nucleic acid molecules from any desired species. Such molecules can be expressed to yield homologues by recombinant means. A homologue can also be generated by molecular evolution or DNA shuffling techniques, so that the molecule retains at least one function or structure characteristic of the original protein (see, for example, U.S. Pat. No. 5,811,238).

[0111] (c) Antibodies

[0112] One aspect of the present invention concerns antibodies, single-chain antigen binding molecules, or other proteins that specifically bind to one or more of the protein or peptide molecules of the present invention and their homologues, fusions or fragments. Such antibodies may be used to quantitatively or qualitatively detect the protein or peptide molecules of the present invention. As used herein, an antibody or peptide is said to “specifically bind” to a protein or peptide molecule of the present invention if such binding is not competitively inhibited by the presence of non-related molecules. In a preferred embodiment the antibodies of the present invention bind to proteins derived from rice and more preferably bind to proteins or fragments thereof of rice In a preferred embodiment the nucleic acid molecules of the present invention are derived from rice and more preferably Oryza sativa L (japonica type), more preferably Oryza sativa L (japonica type), cv. Nipponbare.

[0113] Nucleic acid molecules that encode all or part of the protein of the present invention can be expressed, via recombinant means, to yield protein or peptides that can in turn be used to elicit antibodies that are capable of binding the expressed protein or peptide. Such antibodies may be used in immunoassays for that protein. Such protein-encoding molecules, or their fragments may be a “fusion” molecule (i.e., a part of a larger nucleic acid molecule) such that, upon expression, a fusion protein is produced. It is understood that any of the nucleic acid molecules of the present invention may be expressed, via recombinant means, to yield proteins or peptides encoded by these nucleic acid molecules.

[0114] The antibodies that specifically bind proteins and protein fragments of the present invention may be polyclonal or monoclonal, and may comprise intact immunoglobulins, or antigen binding portions of immunoglobulins (such as (F(ab′), F(ab′)₂ fragments), or single-chain immunoglobulins producible, for example, via recombinant means). It is understood that practitioners are familiar with the standard resource materials which describe specific conditions and procedures for the construction, manipulation and isolation of antibodies (see, for example, Harlow and Lane, Antibodies: A Laboratory Manual, Cold Spring Harbor Press, Cold Spring Harbor, N.Y. (1988), the entirety of which is herein incorporated by reference).

[0115] Murine monoclonal antibodies are particularly preferred. BALB/c mice are preferred for this purpose, however, equivalent strains may also be used. The animals are preferably immunized with approximately 25 μg of purified protein (or fragment thereof) that has been emulsified in a suitable adjuvant (such as TiterMax adjuvant (Vaxcel, Norcross, Ga.)). Immunization is preferably conducted at two intramuscular sites, one intraperitoneal site, and one subcutaneous site at the base of the tail. An additional i.v. injection of approximately 25 μg of antigen is preferably given in normal saline three weeks later. After approximately 11 days following the second injection, the mice may be bled and the blood screened for the presence of anti-protein or peptide antibodies. Preferably, a direct binding Enzyme-Linked Immunoassay (ELISA) is employed for this purpose.

[0116] More preferably, the mouse having the highest antibody titer is given a third i.v. injection of approximately 25 μg of the same protein or fragment. The splenic leukocytes from this animal may be recovered 3 days later, and are then permitted to fuse, most preferably, using polyethylene glycol, with cells of a suitable myeloma cell line (such as, for example, the P3X63Ag8.653 myeloma cell line). Hybridoma cells are selected by culturing the cells under “HAT” (hypoxanthine-aminopterin-thymine) selection for about one week. The resulting clones may then be screened for their capacity to produce monoclonal antibodies (“mAbs”), preferably by direct ELISA.

[0117] In one embodiment, anti-protein or peptide monoclonal antibodies are isolated using a fusion of a protein, protein fragment, or peptide of the present invention, or conjugate of a protein, protein fragment, or peptide of the present invention, as immunogens. Thus, for example, a group of mice can be immunized using a fusion protein emulsified in Freund's complete adjuvant (e.g., approximately 50 μg of antigen per immunization). At three week intervals, an identical amount of antigen is emulsified in Freund's incomplete adjuvant and used to immunize the animals. Ten days following the third immunization, serum samples are taken and evaluated for the presence of antibody. If antibody titers are too low, a fourth booster can be employed. Polysera capable of binding the protein or peptide can also be obtained using this method.

[0118] In a preferred procedure for obtaining monoclonal antibodies, the spleens of the above-described immunized mice are removed, disrupted, and immune splenocytes are isolated over a ficoll gradient. The isolated splenocytes are fused, using polyethylene glycol with BALB/c-derived HGPRT (hypoxanthine guanine phosphoribosyl transferase) deficient P3x63xAg8.653 plasmacytoma cells. The fused cells are plated into 96-well microtiter plates and screened for hybridoma fusion cells by their capacity to grow in culture medium supplemented with hypothanthine, aminopterin and thymidine for approximately 2-3 weeks.

[0119] Hybridoma cells that arise from such incubation are preferably screened for their capacity to produce an immunoglobulin that binds to a protein of interest. An indirect ELISA may be used for this purpose. In brief, the supernatants of hybridomas are incubated in microtiter wells that contain immobilized protein. After washing, the titer of bound immunoglobulin can be determined using, for example, a goat anti-mouse antibody conjugated to horseradish peroxidase. After additional washing, the amount of immobilized enzyme is determined (for example through the use of a chromogenic substrate). Such screening is performed as quickly as possible after the identification of the hybridoma in order to ensure that a desired clone is not overgrown by non-secreting neighbors. Desirably, the fusion plates are screened several times since the rates of hybridoma growth vary. In a preferred sub-embodiment, a different antigenic form of immunogen may be used to screen the hybridoma. Thus, for example, the splenocytes may be immunized with one immunogen, but the resulting hybridomas can be screened using a different immunogen. It is understood that any of the protein or peptide molecules of the present invention may be used to raise antibodies.

[0120] As discussed below, such antibody molecules or their fragments may be used for diagnostic purposes. Where the antibodies are intended for diagnostic purposes, it may be desirable to derivatize them, for example with a ligand group (such as biotin) or a detectable marker group (such as a fluorescent group, a radioisotope or an enzyme).

[0121] The ability to produce antibodies that bind the protein or peptide molecules of the present invention permits the identification of mimetic compounds of those molecules. A “mimetic compound” is a compound that is not that compound, or a fragment of that compound, but which nonetheless exhibits an ability to specifically bind to antibodies directed against that compound.

[0122] It is understood that any of the agents of the present invention can be substantially purified and/or be biologically active and/or recombinant.

[0123] Exemplary Uses of the Agents of the Invention

[0124] Nucleic acid molecules and fragments thereof of the present invention may be employed for genetic mapping studies using linkage analysis (genetic markers). A genetic linkage map shows the relative locations of specific DNA markers along a chromosome. Maps are used for the identification of genes associated with genetic diseases or phenotypic traits, comparative genomics, and as a guide for physical mapping. Through genetic mapping, a fine scale linkage map can be developed using DNA markers, and, then, a genomic DNA library of large-sized fragments can be screened with molecular markers linked to the desired trait. In a preferred embodiment of the present invention, the genomic library screened with the nucleic acid molecules of the present invention is a genomic library of rice.

[0125] Mapping marker locations is based on the observation that two markers located near each other on the same chromosome will tend to be passed together from parent to offspring. During gamete production, DNA strands occasionally break and rejoin in different places on the same chromosome or on the homologous chromosome. The closer the markers are to each other, the more tightly linked and the less likely a recombination event will fall between and separate them. Recombination frequency thus provides an estimate of the distance between two markers.

[0126] In segregating populations, target genes have been reported to have been placed within an interval of 5-10 cM with a high degree of certainty (Tanksley et al., Trends in Genetics 11(2):63-68 (1995), the entirety of which is herein incorporated by reference). The markers defining this interval are used to screen a larger segregating population to identify individuals derived from one or more gametes containing a crossover in the given interval. Such individuals are useful in orienting other markers closer to the target gene. Once identified, these individuals can be analyzed in relation to all molecular markers within the region to identify those closest to the target.

[0127] Markers of the present invention can be employed to construct linkage maps and to locate genes with qualitative and quantitative effects. The genetic linkage of additional marker molecules can be established by a genetic mapping model such as, without limitation, the flanking marker model reported by Lander and Botstein, Genetics, 121:185-199 (1989), and the interval mapping, based on maximum likelihood methods described by Lander and Botstein, Genetics, 121:185-199 (1989), the entirety of which is herein incorporated by reference and implemented in the software package MAPMAKER/QTL (Lincoln and Lander, Mapping Genes Controlling Quantitative Traits Using MAPMAKER/QTL, Whitehead Institute for Biomedical Research, Massachusetts, (1990)). Additional software includes Qgene, Version 2.23 (1996), Department of Plant Breeding and Biometry, 266 Emerson Hall, Cornell University, Ithaca, N.Y., the manual of which is herein incorporated by reference in its entirety). Use of the Qgene software is a particularly preferred approach.

[0128] A maximum likelihood estimate (MLE) for the presence of a marker is calculated, together with an MLE assuming no QTL effect, to avoid false positives. A log₁₀ of an odds ratio (LOD) is then calculated as: LOD=log₁₀ (MLE for the presence of a QTL/MLE given no linked QTL).

[0129] The LOD score essentially indicates how much more likely the data are to have arisen assuming the presence of a QTL than in its absence. The LOD threshold value for avoiding a false positive with a given confidence, say 95%, depends on the number of markers and the length of the genome. Graphs indicating LOD thresholds are set forth in Lander and Botstein, Genetics, 121:185-199 (1989), the entirety of which is herein incorporated by reference and further described by Arús and Moreno-González, Plant Breeding, Hayward, Bosemark, Romagosa (eds.) Chapman & Hall, London, pp. 314-331 (1993).

[0130] Additional models can be used. Many modifications and alternative approaches to interval mapping have been reported, including the use of non-parametric methods (Kruglyak and Lander, Genetics, 139:1421-1428 (1995), the entirety of which is herein incorporated by reference). Multiple regression methods or models can be also be used, in which the trait is regressed on a large number of markers (Jansen, Biometrics in Plant Breed, van Oijen, Jansen (eds.) Proceedings of the Ninth Meeting of the Eucarpia Section Biometrics in Plant Breeding, The Netherlands, pp. 116-124 (1994); Weber and Wricke, Advances in Plant Breeding, Blackwell, Berlin, 16 (1994). Procedures combining interval mapping with regression analysis, whereby the phenotype is regressed onto a single putative QTL at a given marker interval, and at the same time onto a number of markers that serve as ‘cofactors,’ have been reported by Jansen and Stam, Genetics, 136:1447-1455 (1994) and Zeng, Genetics, 136:1457-1468 (1994). Generally, the use of cofactors reduces the bias and sampling error of the estimated QTL positions (Utz and Melchinger, Biometrics in Plant Breeding, van Oijen, Jansen (eds.) Proceedings of the Ninth Meeting of the Eucarpia Section Biometrics in Plant Breeding, The Netherlands, pp. 195-204 (1994), thereby improving the precision and efficiency of QTL mapping (Zeng, Genetics, 136:1457-1468 (1994). These models can be extended to multi-environment experiments to analysis genotype-environment interactions (Jansen et al., Theo. Appl. Genet. 91:33-37 (1995).

[0131] Selection of an appropriate mapping population is important to map construction. The choice of appropriate mapping population depends on the type of marker systems employed (Tanksley et al., J.P. Gustafson and R. Appels (eds.), Plenum Press, New York, pp. 157-173 (1988), the entirety of which is herein incorporated by reference). Consideration must be given to the source of parents (adapted vs. exotic) used in the mapping population. Chromosome pairing and recombination rates can be severely disturbed (suppressed) in wide crosses (adapted×exotic) and generally yield greatly reduced linkage distances. Wide crosses will usually provide segregating populations with a relatively large array of polymorphisms when compared to progeny in a narrow cross (adapted×adapted).

[0132] An F₂ population is the first generation of selfing after the hybrid seed is produced. Usually a single F₁ plant is selfed to generate a population segregating for all the genes in Mendelian (1:2:1) fashion. Maximum genetic information is obtained from a completely classified F₂ population using a codominant marker system (Mather, Measurement of Linkage in Heredity: Methuen and Co., (1938), the entirety of which is herein incorporated by reference). In the case of dominant markers, progeny tests (e.g., F₃, BCF₂) are required to identify the heterozygotes, thus making it equivalent to a completely classified F₂ population. However, this procedure is often prohibitive because of the cost and time involved in progeny testing. Progeny testing of F₂ individuals is often used in map construction where phenotypes do not consistently reflect genotype (e.g., disease resistance) or where trait expression is controlled by a QTL. Segregation data from progeny test populations (e.g., F₃ or BCF₂) can be used in map construction. Marker-assisted selection can then be applied to cross progeny based on marker-trait map associations (F₂, F₃), where linkage groups have not been completely disassociated by recombination events (i.e., maximum disequilibrium).

[0133] Recombinant inbred lines (RIL) (genetically related lines; usually >F₅, developed from continuously selfing F₂ lines towards homozygosity) can be used as a mapping population. Information obtained from dominant markers can be maximized by using RIL because all loci are homozygous or nearly so. Under conditions of tight linkage (i.e., about <10% recombination), dominant and co-dominant markers evaluated in RIL populations provide more information per individual than either marker type in backcross populations (Reiter, Proc. Natl. Acad. Sci. USA 89:1477-1481 (1992)). However, as the distance between markers becomes larger (i.e., loci become more independent), the information in RIL populations decreases dramatically when compared to codominant markers.

[0134] Backcross populations (e.g., generated from a cross between a successful variety (recurrent parent) and another variety (donor parent) carrying a trait not present in the former) can be utilized as a mapping population. A series of backcrosses to the recurrent parent can be made to recover most of its desirable traits. Thus a population is created consisting of individuals nearly like the recurrent parent but each individual carries varying amounts or mosaic of genomic regions from the donor parent. Backcross populations can be useful for mapping dominant markers if all loci in the recurrent parent are homozygous and the donor and recurrent parent have contrasting polymorphic marker alleles (Reiter et al., Proc. Natl. Acad. Sci. USA 89:1477-1481 (1992)). Information obtained from backcross populations using either codominant or dominant makers is less than that obtained from F₂ populations because one, rather than two, recombinant gametes are sampled per plant. Backcross populations, however, are more informative (at low marker saturation) when compared to RILs as the distance between linked loci increases in RIL populations (i.e., about 0.15% recombination). Increased recombination can be beneficial for resolution of tight linkages, but may be undesirable in the construction of maps with low marker saturation.

[0135] Near-isogenic lines (NIL)(created by many backcrosses to produce an array of individuals that are nearly identical in genetic composition except for the trait or genomic region under interrogation) can be used as a mapping population. In mapping with NILs, only a portion of the polymorphic loci are expected to map to a selected region.

[0136] Bulk segregant analysis (BSA) is a method developed for the rapid identification of linkage between markers and traits of interest (Michelmore et al., Proc. Natl. Acad. Sci. USA 88:9828-9832 (1991)). In BSA, two bulked DNA samples are drawn from a segregating population originating from a single cross. These bulks contain individuals that are identical for a particular trait (resistant or susceptible to particular disease) or genomic region but arbitrary at unlinked regions (i.e., heterozygous). Regions unlinked to the target region will not differ between the bulked samples of many individuals in BSA.

[0137] It is understood that one or more of the nucleic acid molecules of the present invention may in one embodiment be used as markers in genetic mapping. In a preferred embodiment, nucleic acid molecules of the present invention may in one embodiment be used as markers with rice.

[0138] The nucleic acid molecules of the present invention may be used for physical mapping. Physical mapping, in conjunction with linkage analysis, can enable the isolation of genes. Physical mapping has been reported to identify the markers closest in terms of genetic recombination to a gene target for cloning. Once a DNA marker is linked to a gene of interest, the chromosome walking technique can be used to find the genes via overlapping clones. For chromosome walking, random molecular markers or established molecular linkage maps are used to conduct a search to localize the gene adjacent to one or more markers. A chromosome walk (Bukanov and Berg, Mo. Microbiol, 11:509-523 (1994), the entirety of which is herein incorporated by reference; Birkenbihl and Vielmetter Nucleic Acids Res. 17:5057-5069 (1989), the entirety of which is herein incorporated by reference; Wenzel and Herrmann, Nucleic Acids Res. 16:8323-8336, (1988), the entirety of which is herein incorporated by reference) is then initiated from the closest linked marker. Starting from the selected clones, labeled probes specific for the ends of the insert DNA are synthesized and used as probes in hybridizations against a representative library. Clones hybridizing with one of the probes are picked and serve as templates for the synthesis of new probes; by subsequent analysis, contigs are produced.

[0139] The degree of overlap of the hybridizing clones used to produce a contig can be determined by comparative restriction analysis. Comparative restriction analysis can be carried out in different ways all of which exploit the same principle; two clones of a library are very likely to overlap if they contain a limited number of restriction sites for one or more restriction endonucleases located at the same distance from each other. The most frequently used procedures are, fingerprinting (Coulson et al., Proc. Natl. Acad. Sci. USA 83:7821-7821, (1986), the entirety of which is herein incorporated by reference); Knott et al., Nucleic Acids Res. 16:2601-2612 (1988), the entirety of which is herein incorporated by reference; Eiglmeier et al., Mol. Microbiol. 7(2):197-206 (1993), the entirety of which is herein incorporated by reference, 1993), restriction fragment mapping (Smith and Birnstiel, Nucleic Acids Res. 3:2387-2398 (1976), the entirety of which is herein incorporated by reference, or the “landmarking” technique (Charlebois et al., J. Mol. Biol. 222:509-524 (1991), the entirety of which is herein incorporated by reference).

[0140] To generate a physical map of a genome with BACs using the fingerprinting technique, a BAC library containing a number of clones equivalent to 4×-20× haploid genome can be used. (Zhang and Wing, Plant Mol. Bio. 35:115-127 (1997)). For example, BAC DNA can be purified with the conventional alkaline lysis procedure as used for plasmid DNA purification, digested with the restriction enzyme used for construction of the BAC libraries and end-labeled with ³²P-dATP, digested with Sau3AI and fractionated on a denaturing polyacrylamide gel. The gel is dried to chromatography paper and exposed to X-ray film. Fingerprints are scanned and then converted into database records, according to the positions of each band relative to the bands of the closest molecular-weight marker on a gel. The incoming database of fingerprints are first compared against each other to assemble contigs if overlapped, and then compared against all existing databases to place the incoming BACs and BAC contigs in established contigs if overlapped. The physical length of a contig in kb is estimated according to the number of restriction sites of the enzyme used for the first digestion prior to fragment end labeling.

[0141] Restriction analysis of a certain clone can be carried out, for example, according to a method originally described by Smith and Berstiel, Nucleic Acids Res. 3:2387-2398 (1976). First, the number and size of cloned restriction fragments to be mapped are determined by complete digestion and agarose gel electrophoresis. Then, the clone is linearized at a unique restriction site outside of the cloned DNA. Aliquots of the linearized molecules are digested to different extents with the enzyme selected for mapping. These partially cut samples are separated on agarose gels, blotted, and hybridized to a labeled fragment of vector DNA. This probe is derived entirely from one side or the other of the unique site used to linearize the clone.

[0142] The results show a ladder of DNA fragments that have the same unique end. By repeating these analyses in pairs with all the neighboring intermediate DNA fragments, the correct order of restriction fragments as well as the orientation of the cloned insert can be deduced. The order of restriction fragments produced by restriction enzymes other than the cloning enzyme can be determined similarly. Fragment data from different enzymes are then combined by a computer program and compared with the alignments of other clones of the library (Kohara et al., Cell 50:495-508 (1987), the entirety of which is herein incorporated by reference).

[0143] The landmarking technique can be carried out without any labeling and relies on agarose gel analysis. Clones are first digested preferably with a 6 bp specific endonuclease A, if possible with the original clone enzyme. Clones are then digested with a second endonuclease B. Endonuclease B is chosen based on its ability to cut rarely in the genome, for example, on average only once in 30 kbp. Of the fragments generated by digestion of one clone with enzyme A, statistically only a small number (between zero and three fragments) will also be cut by enzyme B. The very specific pattern of those fragments which are produced by double digestion are easily recognized. Any of these fragments which have a restriction site for the rarely cutting endonuclease is called a “landmark” Generally one common landmark is sufficient for defining two overlapping clones.

[0144] Alternatively to chromosome walking and the associated comparative restriction analyses methods, chromosome landing also has been reported to be used to locate a gene of interest (Tanksley et al., Trends in Genetics 11(2):63-68 (1995), the entirety of which is herein incorporated by reference). For chromosome landing, a DNA marker is isolated at a physical distance from the targeted gene. High resolution linkage analysis is used to identify such a marker that cosegregates with the gene. The marker is isolated at a distance that is less than the average insert size of the genomic library used for clone isolation. The DNA marker is then used to screen the library and isolate (or “land” on) the clone containing the gene without chromosome walking. Genome coverage of a library can also be determined by cross-hybridization of individual large insert clones by screening a BAC library with single copy RFLP markers distributed randomly across the genome by hybridization. To assure accuracy of the physical map, the markers should be single-copy or of single-locus origin, if multiple-copy.

[0145] Chromosome landing of large-insert clones using chromosome-specific DNA markers such as STSs microsatellites, RFLPs, or other markers can correlate physical and genetic maps (Zwick et al., Genetics 148:1983-1992 (1998), the entirety of which is herein incorporated by reference in its entirety). These strategies include chromosome landing of BACs containing markers or BAC contigs by BAC-FISH (Fluorescent In Situ Hybridization), a technique that involves tagging the DNA marker with an observable label. BAC clones giving positive hybridization signals are individually analyzed by FISH to metaphase chromosome spreads. The location of the labeled probe can be detected after it binds to its complementary DNA strand in an intact chromosome. The FISH of a BAC selected from a BAC contig will directly place the BAC contig to a specific chromosome region and establish a linkage relationships of the BAC contig to another BAC contig.

[0146] Markers have been used in physical mapping studies with BAC libraries made from plant genomes. Such mapping studies have been carried out in rice (Kim et al., Genomics 34:213-218 (1996), the entirety of which is herein incorporated by reference; Hang, Plant Mol. Biol. 35:129-133 (1997), the entirety of which is herein incorporated by reference; Zhang and Wing., Plant Mol. Bio. 35:115-127 (1997), the entirety of which is herein incorporated by reference; Chen et al., Proc. Natl. Acad. Sci. USA 94:3431-3435 (1997), the entirety of which is herein incorporated by reference; Wang et al., Plant J. 7:525-533 (1995), the entirety of which is herein incorporated by reference) sorghum (Zwick et al., Genetics 148:1983-1992 (1998), the entirety of which is herein incorporated by reference; Zhang, et al., Molecular Breeding 2:11-24 (1996), the entirety of which is herein incorporated by reference) maize, (Chen, et al., Proc. Natl. Acad. Sci. USA 94:3431-3435 (1997), and Arabidopsis (Kim, et al., Genomics 34:213-218 (1996), the entirety of which is herein incorporated by reference).

[0147] Repetitive elements have been used in physical mapping in cereals (Ananiev, et al., Proc. Natl. Acad. Sci. USA 95:13073-8 (1998), the entirety of which is herein incorporated by reference; McLean et al., Mol Gen Genet. 253:687-694 (1997), the entirety of which is herein incorporated by reference).

[0148] It is understood that the nucleic acid molecules of the present invention may in one embodiment be used in physical mapping. In a preferred embodiment, nucleic acid molecules of the present invention may in one embodiment be used in the physical mapping of rice.

[0149] Nucleic acid molecules of the present invention can be used in comparative mapping (physical and genetic) and to isolate molecules from other cereals based on the syntenic relationship between cereals. Comparative mapping within families provides a method to the degree of sequence conservation, gene order, ploidy of species, ancestral relationships and the rates at which individual genomes are evolving. Comparative mapping has been carried out by cross-hybridizing molecular markers across species within a given family.

[0150] In a preferred embodiment, the nucleic acid molecules of the present invention can be utilized to isolate corresponding syntenic regions in non-rice plants (Bennetzen and Freeling, Trends in Genet., 9(8):259-261 (1993); Ahn et al., Mol. Gen. Genet., 241(5-6):483-490 (1993); Schwarzacher, Cur. Opin. Genet. & Devel., 4(6): 868-874 (1994); Kurata et al., Bio/Technology, 12:276-278 (1994); Kilian et al., Nucl. Acids Res., 23(14):2729-2733 (1995); Bennett, Symp. Soc. Exp. Biol., 50:45-52 (1996); Hu et al., Genetics, 142(3):1021-1031 (1996); Kilian, Plant Mol. Biol., 35:187-195 (1997); Bennetzen and Freeling, Genome Res., 7(4):301-306 (1997); Foote et al., Genetics, 147(2):801-807 (1997); Gallego et al., Genome, 41(3):328-336 (1998)). Gale and Devos, Proc. Natl. Acad. Sci. USA 95:1971-1974 (1998); Bennetzen et al., Proc. Natl. Acad. Sci. USA, 95:1975-1978 (1998); Messing and Liaca, Proc. Natl. Acad. Sci. USA 95:2017-2020 (1998); McCouch, Proc. Natl. Acad. Sci. USA, 95:1983-1985 (1998); Goff, Curr. Opin. Plant Biol. 2:85-89 (1999); Bailey et al, Theor. Appl. Genet., 98:281-284 (1999); Zhang et al., Proc. Natl. Acad. Sci. USA, 91:8675-8679 (1994); Yano and Sasaki, Plant Mol. Biol., 35:145-153 (1997); Leister et al., Proc. Natl. Acad. Sci. USA, 95:370-375 (1998); Lin et al., Phytopathology 86(11):1156-1159 (1996); Havukkala, Curr. Opin. Genet. Dev., 96:711-713 (1996); and Lee, The Society for Experimental Biology, pp. 31-38 (1996), all of which are herein incorporated by reference in their entirety. Synteny between rice and barley has recently been reported in the genomic region carrying malting quality Quantitative Trait Loci (QTL) (Kleinhofs et al., Genome 41:373-380 (1998), the entirety of which is herein incorporated by reference). Likewise, mapping of the liguless region of sorghum, a region containing a developmental control gene, was facilitated using molecular markers from a syntenic region of the rice genome (Christou et al., Genetics 148:1983-1992 (1998), the entirety of which is herein incorporated by reference).

[0151] In a particularly preferred embodiment, the nucleic acid molecules of the present invention that define a genomic region in rice plants associated with a desirable phenotype are utilized to obtain corresponding syntenic regions in non-rice plants. A region can be defined either physically or genetically. In an even more preferred embodiment, the nucleic acid molecules of the present invention that define a genomic region in rice plants associated with a desirable phenotype are utilized to obtain corresponding syntenic regions in rice plants. A region can be defined either physically or genetically.

[0152] One or more of the nucleic acids molecules may be used to define a physical genomic region. For example, two nucleic acid molecules of the present invention can act to define a physical genomic region that lies between them. Moreover, for example, a physical genomic region may be defined by a distance relative to a nucleic acid molecule. In a preferred embodiment of the present invention, the defined physical genomic region is less than about 1,000 kb, more preferably less than about 500 kb, even more preferably less than about 100 kb or less than about 50 kb.

[0153] One or more of the nucleic acids molecules may be used to define a genomic region by its genetic distance from one or more nucleic acid molecules. In a preferred embodiment of the present invention, the genomic region is defined by its linkage to a nucleic acid molecule of the present invention. In such a preferred embodiment, the genomic region that is defined by one or more nucleic acid molecules of the present invention is located within about 50 centimorgans, more preferably within about 20 centimorgans, even more preferably with about 10, about 5 or about 2 centimorgans of the trait or marker at issue.

[0154] In another particularly preferred embodiment, two or more nucleic acid molecules of the present invention derived from rice plants that flank a genomic region of interest in rice plants are used to isolate the syntenic region in another cereal, more preferably maize, sorghum, barley, or wheat. Regions of interest in rice include, without limitation, those regions that are associated with a commercially desirable phenotype in rice. In another particularly preferred embodiment the desirable phenotype in rice is the result of a quantitative trait locus (QTL) present in the region.

[0155] One exemplary approach to isolate syntenic genomic regions is as follows. Nucleic acid molecules derived from rice of the present invention can be used to select large insert clones from a total genomic DNA library of a related species such as maize, sorghum, barley, or wheat. Any appropriate method to screen the genomic library with a nucleic acid molecule of the present invention may be used to select the required clones (See, for example, Birren et al., Detecting Genes: A Laboratory Manual, Cold Spring Harbor, N.Y., N.Y. (1998). For example, direct hybridization of a nucleic acid molecule of the present invention to mapping filters comprising the genomic DNA of the syntenic species can be used to select large insert clones from a total genomic DNA library of a related species. The selected clones can then be used to physically map the region in the target species. An advantage of this method for comparative mapping is that no mapping population or linkage map of the target species is needed and the clones may also be used in other closely related species. By comparing the results obtained by genetic mapping in model plants, with those from other species, similarities of genomic structure among plants species can be established. Cross-hybridization of RFLP markers have been reported and conserved gene order has been established in many studies. Such macroscopic synteny is utilized for the estimation of correspondence of loci among these crops. These loci include not only Mendelian genes but also Quantitative Trait Loci (QTL) (Mohan et al., Molecular Breeding 3:87-103 (1997), the entirety of which is herein incorporated by reference). Other methods to isolate syntenic nucleic acid molecules may be used.

[0156] It is understood that markers of the present invention may be used in comparative mapping. In a preferred embodiment the markers of present invention may be used in the comparative mapping of cereals, more preferably maize, barley, sorgham, and wheat.

[0157] It is understood that markers of the present invention may be used to isolate nucleic acid molecules from other cereals based on the syntenic relationship between such cereals. In a preferred embodiment the cereal is selected from the group of maize, sorgham, barley, and wheat.

[0158] The nucleic acid molecules of the present invention can be used to identify polymorphisms. In one embodiment, one or more of the nucleic acid molecules or a BAC nucleic acid molecule (or a sub-fragment of either) may be employed as a marker nucleic acid molecule to identify such polymorphism(s). Alternatively, such polymorphisms can be detected through the use of a marker nucleic acid molecule or a marker protein that is genetically linked to (i.e., a polynucleotide that co-segregates with) such polymorphism(s). In a preferred embodiment, the plant is selected from the group consisting of cereals, and more preferably rice, maize, barley, sorgham, and wheat.

[0159] In an alternative embodiment, such polymorphisms can be detected through the use of a marker nucleic acid molecule that is physically linked to such polymorphism(s). For this purpose, marker nucleic acid molecules comprising a nucleotide sequence of a polynucleotide located within 1 mb of the polymorphism(s), and more preferably within 100 kb of the polymorphism(s), and most preferably within 10 kb of the polymorphism(s) can be employed.

[0160] The genomes of animals and plants naturally undergo spontaneous mutation in the course of their continuing evolution (Gusella, Ann. Rev. Biochem. 55:831-854 (1986)). A “polymorphism” is a variation or difference in the sequence of the gene or its flanking regions that arises in some of the members of a species. The variant sequence and the “original” sequence co-exist in the species' population. In some instances, such co-existence is in stable or quasi-stable equilibrium.

[0161] A polymorphism is thus said to be “allelic,” in that, due to the existence of the polymorphism, some members of a species may have the original sequence (i.e., the original “allele”) whereas other members may have the variant sequence (i.e., the variant “allele”). In the simplest case, only one variant sequence may exist, and the polymorphism is thus said to be di-allelic. In other cases, the species' population may contain multiple alleles, and the polymorphism is termed tri-allelic, etc. A single gene may have multiple different unrelated polymorphisms. For example, it may have a di-allelic polymorphism at one site, and a multi-allelic polymorphism at another site.

[0162] The variation that defines the polymorphism may range from a single nucleotide variation to the insertion or deletion of extended regions within a gene. In some cases, the DNA sequence variations are in regions of the genome that are characterized by short tandem repeats (STRs) that include tandem di- or tri-nucleotide repeated motifs of nucleotides. Polymorphisms characterized by such tandem repeats are referred to as “variable number tandem repeat” (“VNTR”) polymorphisms. VNTRs have been used in identity analysis (Weber, U.S. Pat. No. 5,075,217; Armour et al., FEBS Lett. 307:113-115 (1992); Jones et al., Eur. J. Haematol. 39:144-147 (1987); Horn et al., PCT Application WO91/14003; Jeffreys, European Patent Application 370,719; Jeffreys, U.S. Pat. No. 5,175,082; Jeffreys et al., Amer. J. Hum. Genet. 39:11-24 (1986); Jeffreys et al., Nature 316:76-79 (1985); Gray et al., Proc. R. Acad. Soc. Lond. 243:241-253 (1991); Moore et al., Genomics 10:654-660 (1991); Jeffreys et al., Anim. Genet. 18:1-15 (1987); Hillel et al., Anim. Genet. 20:145-155 (1989); Hillel et al., Genet. 124:783-789 (1990), all of which are herein incorporated by reference in their entirety).

[0163] The detection of polymorphic sites in a sample of DNA may be facilitated through the use of nucleic acid amplification methods. Such methods specifically increase the concentration of polynucleotides that span the polymorphic site, or include that site and sequences located either distal or proximal to it. Such amplified molecules can be readily detected by gel electrophoresis or other means.

[0164] The most preferred method of achieving such amplification employs the polymerase chain reaction (“PCR”) (Mullis et al., Cold Spring Harbor Symp. Quant. Biol. 51:263-273 (1986); Erlich et al., European Patent Appln. 50,424; European Patent Appln. 84,796, European Patent Application 258,017, European Patent Appln. 237,362; Mullis, European Patent Appln. 201,184; Mullis, et al., U.S. Pat. No. 4,683,202; Erlich., U.S. Pat. No. 4,582,788; and Saiki et al., U.S. Pat. No. 4,683,194, all of which are herein incorporated by reference), using primer pairs that are capable of hybridizing to the proximal sequences that define a polymorphism in its double-stranded form.

[0165] In lieu of PCR, alternative methods, such as the “Ligase Chain Reaction” (“LCR”) may be used (Barany, Proc. Natl. Acad. Sci. USA 88:189-193 (1991), the entirety of which is herein incorporated by reference. LCR uses two pairs of oligonucleotide probes to exponentially amplify a specific target. The sequences of each pair of oligonucleotides is selected to permit the pair to hybridize to abutting sequences of the same strand of the target. Such hybridization forms a substrate for a template-dependent ligase. As with PCR, the resulting products thus serve as a template in subsequent cycles and an exponential amplification of the desired sequence is obtained.

[0166] LCR can be performed with oligonucleotides having the proximal and distal sequences of the same strand of a polymorphic site. In one embodiment, either oligonucleotide will be designed to include the actual polymorphic site of the polymorphism. In such an embodiment, the reaction conditions are selected such that the oligonucleotides can be ligated together only if the target molecule either contains or lacks the specific nucleotide that is complementary to the polymorphic site present on the oligonucleotide. Alternatively, the oligonucleotides may be selected such that they do not include the polymorphic site (see, Segev, PCT Application WO 90/01069, the entirety of which is herein incorporated by reference).

[0167] The “Oligonucleotide Ligation Assay” (“OLA”) may alternatively be employed (Landegren et al., Science 241:1077-1080 (1988), the entirety of which is herein incorporated by reference). The OLA protocol uses two oligonucleotides which are designed to be capable of hybridizing to abutting sequences of a single strand of a target. OLA, like LCR, is particularly suited for the detection of point mutations. Unlike LCR, however, OLA results in “linear” rather than exponential amplification of the target sequence.

[0168] Nickerson et al. have described a nucleic acid detection assay that combines attributes of PCR and OLA (Nickerson et al., Proc. Natl. Acad. Sci. USA 87:8923-8927 (1990), the entirety of which is herein incorporated by reference). In this method, PCR is used to achieve the exponential amplification of target DNA, which is then detected using OLA. In addition to requiring multiple, and separate, processing steps, one problem associated with such combinations is that they inherit all of the problems associated with PCR and OLA.

[0169] Schemes based on ligation of two (or more) oligonucleotides in the presence of nucleic acid having the sequence of the resulting “di-oligonucleotide”, thereby amplifying the di-oligonucleotide, are also known (Wu et al., Genomics 4:560 (1989), the entirety of which is herein incorporated by reference), and may be readily adapted to the purposes of the present invention.

[0170] Other known nucleic acid amplification procedures, such as allele-specific oligomers, branched DNA technology, transcription-based amplification systems, or isothermal amplification methods may also be used to amplify and analyze such polymorphisms (Malek et al., U.S. Pat. No. 5,130,238; Davey et al., European Patent Application 329,822; Schuster et al., U.S. Pat. No. 5,169,766; Miller et al., PCT Application WO 89/06700; Kwoh et al., Proc. Natl. Acad. Sci. USA 86:1173-1177 (1989); Gingeras et al., PCT Application WO 88/10315; Walker et al., Proc. Natl. Acad. Sci. USA 89:392-396 (1992), all of which are herein incorporated by reference in their entirety).

[0171] The identification of a polymorphism can be determined in a variety of ways. By correlating the presence or absence of it in an plant with the presence or absence of a phenotype, it is possible to predict the phenotype of that plant. If a polymorphism creates or destroys a restriction endonuclease cleavage site, or if it results in the loss or insertion of DNA (e.g., a VNTR polymorphism), it will alter the size or profile of the DNA fragments that are generated by digestion with that restriction endonuclease. As such, individuals that possess a variant sequence can be distinguished from those having the original sequence by restriction fragment analysis. Polymorphisms that can be identified in this manner are termed “restriction fragment length polymorphisms” (“RFLPs”). RFLPs have been widely used in human and plant genetic analyses (Glassberg, UK Patent Application 2135774; Skolnick et al., Cytogen. Cell Genet. 32:58-67 (1982); Botstein et al., Ann. J. Hum. Genet. 32:314-331 (1980); Fischer et al. PCT Application WO90/13668; Uhlen, PCT Application WO90/11369).

[0172] Polymorphisms can also be identified by Single Strand Conformation Polymorphism (SSCP) analysis. The SSCP technique is a method capable of identifying most sequence variations in a single strand of DNA, typically between 150 and 250 nucleotides in length (Elles, Methods in Molecular Medicine: Molecular Diagnosis of Genetic Diseases, Humana Press (1996), the entirety of which is herein incorporated by reference); Orita et al., Genomics 5:874-879 (1989), the entirety of which is herein incorporated by reference). Under denaturing conditions a single strand of DNA will adopt a conformation that is uniquely dependent on its sequence conformation. This conformation usually will be different, even if only a single base is changed. Most conformations have been reported to alter the physical configuration or size sufficiently to be detectable by electrophoresis. A number of protocols have been described for SSCP including, but not limited to Lee et al., Anal. Biochem. 205:289-293 (1992), the entirety of which is herein incorporated by reference; Suzuki et al., Anal. Biochem. 192:82-84 (1991), the entirety of which is herein incorporated by reference; Lo et al., Nucleic Acids Research 20:1005-1009 (1992), the entirety of which is herein incorporated by reference; Sarkar et al., Genomics 13:441-443 (1992), the entirety of which is herein incorporated by reference). It is understood that one or more of the nucleic acids of the present invention, may be utilized as markers or probes to detect polymorphisms by SSCP analysis.

[0173] Polymorphisms may also be found using a DNA fingerprinting technique called amplified fragment length polymorphism (AFLP), which is based on the selective PCR amplification of restriction fragments from a total digest of genomic DNA to profile that DNA. Vos et al., Nucleic Acids Res. 23:4407-4414 (1995), the entirety of which is herein incorporated by reference. This method allows for the specific co-amplification of high numbers of restriction fragments, which can be visualized by PCR without knowledge of the nucleic acid sequence.

[0174] AFLP employs basically three steps. Initially, a sample of genomic DNA is cut with restriction enzymes and oligonucleotide adapters are ligated to the restriction fragments of the DNA. The restriction fragments are then amplified using PCR by using the adapter and restriction sequence as target sites for primer annealing. The selective amplification is achieved by the use of primers that extend into the restriction fragments, amplifying only those fragments in which the primer extensions match the nucleotide flanking the restriction sites. These amplified fragments are then visualized on a denaturing polyacrylamide gel.

[0175] AFLP analysis has been performed on Salix (Beismann et al., Mol. Ecol. 6:989-993 (1997), the entirety of which is herein incorporated by reference); Acinetobacter (Janssen et al., Int. J. Syst. Bacteriol 47:1179-1187 (1997), the entirety of which is herein incorporated by reference), Aeromonas popoffi (Huys et al., Int. J. Syst. Bacteriol. 47:1165-1171 (1997), the entirety of which is herein incorporated by reference), rice (McCouch et al., Plant Mol. Biol. 35:89-99 (1997), the entirety of which is herein incorporated by reference); Nandi et al., Mol. Gen. Genet. 255:1-8 (1997); Cho et al., Genome 39:373-378 (1996), herein incorporated by reference), barley (Hordeum vulgare) (Simons et al., Genomics 44:61-70 (1997), the entirety of which is herein incorporated by reference; Waugh et al., Mol. Gen. Genet. 255:311-321 (1997), the entirety of which is herein incorporated by reference; Qi et al., Mol. Gen. Genet. 254:330-336 (1997), the entirety of which is herein incorporated by reference; Becker et al., Mol. Gen. Genet. 249:65-73 (1995), the entirety of which is herein incorporated by reference), potato (Van der Voort et al., Mol. Gen. Genet. 255:438-447 (1997), the entirety of which is herein incorporated by reference; Meksem et al., Mol. Gen. Genet. 249:74-81 (1995), the entirety of which is herein incorporated by reference), Phytophthora infestans (Van der Lee et al., Fungal Genet. Biol. 21:278-291 (1997), the entirety of which is herein incorporated by reference), Bacillus anthracis (Keim et al., J. Bacteriol. 179:818-824 (1997)), Astragalus cremnophylax (Travis et al., Mol. Ecol. 5:735-745 (1996), the entirety of which is herein incorporated by reference), Arabidopsis (Cnops et al., Mol. Gen. Genet. 253:3241 (1996), the entirety of which is herein incorporated by reference), Escherichia coli (Lin et al., Nucleic Acids Res. 24:3649-3650 (1996), the entirety of which is herein incorporated by reference), Aeromonas (Huys et al., Int. J. Syst. Bacteriol. 46:572-580 (1996), the entirety of which is herein incorporated by reference), nematode (Folkertsma et al., Mol. Plant. Microbe Interact. 9:47-54 (1996), the entirety of which is herein incorporated by reference), tomato (Thomas et al., Plant J. 8:785-794 (1995), the entirety of which is herein incorporated by reference), and human (Latorra et al., PCR Methods Appl. 3:351-358 (1994) the entirety of which is herein incorporated by reference). AFLP analysis has also been used for fingerprinting mRNA (Money et al., Nucleic Acids Res. 24:2616-2617 (1996), the entirety of which is herein incorporated by reference; Bachem, et al., Plant J. 9:745-753 (1996), the entirety of which is herein incorporated by reference). It is understood that one or more of the nucleic acid molecules of the present invention, may be utilized as markers or probes to detect polymorphisms by AFLP analysis for fingerprinting mRNA.

[0176] Polymorphisms may also be found using random amplified polymorphic DNA (RAPD) (Williams et al., Nucl. Acids Res. 18:6531-6535 (1990), the entirety of which is herein incorporated by reference) and cleavable amplified polymorphic sequences (CAPS) (Lyamichev et al., Science 260:778-783 (1993), the entirety of which is herein incorporated by reference). It is understood that one or more of the nucleic acid molecules of the present invention, may be utilized as markers or probes to detect polymorphisms by RAPD or CAPS analysis.

[0177] Nucleic acid molecules of the present invention can be used to monitor expression. A microarray-based method for high-throughput monitoring of plant gene expression may be utilized to measure gene-specific hybridization targets. This ‘chip’-based approach involves using microarrays of nucleic acid molecules as gene-specific hybridization targets to quantitatively measure expression of the corresponding plant genes (Schena et al., Science 270:467-470 (1995), the entirety of which is herein incorporated by reference; Shalon, Ph.D. Thesis. Stanford University (1996), the entirety of which is herein incorporated by reference). Every nucleotide in a large sequence can be queried at the same time. Hybridization can be used to efficiently analyze nucleotide sequences.

[0178] Several microarray methods have been described. One method compares the sequences to be analyzed by hybridization to a set of oligonucleotides or cDNA molecules representing all possible subsequences (Bains and Smith, J. Theor. Biol. 135:303 (1989), the entirety of which is herein incorporated by reference). A second method hybridizes the sample to an array of oligonucleotide or cDNA probes. An array consisting of oligonucleotides or cDNA molecules complementary to subsequences of a target sequence can be used to determine the identity of a target sequence, measure its amount, and detect differences between the target and a reference sequence. Nucleic acid molecule microarrays may also be screened with protein molecules or fragments thereof to determine nucleic acid molecules that specifically bind protein molecules or fragments thereof.

[0179] Additionally, microarrays of BACs may be prepared to sufficiently cover 3× of an entire genome. Such microarrays can be used in a variety of genomics experiments including gene mapping, DNA fingerprinting and promoter identification. Microarrays of genomic DNA can also be used for parallel analysis of genomes at single gene resolution (Lemieux et al., Molecular Breeding 277-289 (1988), the entirety of which is herein incorporated by reference). It is understood that one or more of the molecules of the present invention, preferably one or more of the nucleic acid molecules or protein molecules or fragments thereof of the present invention may be utilized in a genomic microarray based method. In a preferred embodiment of the present invention, one or more of the rice nucleic acid molecules or protein molecules or fragments thereof of the present invention may be utilized in a genomic microarray based method. For example, Genomic Mismatch Scanning (GMS), a hybridization-based method of linkage analysis that allows rapid identification of regions of identity-by-descent between two related individuals, can be carried out with microarrays. GMS is reported to have been used to identify genetically common chromosomal segments based on the ability of these DNA sequences to form extensive regions of mismatch-free heteroduplexes. A series of enzymatic steps, coupled with filter binding, is used to selectively remove heteroduplexes that contain mismatches (i.e., chromosomal regions that do not share identity-by descent.). Fragments of chromosomal DNA representing inherited regions are hybridized to a microarray of ordered genomic clones and positive hybridization signals pinpoint regions of identity-by-descent at high resolution (Lemieux et al., Molecular Breeding 277-289 (1988)).

[0180] It is understood that one or more of the molecules of the present invention, preferably one or more of the nucleic acid molecules or protein molecules or fragments thereof of the present invention may be utilized in a GMS microarray based method to locate regions of identity-by-descent between related individuals. In a preferred embodiment of the present invention, one or more of the rice nucleic acid molecules or protein molecules or fragments thereof of the present invention may be utilized in a GMS microarray based method to locate regions of identity-by-descent between related individuals. The GMS microarray approach can also be used as a tool to map mutigenic traits. For example, in yeast, the entire genomic sequence is known and it has been reported that the genes responsible for growth at elevated temperature, a trait required for the pathogenicity of certain yeast strains, may be determined using GMS (Lemieux et al., Molecular Breeding 277-289 (1988)). By analyzing the inheritance of large numbers of tetrads derived from crosses of pathogenic and wild type strains, all the genes responsible for a yeast strain's ability to grow at 42° C., for example, could be identified.

[0181] It is understood that one or more of the molecules of the present invention, preferably one or more of the nucleic acid molecules or protein molecules or fragments thereof of the present invention may be utilized in a GMS microarray based method to map multigenic traits. In a preferred embodiment of the present invention, one or more of the rice nucleic acid molecules or protein molecules or fragments thereof of the present invention may be utilized in a GMS microarray based method to map multigenic traits.

[0182] Plant repeat elements may be used with GMS microarraying to identify species specific chromosomes in another species background. For example, the maize genome contains moderately repetitive DNA sequences (ZLRS) representing about 2500 copies per haploid genome; these sequences are present in the genus Zea and absent in other graminaceous species. Ananiev et al., Proc. Natl. Acad. Sci. USA 94:3526-3529 (1997), all of which is herein incorporated by reference in its entirety, have reported unusual plants with individual maize chromosomes added to a complete oat genome generated by embryo rescue from oat (Avena sativa)×Zea mays crosses. By using highly repetitive maize-specific sequences as probes, Ananiev et al., Proc. Natl. Acad. Sci. USA 94:3526-3529 (1997) were able to selectively isolate cosmid clones containing maize genomic DNA.

[0183] It is understood that one or more of the molecules of the present invention, preferably one or more of the nucleic acid molecules or protein molecules or fragments thereof of the present invention may be utilized in a GMS microarray based method using repeat elements to selectively isolate clones containing species specific DNA. In a preferred embodiment of the present invention, one or more of the rice nucleic acid molecules or protein molecules or fragments thereof of the present invention may be utilized in a GMS microarray based method to selectively isolate clones containing species specific DNA. A particularly preferred microarray embodiment of the present invention is a microarray comprising nucleic acid molecules encoding genes that are homologues of known genes or nucleic acid molecules that comprise genes or fragments thereof that elicit only limited or no matches to known genes. A further preferred microarray embodiment of the present invention is a microarray comprising nucleic acid molecules encoding genes or fragments thereof that are homologues of known genes and nucleic acid molecules that comprise genes or fragments thereof that elicit only limited or no matches to known genes. A further preferred microarray embodiment of the present invention is a microarray comprising nucleic acid molecules encoding genes or fragments thereof that elicit only limited or no matches to known genes.

[0184] It is understood that one or more of the molecules of the present invention, preferably one or more of the nucleic acid molecules or protein molecules or fragments thereof of the present invention may be utilized in a microarray based method.

[0185] In a preferred embodiment of the present invention, one or more of the nucleic acid molecules or protein molecules or fragments thereof or other agents of the present invention may be utilized in a microarray based method.

[0186] Nucleic acid molecules of the present invention may be used in site directed mutagenesis. Site-directed mutagenesis may be utilized to modify nucleic acid sequences, particularly as it is a technique that allows one or more of the amino acids encoded by a nucleic acid molecule to be altered (e.g., a threonine to be replaced by a methionine). Three basic methods for site-directed mutagenesis are often employed. These are cassette mutagenesis (Wells et al., Gene 34:315-23 (1985), the entirety of which is herein incorporated by reference), primer extension (Gilliam et al., Gene 12:129-137 (1980), the entirety of which is herein incorporated by reference; Zoller and Smith, Methods Enzymol. 100:468-500 (1983), the entirety of which is herein incorporated by reference; and Dalbadie-McFarland et al., Proc. Natl. Acad. Sci. USA 79:6409-6413 (1982), the entirety of which is herein incorporated by reference) and methods based upon PCR (Scharf et al., Science 233:1076-1078 (1986), the entirety of which is herein incorporated by reference; Higuchi et al., Nucleic Acids Res. 16:7351-7367 (1988), the entirety of which is herein incorporated by reference). Site-directed mutagenesis approaches are also described in European Patent 0 385 962, the entirety of which is herein incorporated by reference, European Patent 0 359 472, the entirety of which is herein incorporated by reference, and PCT Patent Application WO 93/07278, the entirety of which is herein incorporated by reference.

[0187] Site-directed mutagenesis strategies have been applied to plants for both in vitro as well as in vivo site-directed mutagenesis (Lanz et al., J. Biol. Chem. 266:9971-6 (1991), the entirety of which is herein incorporated by reference; Kovgan and Zhdanov, Biotekhnologiya 5:148-154, No. 207160n, Chemical Abstracts 110:225 (1989), the entirety of which is herein incorporated by reference; Ge et al., Proc. Natl. Acad. Sci. USA 86:4037-4041 (1989), the entirety of which is herein incorporated by reference, Zhu et al., J. Biol. Chem. 271:18494-18498 (1996), Chu et al., Biochemistry 33:6150-6157 (1994), the entirety of which is herein incorporated by reference, Small et al., EMBO J. 11: 1291-1296 (1992), the entirety of which is herein incorporated by reference, Cho et al., Mol. Biotechnol. 8:13-16 (1997), Kita et al., J. Biol. Chem. 271:26529-26535 (1996), the entirety of which is herein incorporated by reference, Jin et al., Mol. Microbiol. 7:555-562 (1993), the entirety of which is herein incorporated by reference, Hatfield and Vierstra, J. Biol. Chem. 267:14799-14803 (1992), the entirety of which is herein incorporated by reference, Zhao et al., Biochemistry 31:5093-5099 (1992), the entirety of which is herein incorporated by reference).

[0188] Any of the nucleic acid molecules of the present invention may either be modified by site-directed mutagenesis or used as, for example, nucleic acid molecules that are used to target other nucleic acid molecules for modification. It is understood that mutants with more than one altered nucleotide can be constructed using techniques that practitioners skilled in the art are familiar with such as isolating restriction fragments and ligating such fragments into an expression vector (see, for example, Sambrook et al., Molecular Cloning: A Laboratory Manual, Cold Spring Harbor Press (1989)). In a preferred embodiment of the present invention, one or more of the rice nucleic acid molecules or fragments thereof of the present invention may be modified by site-directed mutagenesis.

[0189] Nucleic acid molecules of the present invention may be used in transformation. Exogenous genetic material may be transferred into a plant cell and the plant cell regenerated into a whole, fertile or sterile plant. Exogenous genetic material is any genetic material, whether naturally occurring or otherwise, from any source that is capable of being inserted into any organism. In a preferred embodiment of the present invention the exogenous genetic material can include rice genetic material. A particularly preferred embodiment is exogenous genetic material that comprises a nucleic acid molecule of the present invention. Such genetic material may be transferred into either monocotyledons and dicotyledons including but not limited to the plants, maize and Arabidopsis thaliana and rice (See specifically, Chistou, Particle Bombardment for Genetic Engineering of Plants, pp. 63-69 (maize), pp 50-60 (rice), Biotechnology Intelligence Unit, Academic Press, San Diego, Calif. (1996), the entirety of which is herein incorporated by reference and generally Chistou, Particle Bombardment for Genetic Engineering of Plants, Biotechnology Intelligence Unit, Academic Press, San Diego, Calif. (1996), the entirety of which is herein incorporated by reference).

[0190] Transfer of a nucleic acid that encodes for a protein can result in overexpression of that protein in a transformed cell or transgenic plant. One or more of the proteins or fragments thereof encoded by nucleic acid molecules of the present invention may be overexpressed in a transformed cell or transformed plant. Such overexpression may be the result of transient or stable transfer of the exogenous material.

[0191] Exogenous genetic material may be transferred into a plant cell by the use of a DNA vector or construct designed for such a purpose. Preferred exogenous genetic material comprise a nucleic acid molecule of the present invention. Vectors have been engineered for transformation of large DNA inserts into plant genomes. Vectors have been designed to replicate in both E. coli and A. tumefaciens and have all of the features required for transferring large inserts of DNA into plant chromosomes (Choi and Wing, http://genome.clemson.edu/protocols2-nj.html July, 1998). ApBACwich system has been developed to achieve site-directed integration of DNA into the genome. A 150 kb cotton BAC DNA is reported to have been transferred into a specific lox site in tobacco by biolistic bombardment and Cre-lox site specific recombination.

[0192] A construct or vector may include a plant promoter to express the protein or protein fragment of choice. A number of promoters which are active in plant cells have been described in the literature. These include the nopaline synthase (NOS) promoter (Ebert et al., Proc. Natl. Acad. Sci. USA 84:5745-5749 (1987), the entirety of which is herein incorporated by reference), the octopine synthase (OCS) promoter (which are carried on tumor-inducing plasmids of Agrobacterium tumefaciens), the caulimovirus promoters such as the cauliflower mosaic virus (CaMV) 19S promoter (Lawton et al., Plant Mol. Biol. 9:315-324 (1987), the entirety of which is herein incorporated by reference) and the CaMV 35S promoter (Odell et al., Nature 313:810-812 (1985), the entirety of which is herein incorporated by reference), the figwort mosaic virus 35S-promoter, the light-inducible promoter from the small subunit of ribulose-1,5-bis-phosphate carboxylase (ssRUBISCO), the Adh promoter (Walker et al., Proc. Natl. Acad. Sci. USA 84:6624-6628 (1987), the entirety of which is herein incorporated by reference), the sucrose synthase promoter (Yang et al., Proc. Natl. Acad. Sci. USA 87:4144-4148 (1990), the entirety of which is herein incorporated by reference), the R gene complex promoter (Chandler et al., The Plant Cell 1:1175-1183 (1989), the entirety of which is herein incorporated by reference), and the chlorophyll a/b binding protein gene promoter, etc. These promoters have been used to create DNA constructs which have been expressed in plants; see, e.g., PCT publication WO 84/02913, herein incorporated by reference in its entirety.

[0193] Promoters which are known or are found to cause transcription of DNA in plant cells can be used in the present invention. Such promoters may be obtained from a variety of sources such as plants and plant viruses. It is preferred that the particular promoter selected should be capable of causing sufficient expression to result in the production of an effective amount of protein to cause the desired phenotype. In addition to promoters which are known to cause transcription of DNA in plant cells, other promoters may be identified for use in the current invention by screening a plant cDNA library for genes which are selectively or preferably expressed in the target tissues or cells.

[0194] For the purpose of expression in source tissues of the plant, such as the leaf, seed, root or stem, it is preferred that the promoters utilized in the present invention have relatively high expression in these specific tissues. For this purpose, one may choose from a number of promoters for genes with tissue- or cell-specific or -enhanced expression. Examples of such promoters reported in the literature include the chloroplast glutamine synthetase GS2 promoter from pea (Edwards et al., Proc. Natl. Acad. Sci. USA 87:3459-3463 (1990), herein incorporated by reference in its entirety), the chloroplast fructose-1,6-biphosphatase (FBPase) promoter from wheat (Lloyd et al., Mol. Gen. Genet. 225:209-216 (1991), herein incorporated by reference in its entirety), the nuclear photosynthetic ST-LS1 promoter from potato (Stockhaus et al., EMBO J. 8:2445-2451 (1989), herein incorporated by reference in its entirety), the phenylalanine ammonia-lyase (PAL) promoter and the chalcone synthase (CHS) promoter from Arabidopsis thaliana. Also reported to be active in photosynthetically active tissues are the ribulose-1,5-bisphosphate carboxylase (RbcS) promoter from eastern larch (Larix laricina), the promoter for the cab gene, cab6, from pine (Yamamoto et al., Plant Cell Physiol. 35:773-778 (1994), herein incorporated by reference in its entirety), the promoter for the Cab-1 gene from wheat (Fejes et al., Plant Mol. Biol. 15:921-932 (1990), herein incorporated by reference in its entirety), the promoter for the CAB-1 gene from spinach (Lubberstedt et al., Plant Physiol. 104:997-1006 (1994), herein incorporated by reference in its entirety), the promoter for the cab1R gene from rice (Luan et al., Plant Cell. 4:971-981 (1992), the entirety of which is herein incorporated by reference), the pyruvate, orthophosphate dikinase (PPDK) promoter from maize (Matsuoka et al., Proc. Natl. Acad. Sci. USA 90:9586-9590 (1993), herein incorporated by reference in its entirety), the promoter for the tobacco Lhcb1*2 gene (Cerdan et al., Plant Mol. Biol. 33:245-255. (1997), herein incorporated by reference in its entirety), the Arabidopsis thaliana SUC2 sucrose-H+ symporter promoter (Truernit et al., Planta. 196:564-570 (1995), herein incorporated by reference in its entirety), and the promoter for the thylacoid membrane proteins from spinach (psaD, psaF, psaE, PC, FNR, atpC, atpD, cab, rbcS). Other promoters for the chlorophyll a/b-binding proteins may also be utilized in the present invention, such as the promoters for LhcB gene and PsbP gene from white mustard (Sinapis alba; Kretsch et al., Plant Mol. Biol. 28:219-229 (1995), the entirety of which is herein incorporated by reference).

[0195] For the purpose of expression in sink tissues of the plant, such as the tuber of the potato plant, the fruit of tomato, or the seed of maize, wheat, rice, and barley, it is preferred that the promoters utilized in the present invention have relatively high expression in these specific tissues. A number of promoters for genes with tuber-specific or -enhanced expression are known, including the class I patatin promoter (Bevan et al., EMBO J. 8:1899-1906 (1986); Jefferson et al., Plant Mol. Biol. 14995-1006 (1990), both of which are herein incorporated by reference in its entirety), the promoter for the potato tuber ADPGPP genes, both the large and small subunits, the sucrose synthase promoter (Salanoubat and Belliard, Gene. 60:47-56 (1987), Salanoubat and Belliard, Gene. 84:181-185 (1989), both of which are incorporated by reference in their entirety), the promoter for the major tuber proteins including the 22 kd protein complexes and proteinase inhibitors (Hannapel, Plant Physiol. 101:703-704 (1993), herein incorporated by reference in its entirety), the promoter for the granule bound starch synthase gene (GBSS) (Visser et al., Plant Mol. Biol. 17:691-699 (1991), herein incorporated by reference in its entirety), and other class I and II patatins promoters (Koster-Topfer et al., Mol. Gen. Genet. 219:390-396 (1989); Mignery et al., Gene. 62:27-44 (1988), both of which are herein incorporated by reference in their entirety).

[0196] Other promoters can also be used to express a fructose 1,6 bisphosphate aldolase gene in specific tissues, such as seeds or fruits. The promoter for β-conglycinin (Chen et al., Dev. Genet. 10:112-122 (1989), herein incorporated by reference in its entirety) or other seed-specific promoters such as the napin and phaseolin promoters, can be used. The zeins are a group of storage proteins found in maize endosperm. Genomic clones for zein genes have been isolated (Pedersen et al., Cell 29:1015-1026 (1982), herein incorporated by reference in its entirety), and the promoters from these clones, including the 15 kD, 16 kD, 19 kD, 22 kD, 27 kD, and gamma genes, could also be used. Other promoters known to function, for example, in maize, include the promoters for the following genes: waxy, Brittle, Shrunken 2, Branching enzymes I and II, starch synthases, debranching enzymes, oleosins, glutelins, and sucrose synthases. A particularly preferred promoter for maize endosperm expression is the promoter for the glutelin gene from rice, more particularly the Osgt-1 promoter (Zheng et al., Mol. Cell. Biol. 13:5829-5842 (1993), herein incorporated by reference in its entirety). Examples of promoters suitable for expression in wheat include those promoters for the ADPglucose pyrophosphorylase (ADPGPP) subunits, the granule bound and other starch synthases, the branching and debranching enzymes, the embryogenesis-abundant proteins, the gliadins, and the glutenins. Examples of such promoters in rice include those promoters for the ADPGPP subunits, the granule bound and other starch synthases, the branching enzymes, the debranching enzymes, sucrose synthases, and the glutelins. A particularly preferred promoter is the promoter for rice glutelin, Osgt-1. Examples of such promoters for barley include those for the ADPGPP subunits, the granule bound and other starch synthases, the branching enzymes, the debranching enzymes, sucrose synthases, the hordeins, the embryo globulins, and the aleurone specific proteins.

[0197] Root specific promoters may also be used. An example of such a promoter is the promoter for the acid chitinase gene (Samac et al., Plant Mol. Biol. 25:587-596 (1994), the entirety of which is herein incorporated by reference). Expression in root tissue could also be accomplished by utilizing the root specific subdomains of the CaMV35S promoter that have been identified (Lam et al., Proc. Natl. Acad. Sci. USA 86:7890-7894 (1989), herein incorporated by reference in its entirety). Other root cell specific promoters include those reported by Conkling et al. (Conkling et al., Plant Physiol. 93:1203-1211 (1990), the entirety of which is herein incorporated by reference).

[0198] Additional promoters that may be utilized are described, for example, in U.S. Pat. Nos. 5,378,619, 5,391,725, 5,428,147, 5,447,858, 5,608,144, 5,608,144, 5,614,399, 5,633,441, 5,633,435, and 4,633,436, all of which are herein incorporated in their entirety. In addition, a tissue specific enhancer may be used (Fromm et al., The Plant Cell 1:977-984 (1989), the entirety of which is herein incorporated by reference).

[0199] Constructs or vectors may also include, with the coding region of interest, a nucleic acid sequence that acts, in whole or in part, to terminate transcription of that region. For example, such sequences have been isolated including the Tr7 3′ sequence and the nos 3′ sequence (Ingelbrecht et al., The Plant Cell 1:671-680 (1989), the entirety of which is herein incorporated by reference; Bevan et al., Nucleic Acids Res. 11:369-385 (1983), the entirety of which is herein incorporated by reference), or the like.

[0200] A vector or construct may also include regulatory elements. Examples of such include the Adh intron 1 (Callis et al., Genes and Develop. 1:1183-1200 (1987), the entirety of which is herein incorporated by reference), the sucrose synthase intron (Vasil et al., Plant Physiol. 91:1575-1579 (1989), the entirety of which is herein incorporated by reference) and the TMV omega element (Gallie et al., The Plant Cell 1:301-311 (1989), the entirety of which is herein incorporated by reference). These and other regulatory elements may be included when appropriate.

[0201] A vector or construct may also include a selectable marker. Selectable markers may also be used to select for plants or plant cells that contain the exogenous genetic material. Examples of such include, but are not limited to, a neo gene (Potrykus et al., Mol. Gen. Genet. 199:183-188 (1985), the entirety of which is herein incorporated by reference) which codes for kanamycin resistance and can be selected for using kanamycin, G418, etc.; a bar gene which codes for bialaphos resistance; a mutant EPSP synthase gene (Hinchee et al., Bio/Technology 6:915-922 (1988), the entirety of which is herein incorporated by reference) which encodes glyphosate resistance; a nitrilase gene which confers resistance to bromoxynil (Stalker et al., J. Biol. Chem. 263:6310-6314 (1988), the entirety of which is herein incorporated by reference); a mutant acetolactate synthase gene (ALS) which confers imidazolinone or sulphonylurea resistance (European Patent Application 154,204 (Sep. 11, 1985), the entirety of which is herein incorporated by reference); and a methotrexate resistant DHFR gene (Thillet et al., J. Biol. Chem. 263:12500-12508 (1988), the entirety of which is herein incorporated by reference).

[0202] A vector or construct may also include a transit peptide. Incorporation of a suitable chloroplast transit peptide may also be employed (European Patent Application Publication Number 0218571, the entirety of which is herein incorporated by reference). Translational enhancers may also be incorporated as part of the vector DNA. DNA constructs could contain one or more 5′ non-translated leader sequences which may serve to enhance expression of the gene products from the resulting mRNA transcripts. Such sequences may be derived from the promoter selected to express the gene or can be specifically modified to increase translation of the mRNA. Such regions may also be obtained from viral RNAs, from suitable eukaryotic genes, or from a synthetic gene sequence. For a review of optimizing expression of transgenes, see Koziel et al., Plant Mol. Biol. 32:393-405 (1996), the entirety of which is herein incorporated by reference.

[0203] A vector or construct may also include a screenable marker. Screenable markers may be used to monitor expression. Exemplary screenable markers include a β-glucuronidase or uidA gene (GUS) which encodes an enzyme for which various chromogenic substrates are known (Jefferson, Plant Mol. Biol, Rep. 5:387-405 (1987), the entirety of which is herein incorporated by reference; Jefferson et al., EMBO J. 6:3901-3907 (1987), the entirety of which is herein incorporated by reference); an R-locus gene, which encodes a product that regulates the production of anthocyanin pigments (red color) in plant tissues ((Dellaporta et al., Stadler Symposium 11:263-282 (1988), the entirety of which is herein incorporated by reference); a β-lactamase gene (Sutcliffe et al., Proc. Natl. Acad. Sci. USA 75:3737-3741 (1978), the entirety of which is herein incorporated by reference), a gene which encodes an enzyme for which various chromogenic substrates are known (e.g., PADAC, a chromogenic cephalosporin); a luciferase gene (Ow et al., Science 234:856-859 (1986), the entirety of which is herein incorporated by reference) a xylE gene (Zukowsky et al., Proc. Natl. Acad. Sci. USA 80:1101-1105 (1983), the entirety of which is herein incorporated by reference) which encodes a catechol diozygenase that can convert chromogenic catechols; an α-amylase gene (Ikatu et al., Bio/Technol. 8:241-242 (1990), the entirety of which is herein incorporated by reference); a tyrosinase gene (Katz et al., J. Gen. Microbiol. 129:2703-2714 (1983), the entirety of which is herein incorporated by reference) which encodes an enzyme capable of oxidizing tyrosine to DOPA and dopaquinone which in turn condenses to melanin; an α-galactosidase, which will turn a chromogenic α-galactose substrate.

[0204] Included within the terms “selectable or screenable marker genes” are also genes which encode a secretable marker whose secretion can be detected as a means of identifying or selecting for transformed cells. Examples include markers which encode a secretable antigen that can be identified by antibody interaction, or even secretable enzymes which can be detected catalytically. Secretable proteins fall into a number of classes, including small, diffusible proteins detectable, e.g., by ELISA, small active enzymes detectable in extracellular solution (e.g., α-amylase, β-lactamase, phosphinothricin transferase), or proteins which are inserted or trapped in the cell wall (such as proteins which include a leader sequence such as that found in the expression unit of extension or tobacco PR-S). Other possible selectable and/or screenable marker genes will be apparent to those of skill in the art.

[0205] Methods and compositions for transforming a bacteria and other microorganisms are known in the art (see for example Sambrook et al., Molecular Cloning: A Laboratory Manual, Second Edition, Cold Spring Harbor Laboratory Press, Cold Spring Harbor, N.Y., (1989), the entirety of which is herein incorporated by reference).

[0206] There are many methods for introducing transforming nucleic acid molecules into plant cells. Suitable methods are believed to include virtually any method by which nucleic acid molecules may be introduced into a cell, such as by Agrobacterium infection or direct delivery of nucleic acid molecules such as, for example, by PEG-mediated transformation, by electroporation or by acceleration of DNA coated particles, etc. (Pottykus, Ann. Rev. Plant Physiol. Plant Mol. Biol. 42:205-225 (1991), the entirety of which is herein incorporated by reference; Vasil, Plant Mol. Biol. 25:925-937 (1994), the entirety of which is herein incorporated by reference). For example, electroporation has been used to transform maize protoplasts (Fromm et al., Nature 312:791-793 (1986), the entirety of which is herein incorporated by reference).

[0207] Technology for introduction of DNA into cells is well known to those of skill in the art. Four general methods for delivering a gene into cells have been described: (1) chemical methods (Graham and van der Eb, Virology, 54:536-539 (1973), the entirety of which is herein incorporated by reference); (2) physical methods such as microinjection (Capecchi, Cell 22:479-488 (1980), electroporation (Wong and Neumann, Biochem. Biophys. Res. Commun., 107:584-587 (1982); Fromm et al., Proc. Natl. Acad. Sci. USA, 82:5824-5828 (1985); U.S. Pat. No. 5,384,253; and the gene gun (Johnston and Tang, Methods Cell Biol. 43:353-365 (1994), all of which are herein incorporated by reference in their entirety; (3) viral vectors (Clapp, Clin. Perinatol., 20:155-168 (1993); Lu et al., J. Exp. Med., 178:2089-2096 (1993); Eglitis and Anderson, Biotechniques, 6:608-614 (1988), all of which are herein incorporated by reference in their entirety); and (4) receptor-mediated mechanisms (Curiel et al., Hum. Gen. Ther., 3:147-154 (1992); Wagner et al., Proc. Natl. Acad. Sci. USA, 89:6099-6103 (1992), all of are herein incorporated by reference in their entirety).

[0208] Acceleration methods that may be used include, for example, microprojectile bombardment and the like. One example of a method for delivering transforming nucleic acid molecules to plant cells is microprojectile bombardment. This method has been reviewed by Yang and Christou, eds., Particle Bombardment Technology for Gene Transfer, Oxford Press, Oxford, England (1994), the entirety of which is herein incorporated by reference). Non-biological particles (microprojectiles) that may be coated with nucleic acids and delivered into cells by a propelling force. Exemplary particles include those comprised of tungsten, gold, platinum, and the like.

[0209] A particular advantage of microprojectile bombardment, in addition to it being an effective means of reproducibly, and stably transforming monocotyledons, is that neither the isolation of protoplasts (Cristou et al., Plant Physiol. 87:671-674 (1988), the entirety of which is herein incorporated by reference) nor the susceptibility of Agrobacterium infection is required. An illustrative embodiment of a method for delivering DNA into maize cells by acceleration is a biolistics-particle delivery system, which can be used to propel particles coated with DNA through a screen, such as a stainless steel or Nytex screen, onto a filter surface covered with corn cells cultured in suspension. Gordon-Kamm et al., describes the basic procedure for coating tungsten particles with DNA (Gordon-Kamm et al., Plant Cell 2:603-618 (1990), the entirety of which is herein incorporated by reference). The screen disperses the tungsten nucleic acid particles so that they are not delivered to the recipient cells in large aggregates. A particle delivery system suitable for use with the present invention is the helium acceleration PDS-1000/He gun which is available from Bio-Rad Laboratories (Bio-Rad, Hercules, Calif.)(Sanford et al., Technique 3:3-16 (1991), the entirety of which is herein incorporated by reference).

[0210] For the bombardment, cells in suspension may be concentrated on filters. Filters containing the cells to be bombarded are positioned at an appropriate distance below the microprojectile stopping plate. If desired, one or more screens are also positioned between the gun and the cells to be bombarded.

[0211] Alternatively, immature embryos or other target cells may be arranged on solid culture medium. The cells to be bombarded are positioned at an appropriate distance below the macroprojectile stopping plate. If desired, one or more screens are also positioned between the acceleration device and the cells to be bombarded. Through the use of techniques set forth herein one may obtain up to 1000 or more foci of cells transiently expressing a marker gene. The number of cells in a focus which express the exogenous gene product 48 hours post-bombardment often range from one to ten and average one to three.

[0212] In bombardment transformation, one may optimize the prebombardment culturing conditions and the bombardment parameters to yield the maximum numbers of stable transformants. Both the physical and biological parameters for bombardment are important in this technology. Physical factors are those that involve manipulating the DNA/microprojectile precipitate or those that affect the flight and velocity of either the macro- or microprojectiles. Biological factors include all steps involved in manipulation of cells before and immediately after bombardment, the osmotic adjustment of target cells to help alleviate the trauma associated with bombardment, and also the nature of the transforming DNA, such as linearized DNA or intact supercoiled plasmids. It is believed that pre-bombardment manipulations are especially important for successful transformation of immature embryos.

[0213] In another alternative embodiment, plastids can be stably transformed. Methods disclosed for plastid transformation in higher plants include particle gun delivery of DNA containing a selectable marker and targeting of the DNA to the plastid genome through homologous recombination (Svab et al. Proc. Natl. Acad. Sci. USA 87:8526-8530 (1990); Svab and Maliga Proc. Natl. Acad. Sci. USA 90:913-917 (1993)); Staub, J. M. and Maliga, P. EMBO J. 12:601-606 (1993), U.S. Pat. Nos. 5,451,513 and 5,545,818, all of which are herein incorporated by reference in their entirety).

[0214] Accordingly, it is contemplated that one may wish to adjust various aspects of the bombardment parameters in small scale studies to fully optimize the conditions. One may particularly wish to adjust physical parameters such as gap distance, flight distance, tissue distance, and helium pressure. One may also minimize the trauma reduction factors by modifying conditions which influence the physiological state of the recipient cells and which may therefore influence transformation and integration efficiencies. For example, the osmotic state, tissue hydration and the subculture stage or cell cycle of the recipient cells may be adjusted for optimum transformation. The execution of other routine adjustments will be known to those of skill in the art in light of the present disclosure.

[0215] Agrobacterium-mediated transfer is a widely applicable system for introducing genes into plant cells because the DNA can be introduced into whole plant tissues, thereby bypassing the need for regeneration of an intact plant from a protoplast. The use of Agrobacterium-mediated plant integrating vectors to introduce DNA into plant cells is well known in the art. See, for example the methods described (Fraley et al., Biotechnology 3:629-635 (1985); Rogers et al, Meth. In Enzymol, 153:253-277 (1987), both of which are herein incorporated by reference in their entirety. Further, the integration of the Ti-DNA is a relatively precise process resulting in few rearrangements. The region of DNA to be transferred is defined by the border sequences, and intervening DNA is usually inserted into the plant genome as described (Spielmann et al., Mol. Gen. Genet., 205:34 (1986), the entirety of which is herein incorporated by reference). Mode Agrobacterium transformation vectors are capable of replication in E. coli as well as Agrobacterium, allowing for convenient manipulations as described (Klee et al., In: Plant DNA Infectious Agents, T. Hohn and J. Schell, eds., Springer-Verlag, New York, pp. 179-203 (1985), the entirety of which is herein incorporated by reference). Moreover, recent technological advances in vectors for Agrobacterium-mediated gene transfer have improved the arrangement of genes and restriction sites in the vectors to facilitate construction of vectors capable of expressing various polypeptide coding genes. The vectors described have convenient multi-linker regions flanked by a promoter and a polyadenylation site for direct expression of inserted polypeptide coding genes and are suitable for present purposes (Rogers et al., Meth. In Enzymol., 153:253-277 (1987), the entirety of which is herein incorporated by reference). In addition, Agrobacterium containing both armed and disarmed Ti genes can be used for the transformations. In those plant strains where Agrobacterium-mediated transformation is efficient, it is the method of choice because of the facile and defined nature of the gene transfer.

[0216] A transgenic plant formed using Agrobacterium transformation methods typically contains a single gene on one chromosome. Such transgenic plants can be referred to as being heterozygous for the added gene. More preferred is a transgenic plant that is homozygous for the added structural gene; i.e., a transgenic plant that contains two added genes, one gene at the same locus on each chromosome of a chromosome pair. A homozygous transgenic plant can be obtained by sexually mating (selfing) an independent segregant transgenic plant that contains a single added gene, germinating some of the seed produced and analyzing the resulting plants produced for the gene of interest.

[0217] It is also to be understood that two different transgenic plants can also be mated to produce offspring that contain two independently segregating added, exogenous genes. Selfing of appropriate progeny can produce plants that are homozygous for both added, exogenous genes that encode a polypeptide of interest. Back-crossing to a parental plant and out-crossing with a non-transgenic plant are also contemplated, as is vegetative propagation.

[0218] Transformation of plant protoplasts can be achieved using methods based on calcium phosphate precipitation, polyethylene glycol treatment, electroporation, and combinations of these treatments. See for example (Potrykus et al., Mol. Gen. Genet., 205:193-200 (1986); Lorz et al., Mol. Gen. Genet., 199:178, (1985); Fromm et al., Nature, 319:791, (1986); Uchimiya et al., Mol. Gen. Genet.: 204:204, (1986); Callis et al., Genes and Development, 1183, (1987); Marcotte et al., Nature, 335:454, (1988), all of which the entirety is herein incorporated by reference).

[0219] Application of these systems to different plant strains depends upon the ability to regenerate that particular plant strain from protoplasts. Illustrative methods for the regeneration of cereals from protoplasts are described (Fujimura et al., Plant Tissue Culture Letters, 2:74, (1985); Toriyama et al., Theor Appl. Genet. 205:34. (1986); Yamada et al., Plant Cell Rep., 4:85, (1986); Abdullah et al., Biotechnology, 4:1087, (1986), all of which the entirety is herein incorporated by reference).

[0220] To transform plant strains that cannot be successfully regenerated from protoplasts, other ways to introduce DNA into intact cells or tissues can be utilized. For example, regeneration of cereals from immature embryos or explants can be effected as described (Vasil, Biotechnology, 6:397, (1988), the entirety of which is herein incorporated by reference). In addition, “particle gun” or high-velocity microprojectile technology can be utilized (Vasil et al., Bio/Technology 10:667, (1992), the entirety of which is herein incorporated by reference).

[0221] Using the latter technology, DNA is carried through the cell wall and into the cytoplasm on the surface of small metal particles as described (Klein et al., Nature, 328:70, (1987); Klein et al., Proc. Natl. Acad. Sci. USA, 85:8502-8505, (1988); McCabe et al., Biotechnology, 6:923, (1988), all of which the entirety is herein incorporated by reference). The metal particles penetrate through several layers of cells and thus allow the transformation of cells within tissue explants.

[0222] Other methods of cell transformation can also be used and include but are not limited to introduction of DNA into plants by direct DNA transfer into pollen (Hess et al., Intern Rev. Cytol., 107:367, (1987); Luo et al., Plant Mol. Biol. Reporter, 6:165, (1988), all of which the entirety is herein incorporated by reference), by direct injection of DNA into reproductive organs of a plant (Pena et al., Nature, 325:274, (1987), the entirety of which is herein incorporated by reference), or by direct injection of DNA into the cells of immature embryos followed by the rehydration of dessicated embryos (Neuhaus et al., Theor. Appl. Genet., 75:30, (1987), the entirety of which is herein incorporated by reference).

[0223] The regeneration, development, and cultivation of plants from single plant protoplast transformants or from various transformed explants is well known in the art (Weissbach and Weissbach, In: Methods for Plant Molecular Biology, (Eds.), Academic Press, Inc., San Diego, Calif., (1988), the entirety of which is herein incorporated by reference). This regeneration and growth process typically includes the steps of selection of transformed cells, culturing those individualized cells through the usual stages of embryonic development through the rooted plantlet stage. Transgenic embryos and seeds are similarly regenerated. The resulting transgenic rooted shoots are thereafter planted in an appropriate plant growth medium such as soil.

[0224] The development or regeneration of plants containing the foreign, exogenous gene that encodes a protein of interest is well known in the art. Preferably, the regenerated plants are self-pollinated to provide homozygous transgenic plants, as discussed before. Otherwise, pollen obtained from the regenerated plants is crossed to seed-grown plants of agronomically important lines. Conversely, pollen from plants of these important lines is used to pollinate regenerated plants. A transgenic plant of the present invention containing a desired polypeptide is cultivated using methods well known to one skilled in the art.

[0225] There are a variety of methods for the regeneration of plants from plant tissue. The particular method of regeneration will depend on the starting plant tissue and the particular plant species to be regenerated.

[0226] Methods for transforming dicots, primarily by use of Agrobacterium tumefaciens, and obtaining transgenic plants have been published for cotton (U.S. Pat. No. 5,004,863, U.S. Pat. No. 5,159,135, U.S. Pat. No. 5,518,908, all of which the entirety is herein incorporated by reference); rice (U.S. Pat. No. 5,569,834, U.S. Pat. No. 5,416,011, McCabe et al., Biotechnology 6:923, (1988), Christou et al., Plant Physiol., 87:671-674 (1988), all of which the entirety is herein incorporated by reference); Brassica (U.S. Pat. No. 5,463,174, the entirety of which is herein incorporated by reference); peanut (Cheng et al., Plant Cell Rep. 15:653-657 (1996), McKently et al., Plant Cell Rep. 14:699-703 (1995), all of which the entirety is herein incorporated by reference); papaya (Yang et al., (1996), the entirety of which is herein incorporated by reference); pea (Grant et al., Plant Cell Rep. 15:254-258, (1995), the entirety of which is herein incorporated by reference).

[0227] Transformation of monocotyledons using electroporation, particle bombardment, and Agrobacterium have also been reported. Transformation and plant regeneration have been achieved in asparagus (Bytebier et al., Proc. Natl. Acad. Sci. USA 84:5345, (1987), the entirety of which is herein incorporated by reference); barley (Wan and Lemaux, Plant Physiol 104:37, (1994), the entirety of which is herein incorporated by reference); maize (Rhodes et al., Science 240:204, (1988), Gordon-Kamm et al., Plant Cell, 2:603, (1990), Fromm et al., Bio/Technology 8:833, (1990), Koziel et al., Bio/Technology 11:194, (1993), Armstrong et al., Crop Science 35:550-557, (1995), all of which the entirety is herein incorporated by reference); oat (Somers et al., Bio/Technology, 10: 1589, (1992), the entirety of which is herein incorporated by reference); orchardgrass (Horn et al., Plant Cell Rep. 7:469, (1988), the entirety of which is herein incorporated by reference); rice (Toriyama et al., Theor Appl. Genet. 205:34, (1986); Park et al., Plant Mol. Biol., 32: 1135-1148, (1996); Abedinia et al., Aust. J. Plant Physiol. 24: 133-141, (1997); Zhang and Wu, Theor. Appl. Genet. 76:835, (1988); Zhang et al., Plant Cell Rep. 7:379, (1988); Battraw and Hall, Plant Sci. 86:191-202, (1992); Christou et al., Bio/Technology 9:957, (1991), all of which the entirety is herein incorporated by reference); sugarcane (Bower and Birch, Plant J. 2:409, (1992), the entirety of which is herein incorporated by reference); tall fescue (Wang et al., Bio/Technology 10:691, (1992), the entirety of which is herein incorporated by reference), and wheat (Vasil et al., Bio/Technology 10:667, (1992), the entirety of which is herein incorporated by reference; U.S. Pat. No. 5,631,152, the entirety of which is herein incorporated by reference.

[0228] Assays for gene expression based on the transient expression of cloned nucleic acid constructs have been developed by introducing the nucleic acid molecules into plant cells by polyethylene glycol treatment, electroporation, or particle bombardment (Marcotte, et al., Nature, 335:454-457 (1988), the entirety of which is herein incorporated by reference; Marcotte, et al., Plant Cell, 1:523-532 (1989), the entirety of which is herein incorporated by reference; McCarty, et al., Cell 66:895-905 (1991), the entirety of which is herein incorporated by reference; Hattori, et al., Genes Dev. 6:609-618 (1992), the entirety of which is herein incorporated by reference; Goff, et al., EMBO J. 9:2517-2522 (1990), the entirety of which is herein incorporated by reference). Transient expression systems may be used to functionally dissect gene constructs (See generally, Mailga et al., Methods in Plant Molecular Biology, Cold Spring Harbor Press (1995)).

[0229] Any of the nucleic acid molecules of the present invention may be introduced into a plant cell in a permanent or transient manner in combination with other genetic elements such as vectors, promoters enhancers etc. Further any of the nucleic acid molecules of the present invention may be introduced into a plant cell in a manner that allows for over expression of the protein or fragment thereof encoded by the nucleic acid molecule.

[0230] Nucleic acid molecules of the present invention may be used in cosuppression. Cosuppression is the reduction in expression levels, usually at the level of RNA, of a particular endogenous gene or gene family by the expression of a homologous sense construct that is capable of transcribing mRNA of the same strandedness as the transcript of the endogenous gene (Napoli et al., Plant Cell 2:279-289 (1990), the entirety of which is herein incorporated by reference; van der Krol et al., Plant Cell 2:291-299 (1990), the entirety of which is herein incorporated by reference). Cosuppression may result from stable transformation with a single copy nucleic acid molecule that is homologous to a nucleic acid sequence found with the cell (Prolls and Meyer, Plant J. 2:465-475 (1992), the entirety of which is herein incorporated by reference) or with multiple copies of a nucleic acid molecule that is homologous to a nucleic acid sequence found with the cell (Mittlesten et al., Mol. Gen. Genet. 244: 325-330 (1994), the entirety of which is herein incorporated by reference). Genes, even though different, linked to homologous promoters may result in the cosuppression of the linked genes (Vaucheret, C. R. Acad. Sci. III 316: 1471-1483 (1993), the entirety of which is herein incorporated by reference).

[0231] This technique has, for example been applied to generate white flowers from red petunia and tomatoes that do not ripen on the vine. Up to 50% of petunia transformants that contained a sense copy of the chalcone synthase (CHS) gene produced white flowers or floral sectors; this was as a result of the post-transcriptional loss of mRNA encoding CHS (Flavell, Proc. Natl. Acad. Sci. USA 91:3490-3496 (1994)), the entirety of which is herein incorporated by reference). Cosuppression may require the coordinate transcription of the transgene and the endogenous gene, and can be reset by a developmental control mechanism (Jorgensen, Trends Biotechnol, 8:340344 (1990), the entirety of which is herein incorporated by reference; Meins and Kunz, In: Gene Inactivation and Homologous Recombination in Plants (Paszkowski, J., ed.), pp. 335-348. Kluwer Academic, Netherlands (1994), the entirety of which is herein incorporated by reference).

[0232] It is understood that one or more of the nucleic acids of the present invention comprising SEQ ID NO: 1 or complement thereof through SEQ ID NO: 52202 or complement thereof or fragment thereof or other nucleic acid molecules of the present invention, may be introduced into a plant cell and transcribed using an appropriate promoter with such transcription resulting in the co-suppression of an endogenous protein.

[0233] Nucleic acid molecules of the present invention may be used to reduce gene function. Antisense approaches are a way of preventing or reducing gene function by targeting the genetic material (Mol et al., FEBS Lett. 268:427-430 (1990), the entirety of which is herein incorporated by reference). The objective of the antisense approach is to use a sequence complementary to the target gene to block its expression and create a mutant cell line or organism in which the level of a single chosen protein is selectively reduced or abolished. Antisense techniques have several advantages over other ‘reverse genetic’ approaches. The site of inactivation and its developmental effect can be manipulated by the choice of promoter for antisense genes or by the timing of external application or microinjection. Antisense can manipulate its specificity by selecting either unique regions of the target gene or regions where it shares homology to other related genes (Hiatt et al., In Genetic Engineering, Setlow (ed.), Vol. 11, New York: Plenum 49-63 (1989), the entirety of which is herein incorporated by reference).

[0234] The principle of regulation by antisense RNA is that RNA that is complementary to the target mRNA is introduced into cells, resulting in specific RNA:RNA duplexes being formed by base pairing between the antisense substrate and the target mRNA (Green et al., Annu. Rev. Biochem. 55:569-597 (1986), the entirety of which is herein incorporated by reference). Under one embodiment, the process involves the introduction and expression of an antisense gene sequence. Such a sequence is one in which part or all of the normal gene sequences are placed under a promoter in inverted orientation so that the ‘wrong’ or complementary strand is transcribed into a noncoding antisense RNA that hybridizes with the target mRNA and interferes with its expression (Takayama and Inouye, Crit. Rev. Biochem. Mol. Biol. 25:155-184 (1990), the entirety of which is herein incorporated by reference). An antisense vector is constructed by standard procedures and introduced into cells by transformation, transfection, electroporation, microinjection, or by infection, etc. The type of transformation and choice of vector will determine whether expression is transient or stable. The promoter used for the antisense gene may influence the level, timing, tissue, specificity, or inducibility of the antisense inhibition.

[0235] It is understood that protein synthesis activity in a plant cell may be reduced or depressed by growing a transformed plant cell containing a nucleic acid molecule of the present invention.

[0236] Antibodies have been expressed in plants (Hiatt et al., Nature 342:76-78 (1989), the entirety of which is herein incorporated by reference; Conrad and Fielder, Plant Mol. Biol. 26.1023-1030 (1994), the entirety of which is herein incorporated by reference). Cytoplasmic expression of a scFv (single-chain Fv antibodies) has been reported to delay infection by artichoke mottled crinkle virus. Transgenic plants that express antibodies directed against endogenous proteins may exhibit a physiological effect (Philips et al., EMBO J. 16:4489-4496 (1997), the entirety of which is herein incorporated by reference; Marion-Poll, Trends in Plant Science 2:447-448 (1997), the entirety of which is herein incorporated by reference). For example, expressed anti-abscisic antibodies reportedly result in a general perturbation of seed development (Philips et al., EMBO J. 16:4489-4496 (1997)).

[0237] Nucleic acid molecules of the present invention may be used as antibodies. Antibodies that are catalytic may also be expressed in plants (abzymes). The principle behind abzymes is that since antibodies may be raised against many molecules, this recognition ability can be directed toward generating antibodies that bind transition states to force a chemical reaction forward (Persidas, Nature Biotechnology 15:1313-1315 (1997), the entirety of which is herein incorporated by reference; Baca et al., Ann. Rev. Biophys. Biomol. Struct. 26:461-493 (1997), the entirety of which is herein incorporated by reference). The catalytic abilities of abzymes may be enhanced by site directed mutagenesis. Examples of abzymes are, for example, set forth in U.S. Pat. No. 5,658,753; U.S. Pat. No. 5,632,990; U.S. Pat. No. 5,631,137; U.S. Pat. No. 5,602,015; U.S. Pat. No. 5,559,538; U.S. Pat. No. 5,576,174; U.S. Pat. No. 5,500,358; U.S. Pat. No. 5,318,897; U.S. Pat. No. 5,298,409; U.S. Pat. No. 5,258,289 and U.S. Pat. No. 5,194,585, all of which are herein incorporated in their entirety.

[0238] It is understood that any of the antibodies of the present invention may be expressed in plants and that such expression can result in a physiological effect. It is also understood that any of the expressed antibodies may be catalytic.

[0239] In addition to the above discussed procedures, practitioners are familiar with the standard resource materials which describe specific conditions and procedures for the construction, manipulation and isolation of macromolecules (e.g., DNA molecules, plasmids, etc.), generation of recombinant organisms and the screening and isolating of clones, (see for example, Sambrook et al., Molecular Cloning: A Laboratory Manual, Cold Spring Harbor Press (1989); Mailga et al., Methods in Plant Molecular Biology, Cold Spring Harbor Press (1995), the entirety of which is herein incorporated by reference; Birren et al., Genome Analysis: Analyzing DNA, 1, Cold Spring Harbor, N.Y. (1998), the entirety of which is herein incorporated by reference).

[0240] The nucleotide sequence provided in SEQ ID NO: 1, through SEQ ID NO: 52202 or fragment thereof, or complement thereof, or a nucleotide sequence at least 90% identical, preferably 95%, identical even more preferably 99% or 100% identical to the sequence provided in SEQ ID NO: 1 through SEQ ID NO: 52202 or fragment thereof, or complement thereof, can be “provided” in a variety of mediums to facilitate use fragment thereof. Such a medium can also provide a subset thereof in a form that allows a skilled artisan to examine the sequences.

[0241] In a preferred embodiment, 20, preferably 50, more preferably 100, even more preferably 1,000, 2,000, 3,000, or 4,000 of the nucleic acid sequences of the present invention can be provided in a variety of mediums.

[0242] In one application of this embodiment, a nucleotide sequence of the present invention can be recorded on computer readable media. As used herein, “computer readable media” refers to any medium that can be read and accessed directly by a computer. Such media include, but are not limited to: magnetic storage media, such as floppy discs, hard disc, storage medium, and magnetic tape: optical storage media such as CD-ROM; electrical storage media such as RAM and ROM; and hybrids of these categories such as magnetic/optical storage media. A skilled artisan can readily appreciate how any of the presently known computer readable mediums can be used to create a manufacture comprising computer readable medium having recorded thereon a nucleotide sequence of the present invention.

[0243] As used herein, “recorded” refers to a process for storing information on computer readable medium. A skilled artisan can readily adopt any of the presently known methods for recording information on computer readable medium to generate media comprising the nucleotide sequence information of the present invention. A variety of data storage structures are available to a skilled artisan for creating a computer readable medium having recorded thereon a nucleotide sequence of the present invention. The choice of the data storage structure will generally be based on the means chosen to access the stored information. In addition, a variety of data processor programs and formats can be used to store the nucleotide sequence information of the present invention on computer readable medium. The sequence information can be represented in a word processing text file, formatted in commercially-available software such as WordPerfect and Microsoft Word, or represented in the form of an ASCII file, stored in a database application, such as DB2, Sybase, Oracle, or the like. A skilled artisan can readily adapt any number of data processor structuring formats (e.g., text file or database) in order to obtain computer readable medium having recorded thereon the nucleotide sequence information of the present invention.

[0244] By providing one or more of nucleotide sequences of the present invention, a skilled artisan can routinely access the sequence information for a variety of purposes. Computer software is publicly available which allows a skilled artisan to access sequence information provided in a computer readable medium. The examples which follow demonstrate how software which implements the BLAST (Altschul et al., J. Mol. Biol. 215:403-410 (1990)) and BLAZE (Brutlag et al., Comp. Chem. 17:203-207 (1993), the entirety of which is herein incorporated by reference) search algorithms on a Sybase system can be used to identify open reading frames (ORFs) within the genome that contain homology to ORFs or proteins from other organisms. Such ORFs are protein-encoding fragments within the sequences of the present invention and are useful in producing commercially important proteins such as enzymes used in amino acid biosynthesis, metabolism, transcription, translation, RNA processing, nucleic acid and a protein degradation, protein modification, and DNA replication, restriction, modification, recombination, and repair.

[0245] The present invention further provides systems, particularly computer-based systems, which contain the sequence information described herein. Such systems are designed to identify commercially important fragments of the nucleic acid molecule of the present invention. As used herein, “a computer-based system” refers to the hardware means, software means, and data storage means used to analyze the nucleotide sequence information of the present invention. The minimum hardware means of the computer-based systems of the present invention comprises a central processing unit (CPU), input means, output means, and data storage means. A skilled artisan can readily appreciate that any one of the currently available computer-based system are suitable for use in the present invention.

[0246] As indicated above, the computer-based systems of the present invention comprise a data storage means having stored therein a nucleotide sequence of the present invention and the necessary hardware means and software means for supporting and implementing a search means. As used herein, “data storage means” refers to memory that can store nucleotide sequence information of the present invention, or a memory access means which can access manufactures having recorded thereon the nucleotide sequence information of the present invention. As used herein, “search means” refers to one or more programs which are implemented on the computer-based system to compare a target sequence or target structural motif with the sequence information stored within the data storage means. Search means are used to identify fragments or regions of the sequence of the present invention that match a particular target sequence or target motif. A variety of known algorithms are disclosed publicly and a variety of commercially available software for conducting search means are available and can be used in the computer-based systems of the present invention. Examples of such software include, but are not limited to, MacPattern (EMBL), BLASTIN and BLASTIX (NCBIA). One of the available algorithms or implementing software packages for conducting homology searches can be adapted for use in the present computer-based systems.

[0247] The most preferred sequence length of a target sequence is from about 10 to 100 amino acids or from about 30 to 300 nucleotide residues. However, it is well recognized that during searches for commercially important fragments of the nucleic acid molecules of the present invention, such as sequence fragments involved in gene expression and protein processing, may be of shorter length.

[0248] As used herein, “a target structural motif,” or “target motif,” refers to any rationally selected sequence or combination of sequences in which the sequence(s) are chosen based on a three-dimensional configuration which is formed upon the folding of the target motif. There are a variety of target motifs known in the art. Protein target motifs include, but are not limited to, enzymatic active sites and signal sequences. Nucleic acid target motifs include, but are not limited to, promoter sequences, cis elements, hairpin structures and inducible expression elements (protein binding sequences).

[0249] Thus, the present invention further provides an input means for receiving a target sequence, a data storage means for storing the target sequences of the present invention sequence identified using a search means as described above, and an output means for outputting the identified homologous sequences. A variety of structural formats for the input and output means can be used to input and output information in the computer-based systems of the present invention. A preferred format for an output means ranks fragments of the sequence of the present invention by varying degrees of homology to the target sequence or target motif. Such presentation provides a skilled artisan with a ranking of sequences which contain various amounts of the target sequence or target motif and identifies the degree of homology contained in the identified fragment.

[0250] A variety of comparing means can be used to compare a target sequence or target motif with the data storage means to identify sequence fragments sequence of the present invention. For example, implementing software which implement the BLAST and BLAZE algorithms (Altschul et al., J. Mol. Biol. 215:403-410 (1990)) can be used to identify open frames within the nucleic acid molecules of the present invention. A skilled artisan can readily recognize that any one of the publicly available homology search programs can be used as the search means for the computer-based systems of the present invention.

[0251] Having now generally described the invention, the same will be more readily understood through reference to the following examples which are provided by way of illustration, and are not intended to be limiting of the present invention, unless specified.

### EXAMPLE 1

[0252] BACs are stable, non-chimeric cloning systems having genomic fragment inserts (100-300 kb) and their DNA can be prepared for most types of experiments including DNA sequencing. BAC vector, pBeloBAC11, is derived from the endogenous E. coli F-factor plasmid, which contains genes for strict copy number control and unidirectional origin of DNA replication. Additionally, pBeloBAC11 has three unique restriction enzyme sites (Hind III, Bam I and Sph I) located within the LacZ gene which can be used as cloning sites for megabase-size plant DNA. Indigo, another BAC vector contains Hind III and Eco RI cloning sites. This vector also contains a random mutation in the LacZ gene that allows for darker blue colonies.

[0253] As an alternative, the P1-derived artificial chromosome (PAC) can be used as a large DNA fragment cloning vector (Ioannou, et al., Nature Genet. 6:84-89 (1994), the entirety of which is herein incorporated by reference; Suzuki, et al., Gene 199:133-137 (1997), the entirety of which is herein incorporated by reference). The PAC vector has most of the features of the BAC system, but also contains some of the elements of the bacteriophage P1 cloning system.

[0254] BAC libraries are generated by ligating size-selected restriction digested DNA with pBeloBAC11 followed by electroporation into E. coli. BAC library construction and characterization is extremely efficient when compared to YAC (yeast artificial chromosome) library construction and analysis, particularly because of the chimerism associated with YACs and difficulties associated with extracting YAC DNA.

[0255] There are general methods for preparing megabase-size DNA from plants. For example, the protoplast method yields megabase-size DNA of high quality with minimal breakage. The process involves preparing young leaves which are manually feathered with a razor-blade before being incubated for four to five hours with cell-wall-degrading enzymes. The second method developed by Zhange et al., Plant J. 7:175-184 (1995), the entirety of which is herein incorporated by reference, is a universal nuclei method that works well for several divergent plant taxa. Fresh or frozen tissue is homogenized with a blender or mortar and pestle. Nuclei are then isolated and embedded. DNA prepared by the nucleic method is often more concentrated and is reported to contain lower amounts of chloroplast DNA than the protoplast method.

[0256] Once protoplasts or nuclei are produced, they are embedded in an agarose matrix as plugs or microbeads. The agarose provides a support matrix to prevent shearing of the DNA while allowing enzymes and buffers to diffuse into the DNA. The DNA is purified and manipulated in the agarose and is stable for more than one year at 4° C.

[0257] Once high molecular weight DNA has been prepared, it is fragmented to the desired size range. In general, DNA fragmentation utilizes two general approaches, 1) physical shearing and 2) partial digestion with a restriction enzyme that cuts relatively frequently within the genome. Since physical shearing is not dependent upon the frequency and distribution of particular restriction enzymes sites, this method should yield the most random distribution of DNA fragments. However, the ends of the sheared DNA fragments must be repaired and cloned directly or restriction enzyme sites added by the addition of synthetic linkers. Because of the subsequent steps required to clone DNA fragmented by shearing, most protocols fragment DNA by partial restriction enzyme digestion. The advantage of partial restriction enzyme digestion is that no further enzymatic modification of the ends of the restriction fragments are necessary. Four common techniques that can be used to achieve reproducible partial digestion of megabase-size DNA are 1) varying the concentration of the restriction enzyme, 2) varying the time of incubation with the restriction enzyme 3) varying the concentration of an enzyme cofactor (e.g., Mg²⁺) and 4) varying the ratio of endonuclease to methylase.

[0258] There are three cloning sites in pBeloBAC11, but only Hind III and Bam HI produce 5′ overhangs for easy vector dephosphorylation. These two restriction enzymes are primarily used to construct BAC libraries. The optimal partial digestion conditions for megabase-size DNA are determined by wide and narrow window digestions. To optimize the optimum amount of Hind III, 1, 2, 3, 10, and 5-units of enzyme are each added to 50 ml aliquots of microbeads and incubated at 37° C. for 20 minutes.

[0259] After partial digestion of megabase-size DNA, the DNA is run on a pulsed-field gel, and DNA in a size range of 100-500 kb is excised from the gel. This DNA is ligated to the BAC vector or subjected to a second size selection on a pulsed field gel under different running conditions. Studies have previously reported that two rounds of size selection can eliminate small DNA fragments co-migrating with the selected range in the first pulse-field fractionation. Such a strategy results in an increase in insert sizes and a more uniform insert size distribution. A practical approach to performing size selections is to first test for the number of clones/microliter of ligation and insert size from the first size selected material. If the numbers are good (500 to 2000 white colony/microliter of ligation) and the size range is also good (50 to 300 kb) then a second size selection is practical. When performing a second size selection one expects a 80 to 95% decrease in the number of recombinant clones per transformation.

[0260] Twenty to two hundred nanograms of the size-selected DNA is ligated to dephosphorylated BAC vector (molar ratio of 10 to 1 in BAC vector excess). Most BAC libraries use a molar ratio of 5 to 15:1 (size selected DNA:BAC vector).

[0261] Transformation is carried out by electroporation and the transformation efficiency for BACs is about 40 to 1,500 transformants from one microliter of ligation product or 20 to 1000 transformants/ng DNA.

[0262] Several tests can be carried out to determine the quality of a BAC library. Three basic tests to evaluate the quality include: the genome coverage of a BAC library-average insert size, average number of clones hybridizing with single copy probes and chloroplast DNA content.

[0263] The determination of the average insert size of the library is assessed in two ways. First, during library construction every ligation is tested to determine the average insert size by assaying 20-50 BAC clones per ligation. DNA is isolated from recombinant clones using a standard mini preparation protocol, digested with Not I to free the insert from the BAC vector and then sized using pulsed field gel electrophoresis (Maule, Molecular Biotechnology 9:107-126 (1998), the entirety of which is herein incorporated by reference).

[0264] To determine the genome coverage of the library, it is screened with single copy RFLP markers distributed randomly across the genome by hybridization. Microtiter plates containing BAC clones are spotted onto Hybond membranes. Bacteria from 48 or 72 plates are spotted twice onto one membrane resulting in 18,000 to 27,648 unique clones on each membrane in either a 4×4 or 5×5 orientation. Since each clone is present twice, false positives are easily eliminated and true positives are easily recognized and identified.

[0265] Finally, the chloroplast DNA content in the BAC library is estimated by hybridizing three chloroplast genes spaced evenly across the chloroplast genome to the library on high density hybridization filters.

[0266] There are strategies for isolating rare sequences within the genome. For example, higher plant genomes can range in size from 100 Mb/1C (Arabidopsis) to 15,966 Mb/C (Triticum aestivum), (Arumuganathan and Earle, Plant Mol Bio Rep. 9:208-219 (1991), the entirety of which is herein incorporated by reference). The number of clones required to achieve a given probability that any DNA sequence will be represented in a genomic library is N=(ln(1−P))/(ln(1−L/G)) where N is the number of clones required, P is the probability desired to get the target sequence, L is the length of the average clone insert in base pairs and G is the haploid genome length in base pairs (Clarke et al., Cell 9:91-100 (1976) the entirety of which is herein incorporated by reference).

[0267] The rice BAC library of the present invention is constructed in the pBeloBAC11 or similar vector. Inserts are generated by partial Eco RI or other enzymatic digestion of DNA. The 25× library provides 4-5× coverage sequence from BAC clones across genome.

### EXAMPLE 2

[0268] Two basic methods can be used for DNA sequencing, the chain termination method of Sanger et al., Proc. Natl. Acad. Sci. USA 74:5463-5467 (1977), the entirety of which is herein incorporated by reference and the chemical degradation method of Maxam and Gilbert, Proc. Natl. Acad. Sci. USA 74:560-564 (1977), the entirety of which is herein incorporated by reference. Automation and advances in technology such as the replacement of radioisotopes with fluorescence-based sequencing have reduced the effort required to sequence DNA (Craxton, Methods, 2:20-26 (1991), the entirety of which is herein incorporated by reference; Ju et al., Proc. Natl. Acad. Sci. USA 92:4347-4351 (1995), the entirety of which is herein incorporated by reference; Tabor and Richardson, Proc. Natl. Acad. Sci. USA 92:6339-6343 (1995), the entirety of which is herein incorporated by reference). Automated sequencers are available from, for example, Pharmacia Biotech, Inc., Piscataway, N.J. (Phammacia ALF), LI-COR, Inc., Lincoln, Nebr. (LI-COR 4,000) and Millipore, Bedford, Mass. (Millipore BaseStation).

[0269] In addition, advances in capillary gel electrophoresis have also reduced the effort required to sequence DNA and such advances provide a rapid high resolution approach for sequencing DNA samples (Swerdlow and Gesteland, Nucleic Acids Res. 18:1415-1419 (1990); Smith, Nature 349:812-813 (1991); Luckey et al., Methods Enzymol. 218:154-172 (1993); Lu et al., J. Chromatog. A. 680:497-501 (1994); Carson et al., Anal. Chem. 65:3219-3226 (1993); Huang et al., Anal. Chem. 64:2149-2154 (1992); Kheterpal et al., Electrophoresis 17:1852-1859 (1996); Quesada and Zhang, Electrophoresis 17:1841-1851 (1996); Baba, Yakugaku Zasshi 117:265-281 (1997), all of which are herein incorporated by reference in their entirety).

[0270] A number of sequencing techniques are known in the art, including fluorescence-based sequencing methodologies. These methods have the detection, automation and instrumentation capability necessary for the analysis of large volumes of sequence data. Currently, the 377 DNA Sequencer (Perkin-Elmer Corp., Applied Biosystems Div., Foster City, Calif.) allows the most rapid electrophoresis and data collection. With these types of automated systems, fluorescent dye-labeled sequence reaction products are detected and data entered directly into the computer, producing a chromatogram that is subsequently viewed, stored, and analyzed using the corresponding software programs. These methods are known to those of skill in the art and have been described and reviewed (Birren et al., Genome Analysis: Analyzing DNA, 1, Cold Spring Harbor, N.Y. (1999), the entirety of which is herein incorporated by reference).

[0271] PHRED is used to call the bases from the sequence trace files (http://www.mbt.washington.edu). Phred uses Fourier methods to examine the four base traces in the region surrounding each point in the data set in order to predict a series of evenly spaced predicted locations. That is, it determines where the peaks would be centered if there were no compressions, dropouts, or other factors shifting the peaks from their “true” locations. Next, PHED examines each trace to find the centers of the actual, or observed peaks and the areas of these peaks relative to their neighbors. The peaks are detected independently along each of the four traces so many peaks overlap. A dynamic programming algorithm is used to match the observed peaks detected in the second step with the predicted peak locations found in the first step.

[0272] After the base calling is completed, contaminating sequences (E. coli, BAC vector sequences >50 bases and sub-cloning vector are removed and constraints are made for the assembler. Contigs are assembled using CAP3 (Huang, et al., Genomics 46: 37-45 (1997) the entirety of which is herein incorporated by reference).

[0273] A two-step re-assembly process is employed to reduce sequence redundancies caused by overlaps between BAC clones. In the first step, BAC clones are grouped into clusters based on overlaps between contig sequences from different BACs. These overlaps are identified by comparing each sequence in the dataset against every other sequences, by BLASTN. BACs containing overlaps greater than 5,000 base pairs in length and greater than 94% in sequence identity are put into the same cluster. Repetitive sequences are masked prior to this procedure to avoid false joining by repetitive elements present in the genome. In the second step, sequences from each BAC cluster are assembled by PHRAP.longread, which is able to handle very long sequences. A minimum match is set at 100 bp and a minimum score is set at 600 as a threshold to join input contigs into longer contigs.

### EXAMPLE 3

[0274] This example illustrates the identification of combigenes within the rice genomic contig library as assembled in Example 2. The genes and partial genes that are embedded in such contigs are identified through a series of informatic analyses. The tools to define genes fall into two categories: homology-based and predictive-based methods. Homology-based searches (e.g., GAP2, BLASTX supplemented by NAP and TBLASTX) detect conserved sequences during comparisons of DNA sequences or hypothetically translated protein sequences to public and/or proprietary DNA and protein databases. Existence of an Oryza sativa gene is inferred if significant sequence similarity extends over the majority of the target gene. Since homology-based methods may overlook genes unique to Oryza sativa, for which homologous nucleic acid molecules have not yet been identified in databases, gene prediction programs are also used. Predictive methods employed in the definition of the Oryza sativa genes included the use of the GenScan gene predictive software program which is available from Stanford University (e.g. at the web site http://gnomic/stanford.edu/GENSCANW.html, and the Genemark.hmm for Eukaryotes program from Gene Probe, Inc (Atlanta, Ga.) http://www.geneprobe.net/index.htm. GenScan, in general terms, infers the presence and extent of a gene through a search for “gene-like” grammar. GeneMark.hmm searches a file containing DNA sequence data for genes. It employs a Hidden Markov Model algorithm with a species-specific inhomogeneous Markov model of gene-encoding regions of DNA.

[0275] The homology-based methods that are used to define the Oryza sativa gene set included GAP2, BLASTX supplemented by NAP and TBLASTX. For a description of BLASTX and TBLASTX see Coulson, Trends in Biotechnology 12:76-80 (1994) and Birren et al., Genome Analysis, 1:543-559 (1997). GAP2 and NAP are part of the Analysis and Annotation Tool (AAT) for Finding Genes in Genomic Sequences which was developed by Xiaoqiu Huang at Michigan Tech University and is available at the web site http://genome.cs.mtu.edu/. The AAT package includes two sets of programs, one set DPS/NAP (referred to as “NAP”) for comparing the query sequence with a protein database, and the other set DDS/GAP2 (referred to as “GAP2”) for comparing the query sequence with a cDNA database. Each set contains a fast database search program and a rigorous alignment program. The database search program identifies regions of the query sequence that are similar to a database sequence. Then the alignment program constructs an optimal alignment for each region and the database sequence. The alignment program also reports the coordinates of exons in the query sequence. See Huang, et al., Genomics 46: 37-45 (1997). The GAP2 program computes an optimal global alignment of a genomic sequence and a cDNA sequence without penalizing terminal gaps. A long gap in the cDNA sequence is given a constant penalty. The DNA-DNA alignment by GAP2 adjusts penalties to accommodate introns. The GAP2 program makes use of splice site consensuses in alignment computation. GAP2 delivers the alignment in linear space, so long sequences can be aligned. See Huang, Computer Applications in the Biosciences 10 227-235 (1994). The GAP2 program aligns the Oryza sativa contigs with a library of 42,260 Oryza sativa cDNAs.

[0276] The NAP program computes a global alignment of a DNA sequence and a protein sequence without penalizing terminal gaps. NAP handles frameshifts and long introns in the DNA sequence. The program delivers the alignment in linear space, so long sequences can be aligned. It makes use of splice site consensuses in alignment computation. Both strands of the DNA sequence are compared with the protein sequence and one of the two alignments with the larger score is reported. See Huang, and Zhang, “Computer Applications in the Biosciences 12(6), 497-506 (1996).

[0277] NAP takes a nucleotide sequence, translates it in three forward reading frames and three reverse complement reading frames, and then compares the six translations against a protein sequence database (e.g. the non-redundant protein (i.e., nr-aa database maintained by the National Center for Biotechnology Information as part of GenBank and available at the web site: http://www.ncbi.nlm.nih.gov).

[0278] The first homology-based search for genes in the Oryza sativa contigs is effected using the GAP2 program and the Oryza sativa library of clustered Oryza sativa cDNA. The Oryza sativa clusters are mapped onto an assembly of Oryza sativa contigs using the GAP2 program. GAP2 standards for selecting a DNA-DNA match are >92% sequence identity with the following parameters:

[0279] gap extension penalty=1

[0280] match score=2

[0281] gap open penalty=6

[0282] gap length for constant penalty=20

[0283] mismatch penalty=−2

[0284] minimum exon length=21

[0285] minimum total length of all exons in a gene (in nucleotide)=200

[0286] When a particular Oryza sativa cDNA aligns to more than one Oryza sativa contig, the alignment with the highest identity is selected and alignments with lower levels of identity are filtered out as surreptitious alignments. Oryza sativa cDNA sequences aligning to Oryza sativa contigs with exceptionally low complexity are filtered out when the basis for alignment included a high number of cDNAs with poly A tails aligning to genomic regions with extended repeats of A or T.

[0287] The second homology-based method used for gene discovery is BLASTX hits extended with the NAP software package. BLASTX is run with the Oryza sativa genomic contigs as queries against the GenBank non-redundant protein data library identified as “nr-aa”. NAP is used to better align the amino acid sequences as compared to the genomic sequence. NAP extends the match in regions where BLASTX has identified high-scoring-pairs (HSPs), predicts introns, and then links the exons into a single ORF prediction. Experience suggests that NAP tends to mis-predict the first exon. The NAP parameters are:

[0288] gap extension penalty=1

[0289] gap open penalty=15

[0290] gap length for constant penalty=25

[0291] min exon length (in aa)=7

[0292] minimum total length of all exons in a gene (in nucleotide)=200

[0293] homology>40%

[0294] The NAP alignment score and GenBank reference number for best match are reported for each contig for which there is a NAP hit.

[0295] In the final homology-based method, TBLASTX, is used with cDNA information from four plant sequencing projects: 27,037 sequences from Triticum aestivum, 136,074 sequences from Glycine max, 71,822 sequences from Zea mays and 68,517 sequences from Arabidopsis thaliana. Conservative standards for inclusion of TBLASTX hits into the gene set are utilized. These standards are a minimal E value of 1E-16, and a minimal match of 150 bp in Oryza sativa contig.

[0296] The GenScan program is “trained” with Arabidopsis thaliana characteristics. Though better than the “off-the-shelf” version, the GenScan trained to identify Oryza sativa genes proved more proficient at predicting exons than predicting full-length genes. Predicting full-length genes is compromised by point mutations in the unfinished contigs, as well as by the short length of the contigs relative to the typical length of a gene. Due to the errors found in the full-length gene predictions by GenScan, inclusion of GenScan-predicted genes is limited to those genes and exons whose probabilities are above a conservative probability threshold. The GenScan parameters are:

[0297] weighted mean GenScan P value>0.4

[0298] mean GenScan T value>0

[0299] mean GenScan Coding score>50

[0300] length>200 bp

[0301] minimum total length of all exons in a gene=500

The weighted mean GenScan P value is a probability for correctly predicting ORFs or partial ORFs and is defined as the (1/Σlᵢ)(Σlᵢ Pᵢ), where “l” is the length of a exon and “P” is the probability or correctness for the exon.

[0302] The GeneMark.hmm for Eukaryotes program uses the Hidden Markov model for species Oryza Sativa. Minimum total length of all exons in a gene is 500 bp. Except for the model selection, there is no specific run-time parameter for GeneMark.hmm.

[0303] The gene predictions from these programs are stored in a database and then combigenes are derived from these predictions. A combigene is a cluster of putative genes which satisfy the following criteria:
[0304] 1) All genes making up a single combigene are located on the same strand of a contig;
[0305] 2) Maximum intron size of a valid gene is 4000 bp;
[0306] 3) Maximum distance between any two genes in the same combigene is 200 bp, as measured by the bases between adjacent ending exons
[0307] 4) If an individual gene is predicted by NAP it has at least 40% sequence identity to its hit
[0308] 5) If an individual gene is predicted by GAP2 it has at least 92% sequence identity to its hit
[0309] 6) If an individual gene is predicted by Genscan the weighted average of the probabilities calculated for all of its exons is not less than 0.4. The gene boundaries of a Genscan-predicted gene are determined while taking into account only exons.

[0310] Since TBLASTX-predicted genes are standless the combigene which is made up of such genes can be assigned a strand only if there is a gene in the cluster that was predicted by a strand-defining gene-predicting program.

[0311] Table 1

[0312] The data in Table 1 are ordered by contigs. The combination genes are grouped by DNA strand location and sorted by their start position. The putative genes that make up a separate combigene are sorted by their start position.

*Column Headings:

[0313] Seq num

[0314] Provides the SEQ ID NO. for the listed sequences.

[0315] Contig id

[0316] Arbitrarily assigned name for each contig.

[0317] CDS.

[0318] The location of the exons found within the gene as determined by the gene-predicting program (Method).

[0319] CG ID

[0320] Arbitraily assigned name for each combigene

[0321] CG Start

[0322] Indicates the start position of the combigene gene.

[0323] CG End

[0324] Indicates the end position of the combigene gene.

[0325] Strand

[0326] Indicates the strand location of the gene (+/−).

[0327] Gene

[0328] Indictates an arbitraily assigned gene name based on the method used to predict the gene.

[0329] Method

[0330] Indicates the gene-predicting program used. These programs are GenScan, AAT/NAP, AAT/GAP, TBLASTX or Genemark.hmm.

[0331] Gene Start

[0332] The start position of the putative gene making up a combigene as predicted by the particular gene-predicting program used.

[0333] Gene End

[0334] The end position of the putative gene making up a combigene as predicted by the particular gene-predicting program used.

[0335] Hit Score

[0336] The aat_nap score (under Hit score in the rows where the method is AAT/NAP) is reported by the NAP program in the AAT package. It is an alignment score in which each match and mismatch is scored based on the BLOSUM62 scoring matrix. The aat_gap score (under Hit score in the rows where the method is AAT/GAP) is the alignment score for each hit sequence, as reported by AAT/GAP. For TBLASTX the Bit score for BLAST match score that is generated by the sequence comparison of the genomic contig with the Monsanto cDNA sequence named under the GI column is listed. The E-value corresponding to a given bit score is E=mn2^{-S′}. “m” and “n” are two proteins of length “m” and “n”, “E” is the E value and S′ is the bit score.

[0337] GI

[0338] Each sequence in the GenBank public database is arbitrarily assigned a unique NCBI gi (National Center for Biotechnology Information GenBank Identifier) number. In this table, the NCBI gi number which is associated (in the same row) with a given contig or singleton refers to the particular GenBank sequence which is the best match for that sequence. If the genomic sequence aligns to a cDNA from Monsanto's SeqDB, the name of the cDNA sequence is named.

[0339] Description

[0340] The Description column provides a description of the NCBI gi referenced in the “GI” column. In some cases, GI descriptions are included for cDNA sequences which align with the genomic sequences.

LENGTHY TABLE REFERENCED HERE
US20080114160A1-20080515-T00001
Please refer to the end of the specification for access instructions.

LENGTHY TABLE REFERENCED HERE
US20080114160A1-20080515-T00002
Please refer to the end of the specification for access instructions.

LENGTHY TABLE REFERENCED HERE
US20080114160A1-20080515-T00003
Please refer to the end of the specification for access instructions.

LENGTHY TABLE REFERENCED HERE
US20080114160A1-20080515-T00004
Please refer to the end of the specification for access instructions.

LENGTHY TABLE REFERENCED HERE
US20080114160A1-20080515-T00005
Please refer to the end of the specification for access instructions.

LENGTHY TABLE REFERENCED HERE
US20080114160A1-20080515-T00006
Please refer to the end of the specification for access instructions.

LENGTHY TABLE REFERENCED HERE
US20080114160A1-20080515-T00007
Please refer to the end of the specification for access instructions.

LENGTHY TABLE
The patent application contains a lengthy table section. A copy of the table is available in electronic form from the USPTO web site (http://seqdata.uspto.gov/?pageRequest=docDetail&DocID=US20080114160A1). An electronic copy of the table will also be available from the USPTO upon request and payment of the fee set forth in 37 CFR 1.19(b)(3).

We claim:

1. A substantially purified nucleic acid molecule having a nucleic acid sequence selected from the group consisting of SEQ ID NO: 1 through SEQ ID NO: 52202 or complements thereof.

2. A substantially purified nucleic acid molecule, said nucleic acid molecule capable of specifically hybridizing to a second nucleic acid molecule having a nucleic acid sequence selected from the group consisting of SEQ ID NO: 1 through SEQ ID NO: 52202 or complements thereof.

3. The substantially purified nucleic acid molecule according to claim 2, wherein said nucleic acid molecule comprises a microsatellite sequence.

4. The substantially purified nucleic acid molecule according to claim 2, wherein said nucleic acid molecule comprises a region having a single nucleotide polymorphism.

5. A substantially purified nucleic acid molecule encoding a protein or fragment thereof, wherein said protein or fragment thereof is selected from the group consisting of a rice protein or fragment thereof from Table 1.

6. The substantially purified nucleic acid molecule according to claim 5, wherein said rice protein or fragment thereof is a homologue of a dicot plant protein or fragment thereof.

7. The substantially purified nucleic acid molecule according to claim 5, wherein said rice protein or fragment thereof is a homologue of a non-rice monocot plant protein or fragment thereof.

The application's sequence listing, which the Patent Office published only in electronic form, follows.

SEQUENCE LISTING (52202 sequences)

SEQ ID NO: 1 - DNA, 1671 bp, Oryza sativa
  unsure (1)..(1671): unsure at all n locations
cttcagggtaccacaaagaaagaatgattttggttcgaagatcccaagttttgtgggctttttttttgaaatagtatgtatgaagaatgttcatttttggtttcagatttcgtatgcacgattctatgccagccagaatgggagctgtgaggtagatttgtttgctgtgcaatcagatgggaagaagatcgttgaccagcacaagcaaagagcgctgtgttgtcggctgaggacaaagctccaccgtccgttgcgcgtggcattggtaaacagaggccctgacacggaactgctggtggctaacccagtggaggtgtcgggcaagggtagaccgctggtgttttacgacatcacccttgctctcaagaagcttcacaaacggatcttcttggtacgcatttcaacttactactgtatctgtataacttacttgcatttgtgccttgagtcctttaccatcgattgattgacgacacctgttgcatgcatgtaggctgagattggtcggcatgtggtgggtgatagggaatgggaggtttacagggtgcaccttggtgagggagatcattcttcattgcggagcaagattgttgatggagtcaccaacatgctcatgggctgggacgacactcctccatcctaatcctactagtagtagttctagttagtttttttatggaacacacgtcctttgccttgtacatagttggtagtggctgctgtaaattgtgtgccttgttaagtcgttcgtggtagaatgcgttggcagtagctagctttgactaatcaatcagcagctaatttcagtctgtttagttagggagcactcccctctagttgtatcactatcaaaactgaatagtgctcaagttatctaacaggaggaaatgcttactcctaattactaaagtggtagtgcccgcaattagtaagcaagccagtgaaccaattgaatgcattcattcaatagccttgttggcaaatggagctttggttttgagtagagagttgactggtcgtatagctgagggccaacatgcacgacactcgtctcttgtccaaacacttgacatatggcgcattggaatgatggggccaggctcttgtttatcgggacgggacgggagtactccactccactggcaagtccaaggcagggcagctggtgtagtagagagaggggtggaatcgtgcagaagttaccacgtcattcctgggcggctgccgcgtgttcacccgtatgtgacgtgccgcgcccccgcgtcgccatggacatggaaatggtttgcagcttcaacccataaatgaaaggaaaggagaggagctttggtaaataatccactgacttgaagcagaacccaaataagccacaggttgacgtaggtaaatggctccgaagcagaaggaggcagcgaacaagaagaagaagaagaaggaggtggcagtgttggtgaaaaccaagaccaaggtggtgcagctcaccaccaccaccgcggagctggagctggagcccactgtcactgtgcaggtggacgacaacaagacaggtgcagctgcagatgagacccccccgttgtggcgcttganaagcaagagacgccagaccccaacgagccccaagcggcnggagcgaaaaagaagaagcgcgcgggcatggaagaaaaagagtag

SEQ ID NO: 2 - DNA, 1640 bp, Oryza sativa
tgcgttaccgttacccaacagctgctagctactctatatatgtatgcaataagtctattttttctccctcattcttgccttcgtcgcttcgcatccctcagccataaaaccaggtataacacctccccaaatccgaaaaccggagtaaatatactgtcggttttagcttgtcatgtccacatggtatattgactaggtcttcgtcctacgtggcactcagcgtaaaaaaaagtggaacccatataggcctcacctatcagggattcatcttcttccaccagcctcctcctcctccacctctccctctcttcctcgtgctctccagaccatagaatgacagtgagagcggtgatggtggagaactcgaccccgcacacggcgcactcgtggacgtgtgccctgtccttctcggccgccgcagcggcggggtcgctcagcagcttcgcctgtagccgcgtgtggctcgtcatgtacccacccagtgcctggaacgacgggaacctcttgttgcacgtcttgcactcaaacaccaactccgctgccaggcgccagcgtggcccgtcggcgtccacgacgacgtcggtgctgtcggcgcgggtgacgacagcgtgagcagcgggctggcgtgtatgacggcgacgatgacacgggaagactgctccatcatctcccgctcacgcgcgctcaagacgctagcctttccccttcatctactccaaaacaacggcgcacggtgtgcggaaggcggcgcctagcgagagaggagtcagtgactccgcaacaggcagtgggcggcgcatggcgggagaggagtcgacggcgtctgcagaagcggaaggaagcggggcacgaggttgtgcacggtggcgggagatagcttcgccatggctcccctctcctttcctccgttgctgcgctgctctgccacacgccgacgccggcctcctgcggcgcctcaacgacctgcttgatctcctcgaatcggagctcggcctccttgatggagttagaggtacgcacgagcaccgcgcgcgcgtcccgcgtcgccggccgccggacctcctctcccgcctcgccccgacgatctcctccccaccggacggccggcttgcccagagagagagagagagaggaggaggaagggagaggagggggaagaggtgtgcgctgacgtggtatcctgacatgtgtggtctacgtgggtcccaagctgactcagccgccacgtaagataaaattagggtcaaaaccactgaagaatctattgtgactggttttgattagttgggggatgccggatatctggttttgtgtttggaggatgattttgtaactcgatgacaagttgagggaccttggtgtactttttcctattagatactacaagcccatcgagtaatattattgtgggccgtctcggcctgacccatatcctcgttcctaaacttgttaggagtagagtattgagtatcagtacgtaccattgtgtgttttaacgtactaattaaatggtactccctccgtcccataatataagagattttgagtttttgcttttaaagtttgaccactcgtcttatttaattttttttgaaattattatttattttatttgtgactagctttattatctacagtat

SEQ ID NO: 3 - DNA, 1145 bp, Oryza sativa
aataagagtttgtatagcttggctgggtgttattattgtatttcagaactataatttatgccattatctgcccacattttcagcggtgatttgtgtgggaagggtaaattaatattctatagttgctataaattagttcttggcaccttttgttatctaaaagacggttttatcgggtgcaggtaaaaagagaaaacagaaacagcctgggatgttgctgggatcctcaagcaaaaggaagtccgaaactccctatttgacaaatgtggtgctgccactgccaacgaggcacggtgtgcaaaaacaaccggatgcggaaggaggtagcatggaagctgaattttcagataatatgttattataataagctgggatatgagtaatagtggtaattatcatattttattgatatagtgtgatcccgtatcaagactatgatccctcggttattctctcctatgtcgtgcttgtatgtgtaagggacgacctgaatgaactcagttcagacatttttctgtcctatctatgtggtacacttgttttatcactctgctgagtatgttctatctctgagccagttcccactaaactgcctcccttatcccttcttttcaaagccgtagaccacggcaacccctcgacaacggcaattagttaacctataataaatacttttttgtaactaggagagcaaagctgagaattatacccttcgtcctaaaagaactcaacctaggaagcacccttcatccttaaaagaaactcaacccaaccaagaaagggatgtaacctctcacaaagctgtgttcgctacatcgctaggggaggataggaacaaatctcctacgcacggaaaacggagcagtccattaacgcgcgattaattaagtatttgctaatttttttaaaaaagtggattaatatgatttttaagcaactttcttatagaaatattttgtaaaaaaatacattgtttagcagtttggaaagcgtgcgcgcggaaaacgagagaggtgttaggaaaaggggcatccgaacgtagcctaggactatgaatctagactgtcttttgtctagattctttgtccagatttttttttttggcagagggagtaagtcttgctacttatcagcaaattgccttg

SEQ ID NO: 4 - DNA, 1132 bp, Oryza sativa
  unsure (1)..(1132): unsure at all n locations
ataaagaaagatttacaacatacaccaagtcaatatcctagcaaccaatcagcattacaaaaattacaggttgatatggcaaatattccatgtggcagcaaagcataagttcatgggttatatttacaagaacactttggttaccatgtgacagtaagatcacctgggtagagaaatgctggtgtctcaaaactaggtaatagacaaggtattaaaaggataatcattcacatatcttcacaactcacaaggcatgtacctttcaagcccaaagcgtacgaggcaggaggtggcatcatcacttttgcagtatttacagcccttganctatcttgatggaacattgattatctgctaacatctgcaatatacaggcttcaataagatatgactcaaaactctcaaagtagggaacacgtaaaacaattatgactattcatccttgccaagctatgtattgacgattctacatgaattctgacagaggagaaatgtgattaatcattagctgctaaattttggctgcagttctgtttttcatttgtgcaaatttcaacaaatgggcaaagaggaaagtaacttaacatacacacacacagggaaaaaaagagagagaagccaaacgtactttaaatagcaaagagcggtgtttgcagaaaccgataggtaactttcccagatggagaacgatagaccctgtacttgacttgatagcatcactgcactctttccagcgtggaagaaaactctcttcattggaggttgtaccccttcatgattgaaacaaaaaaaatagtattagaaaccacagaaacaagacgatacaaagacacttttgatgagtagattagttgtacaatagtcaccccattctggaagacacaagcttggctagctggtttatcacatccttcatgtcggcagaactggacaagaagctggaagcgtaattctccagcatacctaaatcgaaatcggttcttctatcgatgagaatggcttgcatggaagaatcatctgggcggacagacttgagtgaatcaatagaaggtatgcggttctcctcgagtagatcagtgcagagtgaccagacaaaggggtccatgccatgaatcaagtaaaaaccatctgg

SEQ ID NO: 5 - DNA, 1818 bp, Oryza sativa
cttcttagtctgttagtcatgcaacctaactttgttgagtcaagtaaaattagtagtattagaaggacaaacatcatgccattgggtcagttctgcagttaaagatagttgtctgaattgatgaaattattgactgcaggttatcttttaagcagtttgtagcttcttgaacggttatgtaggtgccatggccatactattgatcttgttagaacaaacaagacaacctgaatgtgcccaacaactagacaataccacataacttctgaattctgatattaacgttagtgctgcgaaaatcagggaattgactgtattgtttcttcttgattcagaaggcgctctcaagctttcagcaagcctcatcttctattgattttggcatgattgagcgcaccaagttagcctcgctaaatgaaagtacccaccgttattgactactatgatacacattagttactaaattttcagaggcttttaccttaactttgttcagaatataatggagaactctgttaacaggactcgtaatggggcgcatcatgctatgattcataccagaagtgatgttgacgtcactcaatgaagctacgtaggtcttgcataaagggattgatcagcttttctctgatgcttgctcatcaatgaaacaacaggcattaggcctttttattttcaatcaagcatttaatttgctaacattgacgccgtgtacccttagtagtattatatactagaaaattatttatatcatgtctttgggacaaacttacaccgagcagtggcggacgcaggtttagaatacagatggggcggcagagttagccttaattaggttaatggcggacgcaggtttataatacagatgggacggcagagctagccctaattaggtgatggcacaatgcacaaaaaccatagtcgctggttcacggcattggcgcaacagcgcacggcacgaacatcgagaaagttaacaacaaagattgatagtcgaacaaacatatatgacttatatgtagagagataaaaaaaaaagagaaatgctgttaaacaataagggcaaccacttccaatagttttggggggggggtataaaatgagatgaaaacttatttaggggtttaagtgcttcgtcaaaatagttcaagtgagtaaaatggatttttttatatatttaccaatttaactatttactatagactgtattatgtgctaaagaaatagaaagaaaatcgaattttatgtatggcaaaaatcaggtactacttatacacgaattttcataaatgtttttcttcctacttaaaacacttgatttatctgattattcaatagtagactgataactaatgtgttagaaatagtactaaaatgaggtttggaggcgtggggagacaaggactgtagctgggccagccgacccaccctgcctaatgggtgtgtccgccactgacaccgagtgattattttgcctggtgtgatttgaaattgaggcatattctttttcccgttgcaacgcacgggcacccaactagtagagattaagctgaaaaaagaaaagataagataaacttatttggatactgacaaaaaatggagaattcacagtaaaatctttctaccatgccatgaaaatgcaggacagcggtttcccttttaaaagactttggaaatttaggattccagtaaaaagtgaggtgtttgtatggctggctcttaagaaccgtattttgactaaagataacctcatcaaaaggtggtggaagaagttttttttgaactttgtgtttttcttaattttaaaaacaaaccatt

SEQ ID NO: 6 - DNA, 559 bp, Oryza sativa
gtttcactctactctgaaacgaggtgatattgttggtgtatgtggttatccaggtttgtaagcatctattcaagttcattttgaaattattacatagtcagatgttccaacatcaaaattaagtaggtacttatattctttcagttggaatgccaataggacattttgagtacatggatccttatctgattgagtttgtaattttatttaataaataacttaaactttatttgtagcttatgcccatacttgattgtacagtttgtttgttttaaaacaattaggagtataaatagtttgatggttactggaaattcttatattgttttactgtgtctgataatgacgacttctcaattttgatgaataccaggaaagagcaagagaggggagctcagtatattcccaaagaaaattgttgtgctctccccatgccttcatatgatgcctccacaggtgagaatcagatttttttaggaagagatgtttccagatgaaatacctaatatctcagagcaatttacttcatattgggcatcctctagagtcgacctgcagg

SEQ ID NO: 7 - DNA, 646 bp, Oryza sativa
aacaggatcatttaactctgtatatgcattgcacacctaaaaaatggatttcataacactgtaaggaaacagaaagggggccaagtatgaaagtatcaatgaagacttagtatatacctcatgcttgttaacaaagagctcaaacctctcagtcaatccaggtcgagacctatgccactttgccaatggactcattatctctggatggttgataataaacgtgggattcacacatgtctcctccaagaaatggccaactagctgttagagcagagcatataccttattaatttggctaaggaataccaaaagggaaacaaaagcaaaaggtatattaaaatttaagcaaatagcttcaggttggattttgcaatataccccagatcttttatttgtttgtgagctaatgtgaaaatgttcagaaatgtactgtacattatggaagcaacaaaaaggattacaccggacattcttcttcatatcaaagtggctagcttatcatatatgtaaataagatattataagatagcaaaatcacctaacgaaaatcatatcaaaatacagtgtaaaaagaatgtgtagtgggtaaagaaacaaccttatcaagcaaccgtgttgtagtctggggatcctctagagtcgacct

SEQ ID NO: 8 - DNA, 749 bp, Oryza sativa
gcttccgcaacccgctgagcatgaacatgagcatgccgatgcccaacgccaacttcacggtgaccaaggccaccatggccgagttcccggcgctcaacggccagagcgtctcctacgccgtcctcatgtatcccccggccaccctcaacccgccgcacacccacccgcgctctgccgagctcctgctcctcgtcgacggcgcgctctccgtcggcttcgtcgacacgaccaacaagctctacacccaggaccttgccgccggcgacatgttcgtcttccccaaggggatggtgcacttccagttcaactccgggaaccagccggccatggcgctctcggcgttcggaagcgccgccgcggggctcgtgtcggtgccggtcaccgtgttcggcacaaacatcgacgacgccgtgctcgccaagtcgttcaagaccgacgtgcctacgatccagaagctcaaggcaggcctaactcctcccaagaaagcctaagccctccccgttggtgttaattattcttgtttttcatcctgctgctgctgctgcttgaaataagagaccttccaggctaccaactactgaagaaggtaaattatgatttgtgtggtgaataattctgaattgtggttgtattgtcttgtctgaagagctttgaaccatgtatctatcagtattaattaaggcgttgtgggaatatatatagaccagttcagttgtaagtgttgagagtttctctgctgtaacggcttt

SEQ ID NO: 9 - DNA, 1479 bp, Oryza sativa
tcaagatacatgcaattatgttaagtcaaccataacacaagtatgactaaaatgctaagattgctatagaaaatgctcttttatttggcaatgggatagaaattcctgaaatttcaatttttatttgcatgtacctgctccaatcttctccttcaaaatcaattcgttccatggaatgatcagatcatccacagcaagtgagagatcactgactgtacttcgtaagtactgattcccctctattaatttaaactctttctttttctcagctttcaagttggaggaagtaataagcggtaaaacttctcggggagcctctggcagaatagcatctgagcttacagctgcttgacctacataaaaaaaatgactcaagacaaacacacacacacacacacacacacacacatatcgaagtatagtggtcatgcaactgtttatatctttggactttctagcctaggcagcaaagtgataattttggagtacatactttgttgtgccattatatggatataagctggttcagaaaagaagatatatttaataatagtcaacaaaaggaaacagtttgttcacgaatcctagtagattgtcatgagctatattaccttttactggcacccagctgctcataatgtcatcccttgtgtcatgctttctagtagaatacggttggtccatagcaactgccgcattactattagcacctgaaacataagagatgtggggtctgtgtcacacctgatagactgcatagacctaactatcctagatgacaatcctcttttcggcctataacgaattaccaactacttcatggaaaattatatatgtgatgaagcactatttttttttttgcgggggtgatgaagcactattgacacttaaacagtgaagagataaactcagaaaaaagaagtgataaaagtaatgaagttaaaaacctgtggaagcttcgttaaataagagattgagagagtgacaatctgagaaatactgcttggcaaccgagctgaaatttgatgtgatctccaatgacctaaattttggaggccggagaggtgagggcactgatagtgagtagggtccattgacaaacgaatcaggatcagataattggcctggatccccaattagatcaaccaaatactccctgccaaaatgaaaatataaagaaagatttacaacatacaccaagtcaatatcctagcaaccaatcagcattacaaaaattacaggttgatatggcaaatattccatgtggcagcaaagcataagttcatgggttatatttacaagaacactttggttaccatgtgacagtaagatcacctgggtagagaaatgctggtgtctcaaaactaggtaatagacaaggtattaaaaggataatcattcacatatcttcacaactcacaaggcatgtacctttcaagcccaaagcgtacgaggcaggaggtggcatcatcacttttg

SEQ ID NO: 10 - DNA, 641 bp, Oryza sativa
cgatcacggcgcggatcctggcggggctccgcgggcacggctactacaacctgggagtgcgcgccgacatcaacgaggtcatcgcggcgctcgcccgcgaggccggttgggtcgtcctccccgacggaaccaccttcccctcctcctcctcctccgtttcccagccgccacccacgcagcagcagcttcaggtatggaatcgaacgaatgcagcagcagatgtgttcctgtctgttcccctccctcccactcttctcttctccttgtccgctctgctctgctatgtttaaagctggctggcaggcagctgagcctgagctcagtgagctggaagccaagtaccggagagttatttaccctgttcctttcattattttatttatttttgacgtcataaataggtcgcatccggtactgtaggagatatgttttcaagtgatgatgacaaaagcacccctcataactcatttatgagcccttttcgcctcacggagagtagatatatattcattattattttaaatcaggcttccgtatccaacttacggagaagcatatgtttgtctggaaggacatataacgctgaaattatagagacggggtatttcatattatggtaattttgaattaaataggtacat

SEQ ID NO: 11 - DNA, 678 bp, Oryza sativa
gatggcttgatttttccaactaaaactaagttgcaagcttgcaatttctgttcagtttcatttctgttattttatcttcgcaactttagataatgtggtatgcttgcataatttcaggtgccttatggcattggctgttgtgagaaacgacttctatgatctgcgcaacaagtttcagactatgcttcaggtagtaccttatcttctccattggcttttgacttacaaaaattcactaactatgaggtgccacacaagggtcgatagtatatcatataactcaaataatgtcctttgtttttttttagactgataatctccttggttatggcatatatgatttgacagttgacaccaagttatgttggaagtttctgaaagctttacttgagggtgtgtttgttaattttcttggatatgtttggatggttgtataggatagtcccaagcagtcatcagtgtttttctttacctgcttaaaaattgaagtttaatatctggatagcaaccaaaactttggaacttgattgattttttatgtgaattttcgttctccagctgctcattcagctttcatgttgagcatcataaagctgctgttgatggttcctggatcttaattattgacatggtgtgttttgatgtagctggagcagcaaatccaggcttatgatccca

SEQ ID NO: 12 - DNA, 534 bp, Oryza sativa
ggtgaactccaaaccactcacaaaccagcgctgggtctcctccacaatctcctcggagaggtcaccgggcaacacctccacaagccgtctatgaggcggcaacctccaagagtaacaagcaatgacacagctcggagatgatcaagtgccgcactagctctacaatgaagcaatgcacttgactcttggctcaacaatcccgcaaacacactaaatggataaacacaaagctcaagtgggtgtgggagatatgcaaggggtgtatgcaagtgaagaaagtaccaagagaggtcccttgctgctggtggggatgtatttatactcccaccaaccaaaactagccgttggggggtcaaaatcccccaactcagtgcactgccgatcagaccgccgttgtgtagccagtcagaccgaactactatgcaacggctagaaaactagttgttgttgcagtgcatttaatgcactgacacaaggagggctggtcagaccgcagtagtgtgggtggtcagaccggctgcgactctggcggct

SEQ ID NO: 13 - DNA, 769 bp, Oryza sativa
aacaagattttcttaattaacaaaggaacttatgacggtacctgtctataagttcgaaaaccttgtcaaacgtagactcttttttatccattgagtcatatacgttgacggtgcaggcctccaggtcgaagagtaaaagcacccagtggaatctgcaatgtgcgtgggatgcattacatatgaaacacttagcaagttcgtacgggaatgaaatttggtatgtaggaagacagtaaaattaaactaactctgtgttgtatggcaacagtatgaacgtcttgtaatgctgcgccttcaggagatggacgagattgtcctctgtttcttgtggatattggtcgagcattgcgacgtttactttccgagggtcgatgaatccagtatcgaaaaccctccgccgtcgggccctttgaatctccattctacaacgataaaagggagtatattattttctatagtctacttatatatacaaggacctaattaattaaaggagacgtatagtaagaaatctaactgaacgatatacttacaaaatccagcaactcataatagagacgtcgagggcgtccagctggtatagttcatagattcccctgaaattgatccagagaatgtcatctccttgcaagaagtccgtgtccctgatcctcgctccgatcatctctctaccggtggcgctcatctccatgtacagctgatggaacttgtacatttgtgtgggtagggactgcagcagctcaggcttgacaagcggtttaccgagttc

SEQ ID NO: 14 - DNA, 529 bp, Oryza sativa
gctttgtttatataataatgttgtgacttgcctgtaattagaatagggattaaattttatactcttaccactggatcactgattagcatgacagttcaaccatgccattgctccaaaaaaaaaaagaaaaagaaaataagagtctcacaagctattggcagtgaagtgatataatgaagtaaattatatttaaattaaaatagtattctgctaagtcatcagactaggcttgcattgcctacacaaccactttgtaaaataaaaaggtttacagtggcctgcccttcccctaagaggttaatagtatctcccggctctgaaactaatccaagggctagctttgcggtactgtacattcatctgtcatttcccctgcgggcaacacaattgtacaaagtttcctcagtcgagttcaattcccagaagttgagttgaatgaaaatcatcttggttcaaaaagatacctgtcctgaaaattattaggtagaaataacaggccttggaggagggggaggaagaggcatccttg

SEQ ID NO: 15 - DNA, 620 bp, Oryza sativa
aaacaacaggaatcttggtgaattttacatgttcaaatagcacaacaacgctcttggttctacaacgatgcaactgctaggcaaaatatttggatttaatacacgtaaggaaagatcctccaaggcacaagcttgcaatattctacccagatctccttgtacttctctgagcaccttgcttcgtcccttcgttccctccatatcagcaaaatgaacaggtatgttgggtagaagtatgggatcaccgaactgcaccaaaagggtttatgatttagggtttatgagaatcaaattgaataagagagttgtgtcgaacgatcatcatcacctggttccacagggtaagctaaatgaaagagctagcagtatatccccaagataattgcagtgccttgcaattcccctgtattggatgaaaaggggattcattatttcacattgtaaagagtacttaagaagcatgattaatctaaagcgagaaagggacgtgaaaagttcaaatagccgaacataattattcaagcttttatagaactacaaaattgttgattaatatcgatataggtacgccgtacactacccaaacttggtgcagctgtgataaacatcatttagataca

SEQ ID NO: 16 - DNA, 534 bp, Oryza sativa
agtccctgtaaagattgagacgaatcatcctgatgtcgtgtcaattcttatgccaaaagaaggcaatggtacacatggtacccatgaacgttttgtgttacaggtatgggcttgcccctctaatcgagcttcaatattgttttggaaaaaaaggtccatttttataaccctgaacttttgcaaaagtctgaaaaaaaaagagtgagtctggtgggaagttcaggctgtaaactgggtttttagtggatcttaacgctttctcaattgtaatgattgctttaaagctgtgacaagaataatcaaggaatattttggtgaaactaattctggaagttgtaacaagaatttgagtcaatcttgagtacggataatttgagtgagacttccatgcaaaatgtgttgtgttttgttgtcctttgcaggcaagaagtcatggaactgctcttgtaaggttgcaaatcagccatattcccaagaaagccgatttcataatggtaaagtgctaaagttcaatgctactatcccagagttctt

SEQ ID NO: 17 - DNA, 1238 bp, Oryza sativa
caaccttaagagtgtacataacacgtttagtcgttggcatacaagcatcagtgtaaaataactcggaaaagaaaggtgtgataactattaaacctaaaaaaatcagtagtagaaaattacactttcatttgccaccctttccttctcttcaagatgctttatttgcttccgtagctgggcaatctctttttcttgcccttccagtcttgtccgaagtagaccagactccgcccttgaaacaagcaaagcacacaattaggataagtttaaaaaataattatatagaatcagtgcacgggctggaacaaaatcaggatattttgaagaagaaaaatgcactaggtgataagtgatagcatttagcacattgcagctcagttgtccatatcgagatgtcaagagtgttgcatttcccaatgtttcattgtaaatcgtagatattattgtttcttacacagaacttcaaaagacaaatgcttcagaccacatgtctaattgacagcaagtgtgtcttggtcttttaaaattctttgttgccatgtagttcaacaggcagcgaaagtgacaacacaataaaggaaacacacagttctagtgagtttcctgctacccttcaaactaaacttatggtacactgggagtaaacagaacaaaaattcgtcagtggagatagctaccttagtgcttcaacaagatgttgcagctcaacaatcttaacttgggactccttcatgctattctccaattcccctgcctgcagcattgagtgcatgatagataatttagttgtaccgtattaagtggtccatgaacctgcaacattatagcattacaaagatcttactagggtatagacttcatctttctccatgctccctggcctgtgctccctgcgctctttgagcccaacctcaattccggcctcccttagtccatcctcagcaaccttgagcacctcgctggtgtttgattgcagcgcgctgcggagcaacaccccaatgtgctctttctcccgcaatagctcatccaccctcgcttccaaatccctcactttgctttcctttttatcaacccatgccccaaccttgtgcagggcagtggtagcgagatcgtacgccatcttggtcccttccagggacaccttgaggctctcctacacgtaaggctccttccagaccaacaccgagtcagaaagcgcgctcgcggaatccgcgtgcactaacttgaccacctcacgt

SEQ ID NO: 18 - DNA, 1433 bp, Oryza sativa
ggtggccggtggcgtcgccgggggagaggagccacggcaggaaggtggggggatggggcgggagcgtgcggcgccatgacttgcagacggcgtggaagcgggcgaagtcggcggtggcgtggaggcggcgcgagatgtcggcgaggagatcgaacgggaggtccgcccatgggggcaccaccaccaccacgtgctcttcttcttcacttgccttcgtcaaaccggccgatgcgcggcggcgcgcgcgccgtgcgctggtccgtttctttggttcgtcgggcatcgtcgccgatcgtcgagtagctaggttcgatgtggagtaggacaagtactccgtatttgttagggcgaatggacttggcccgtgggccttctccgaatttatttggtaggcccattacatttggtttgttttaaacaagatatatactagataaatttacagtttaattttggcaaagacggtaagtcttgtaccagttttacaacccaaccagttgttagaaattactccacttttgtttaaagatgaacttattgacagcttaactataatcccaactgcatgattttacaattgcaccgccgcatctaacaccctcgtgagtttttgcacaagcattaacaattttcccgaacatctacacaaattaaaaaaaatgaaatctccttctcacgttttttttttcctttcaaaatgtcgtgtatttcttcaatctgtatagatatggcacaactatatcagaggttcagatagctccatctcgttggaggtttgatctgcctctgtcggtggcaatcgcacatagttcagccccaaccattgccatggccagcacatatacctatgcccgttgcgattgctcgagtcccttctgttgtctgattcttcgagctgcctattgatctcttccagtctctctcgcagcctggttgatctcatatccgctagtttcaatgatttctctgcggcatcacgtgccgccattgctgcagccgctgtctcttccttgaacttcagtttgttctctagctccagcattgcctgtttagcttcgtctaattccttgtttagggaagatagctgtgcaacaaagcatagttagaacaaggacaacttatcagctatcggttcttctacaagacagatctcaaaagcctgtagtatgaagagcaaaaaggattcaatgactctatcaagggctccttaagattctgtacccttcacagttcatacagccactgcatagctaatggggaacagctacatctaatgccaacgccaccacagatacctagcaaatttcatccttaggcatctttaatttgttttcttagactcaacaatggaaataaccaacctgaacaaactaaaacccatttggtttttagtataatcaagcaataagaccacaccttaaccaaaaattggg

SEQ ID NO: 19 - DNA, 2456 bp, Oryza sativa
ggcagcagcgcggggcattggggctccgccgccggcaaccggaccatgtcacgccatgccgtgcacacggtgtggaagcgggacaagtcgacggcgtcatggagttggccggagatttcccggagcaagtccggcgggaggttgggccagccgcagctggacgagacggcatccatggacgtcgaccagattagatcagatcagatcagcggctagcgagcgatccaatcaactgttcatccattggactgccctgtatgatgtatgtatgcaaaaacgtaattaacgaggacgtactaccctacatgcaacggaaaccaacgtatgatatgatcgtttcctcagataatacagcatagcctgatgaaacctaatacgacacgattagaaaaaacaatgcaaaggtgcaaacaaaacccaaaaggaataattaaggcgggtgaacaagcctgatccaataagcagtttccgcaagagaaacagcacaaatgccacacacaccatgctcttcttttgcttaaatagataaatgttagacaaaacttttggatgcatcgacaaattggggtagaggggcatcataacagtagcctacgtgcatcaactcgtggccacaaccaacagttaacaagaaaggagcagtaaacagcaggcatgagaaaggacttgggaggatacagaaccaagaatcgcaagaaagctactatttgagggactaaaccagtatcagacgtgctatgatgcctccgatgctgttaaacccccacaaagcctgctatcccattaaaagcctcggcgcggtggtcgctcctctgcaacattcactctcagcgcacggccatccaaactctgttgaattcagattggaaaagtgtgttacttgggtaagcaaagttaaaagacacaaaagttattgatggtatgagtcaattagcatcagttcacagcctccatgtaacaatgattaccagtggttgcttaatcccagttgtaaagatgtcagtgaatcgaatatacacttacctgtccatcgagggctgcaatagcgtcgtccaattcttcctgtgtcgccattgttacaaaaccaaatcctcgtgaacgcccagtttctctgtcatacacaactctggcgtcgactactttgccatgctcgctgaacagctgtaccaacctagagtcatccacttgccaagggagattgcccacataaatcctgaaagaaggcccaaactgacggggaggtctttccacccgagcgcctctaggagctgccttgtttacagtcagaagcctcccatcaacatcctatccacattaaaaaggtttatcatcaaagcatgaaatctgtacattctttacatcatactaccatacttttaaaaatttagtagcaacagaagaacaagttttaagaggtctgtcaaagaaagttaaacatagaaatcacagctcttacaactttagaattgttattcctcatagtcatatcagtcaataaggatgacatatgcctaatatgaccctccctttctttttcacttaaacattatagtgtacccttgaatgagaaactaagagaaactatcatgtccatccatgatcattcagaatgaaacgccaataccacaatgccatagttgaaataaggaaaacaaatgcaaactgtttgaagccagttacatgcatactgcaagtacagaaattactgtgtacacaatgaacatgagctgtaactaacataggaaatcaggttatcttgagcttcaacaaaatgaagaaaatgttgaggggaaatagggcaatttagatagagagagactcacgtagcgatggaacatctccacagccttctcagcctcctcaacggtgctcatggtgacaaatccaaatccacgactccgatctgtttctctgttgtagatgacctgaacacgcgaaaatagaggttcatttctgatcaaaagaacaaaaccatgcatatcctaatattttgtctaactgcctctatacggttcacataataaataaatgaataccctaaagacgggaaggtaaatatcaaaggcatctttcataacacaagtaggatgcccacagagataaataagccacagctgcccatcttgcaggttttaaatgtgaaacacaaaaataactgtaatccgcagcctaacagtaaaacagggacagttcttgtaaacactagtatcctaccagcctaccacacagatgagccagctagattaaaaattataataagtttcaacagagcaagtgaccaagcaggtaaatgaaaaataaaagaagtgcatttgcacaggagtccactgaagtactgaactgaagttcagtgggtcattttagttttgcatatgaaagagcgcggagaatggagagggtcacacctcggagacctcgacgatgccggcctgttcgaagagctgggcgaggcgctc

SEQ ID NO: 20 - DNA, 571 bp, Oryza sativa
ctgaaagaaattactgcatatcaccacagttgaagcagcaggcaacttcataggccacaagttgacgattcaggtttttctcaagaaatcttggagcaaacttattccgtttagttgatcattgtagtaccccctaccattttaaattgaattagcaaacgtcaaatacaaaaaacagagggagtacaaccttttcaccccagttcttgaaataaacttgtacagttgaatttcagtctgaatatctgatgaacatcaaggatgatgcaatcaaagtttcagttactcagtgaattcaaatctcatattggttctcaagaagttttatttcttctcttgctcagcactttctacaatataatccttaacctgctacacaagtgtttgttatctcacagggcacaacacacaacgtatgcaaccataagagaatcaacaagtatgcaaactcaatgagatacaaatgacaaaaaaagtacaattctcatacaacagttattggttcaaatattacccaaccagaagggcatttgaataacaatcatatattcgtattggtgtacctgaacaa

SEQ ID NO: 21 - DNA, 573 bp, Oryza sativa
tctcttcaagactgccacatcacctgagcggcgaatgaatctgggcgacccgatttgcttcgcctggagatacggtaatgtcgcttcggtcggcgagcgtaattaacgcgcgcacgatacgatctatctcgactgccgcaaccgcatatccacctcacgcgccgcaagcgggcgaatgggatcagtggaagcgtgggcgcgagaaacgagggggcgaaataatgggcgcgagaaacgagaagccgggcacagcgttggcaagggtataaaggcactgaggataggatttgtttccttcctttcgccatcattccccttgccttcgccgcttgcgccctaactccttcttccctgcgcccttctttcgccacacgcgctcgctctccatcttctcttcgtccggcgccatggcacggggctccgcactgcttgatggtagcgtgctgccgccttcccgcatcgtgagcgagaagcaggctgggttgccgcgccgctttatgccggaatctgccaccggccgtgagatagtcatgctgggcgagggacgcccggcgccagactacccggggaggt

SEQ ID NO: 22 - DNA, 4586 bp, Oryza sativa
agggggagggcttggggaggaaggcgtcggtggcggcgagggagcggagggacatggcgatggaggaggccatggttgggaatggaatggaagagaatcgaaggaaggggataagaggcgacgattttggggggaggagaaggttggttgggttgggttcatgaatcatgatatttccttcttctcctttcgctttccttatcccaagtccatgggcccaaatcacggcccatataggagtacgtgcatagccatctgggccgtacatattttaaaataaatcgacaaaagtgaaattaagctttgtttatataataatgttgtgacttgcctgtaattagaatagggattaaattttatactcttaccactggatcactgattagcatgacagttcaaccatgccattgctccaaaaaaaaaaagaaaaagaaaataagagtctcacaagctattggcagtgaagtgatataatgaagtaaattatatttaaattaaaatagtattctgctaagtcatcagactaggcttgcattgcctacacaaccactttgtaaaataaaaaggtttacagtggcctgcccttcccctaagaggttaatagtatctcccggctctgaaactaatccaagggctagctttgcggtactgtacattcatctgtcatttcccctgcgggcaacacaattgtacaaagtttcctcagtcgagttcaattcccagaagttgagttgaatgaaaatcatcttggttcagaaagatacctgtcctgaaaattattaggtagaaataacaggccttggaggagggggaggaagaggcatccttgaaggcgcatctgcagccagatcactgaacaccacaacacaataggaaaatgaatcagaattcagaaccaaaagaacattcctagcaggtagcaacaggtgaaaccagctatttgtatcttcagttcctgtcagatatgctacaaacctgatcctcttgctgattatggctgcgtactggctcggtatcttcttcagcgcttctaaagcaaattgttcctccttctcggtttcaggcatttctcttgacattattattttggtgaaatcaacaaactgcgaagacaaaactagcttaattatgagcaaatcctcccatataaatcaatgttgtgatgcccaacaaacacctggaaattgtcaaacagctgtcgatcctcctgacagtgcatcagctgctcatcccatggaccatcgcccactccgacaagcacgatagaaagagggaaatgagtgcatagcataagtacacattttccttactcaaattcaagtatagctatatattttaaaagaatagtaagttgcaccttatgttttttttttcgccgggctggcggaagccagccgaagtttattaatatagggaaaaaagttgcaccttatgttcagtcagtacttttagatagaattcagaaacatctaatctaattagtgttgccactatgtacctcgcctgaacaagagcctgtagagtcctttcttccaggtagttctcatcccgattgttcgcagagttagcaccacaacatcttggaacctgaggtagcatgagcaaaatacatggattaaaaaaaaactagtggaacaggtaaggtgtcaataagattctggaagaacggcaacttcttttcagaagttcagagaaaaaggcacacctgcccatcagctattatcagtaggatgtgatactggtagccggagtcctgagttattctcattgcagtttctattattggagctaaagatgtcggacctaaaccacaactcaccagttatctttctgaagaagagagatgaattcatcgttcatccttcgcaagaatgaactcgtcggtcacaatatagatacctgacagccggacacgtggcgcaatttctctgtatccccttagaacttcagaaacaccattgcaatactgtcgcctgcccgagtagaagctgaagacattttggtcgtgcgtcgatgctgaaaatcacttcatttctgaacagagaaatgcagattgcagagagaaagaactagaagacgatggagaagcttttgcttactgtccccaaatccaaaacatgggatcctgttgtcttcgtcgaacgtcgataaggtcttgccgatgatactaatcgcttgctcgtacgggttgagggagtcctctgaaatgtgatgcaggcttctcccgttgaaacaatgtttccctgaaaatttccacccgctgattaaaccatgacgtgaggcaacactgcaacaatgagaaatctcgattcttggaagctaaaaatatatgcctgtccactcattgcttttggtgaaatccactccaatgataatattggacgactcgagaccgaccttttcaagagcttccttaacctgcatggatgaatcatgcaaagataactcaacaatacacttctgagtaactggatgataaattggcaaatcatgcaaaaagttcagttcaagaactactcatacaggctgcaactgacctgatccaaggtatcatatctctgcgaatcccaggagttgttgatcctcaggttgccgatctcatctctattcaggcgtacagtccaagaataaatggtccagaacagcagcaagaaagtagaaaagaacatgccgattctcgaagaaagaagaagactgtgaagaaagagctcagcacgaagatgaaggcgtttcacagtagcatggtgagcctatatacagtaacgaaggaagcgaatcagctgaagcgaaggcgagcgattggtcgtcaggaagcttcagagcaacaactctgttgatttaaaattttagataaaagaatatggcaagaacgcgcaagggttgtcgctgtgtacgctgaaacgagtagatggtggttgccgtgaaaatactaggctcaggctgttttacaatgcttgattgcttgatgcatttttcattctttcagtcttcagacaaagtgcagctgttttgctagcactgactaattgagtagtactactgtaatctcttgctctcgcaccacgtactaattaagtataaaaacggtagtggcaggcaagaagggcagcgaattcttggagttcttcttaattgactcgtgagttcatacctgaaagaaaagaaaagtggcatggctagtggaatatgctttggtgttgtggttggctggctagtgtagtggcatgggatttatctagcatagaattcagttaagagcaatactaaaatatggtatccatgtagtaacatatgattaaaatatcaccgagttgcatgatgccataagcgtagcatttgccttgacggggagaagaggaagaaaagaaaaaaagcaatccgcgttcagtgaaagtgagacggcctgcaggacgacgacttgacctgacgagccggatgctacagtcatgtggcgagcactagaccagcagctcagaatcttgttctattttcccgcaattacctgcccggaatgtaataactttcttaatttcgtaatcgaattcgctaaagagaaagcaatattctgatgagtgagtatgagaaaaccgtgtagtagtccccccaagatcaatgccactcaaatagttatgatttttttaaaaaaaattgataaaatatattaatacgtaatatatcactctacaaatttgcaacttaaaattcatagcaacttgtgagtatgacaaaaccgcgtaatattcttttcccctgaagatcgatgcagatatatttatatagaagaggatatttatatagatgtgtgtgtgtgaatgtaatcatatgaacttccaaatagaagagattgccaaatgaaggttggtattccagactctcctctcctccttcacatgaaaataaccatcagcatcgatcatccatttgcgttgcctcgatcagctcttaacaatttgcaagttcactgagcgcatgcagtgctagacacatacagatgatcccctttggtccttgtctgcaaattttactcgcaagggacgcccatccaaaatctgcaagaagttatcatcaattcatcattcacggaagattatacatcaatcccatgtggatttacgcagcgaattaactaattaagcacatacatcatactgacctgtccattgagcatggtgacaacgtcggccggttcagcatccgctgcgatcgccattgttgcgaatccaaaacctcgtgaaaaacgtcccctgctacttctctcgcacatcaccctcgcatccgtaaccactacgaatccgtcatgcccatgcccatgcttgctcttgatcttgctcatcaagaagcgtctcagcccatggctgtctaccttcctcggcagattgccaacgtggatcctcattagttgcacattaggctcaacaacctgcaggcctctctctttgatttcctgcatcgatcaagctaggctgggttaattaattaactcgcagattatatatatagtatcactgatcattatttctactagatggatcacttttgtgcgcgcggttgggttacctcgatggtggtgggagcaagagcaatgg

SEQ ID NO: 23 - DNA, 5752 bp, Oryza sativa
actctagaggatccccaatgcacatagctttgttattgttgcccggacattgtctggaaggataccccttattacaactggtagcagttgtgtcatcaacacgtgacagtcatgagactttaggtttgtgaacttcttctccttcgtgcttattattcgcttgatattcgtggagtatccagacggtacctttatgctctccaagcattcaaacatactttccttctctgccttgctaagagtgtagctggctggactcaagtaatggcttcctttctcctttggttccgggtgaaggtcgccgcgttgttccatatgcttcagatcattacgtgcttccagtgtatctttcgactttccgtatacacctaggaagccaagaaggtttacgcaaaggttcttagtgaggtgcatcgcgtcgattgcgtggcgtacgtccaagaattcctaatatggtaactcccaaaatatagagttctttttccacatcgccgcatgaccatcttcgctctctatatgctggcttccaggcccctttccgaacactactttaagatctttaaccatagcaaacactgttttcccgctgcgatgtttaggcttcgtacggtggtcggccttatgttcaaagtgcttgcctttcttccgtaccgggtggtttgctgcaaggaatcgacgatgacccatgtatacaaccttcctacagtgcttaagatacgtactttctgtttcatccatacagtgagtgcaaaccttgtaccccttgttggactgtccggataggttgctaagtgcaggccaatcgttgatggttacgaacatcagcgctcgtaggttaaactcctcctgtttgtcctcgtcccacatggggacaccttccttcttccacaactgtttaagatcttctaccagtggtcttaggtacacgtcaatgtcgttaccaggttgcttggggccttgaataataatcggcatcattatgtacttcctcttcatgcatagccagggggggaggttgtagatacacatcgtaacgggccaagtgctatggccgctgctcatctctccaaaaggattcatgccatccgtactcaaaccaaaccgtatgtttcgtgcgtcctttccaaattctttaaattttctgtcgatgtttcgccactgcgaaccatcggcggggtgtctcagcatcccgtcctgttgacgctcttcagcgtgccatcgcaacattctagcattccccttgttcctgaacaaacgccttagccgtggtattatagggaaataccacatcaccttagcaggaattctcttctttgttagctgcccgtcaacttctcctggatcgtcccgtctaatcttgtatcgtagtgctttgcaaacagggcatgcttctaggttctcatactcctcaccgcgatataggatacaatcgttcggacatgcgtgaatcttatgaacttccagtcctaacgggcagactatcttcttagcctcgtacgttgtctcgggcaatttgtttccccccggaagaatgttcttgacgagtttcaataaatcgccaaatgccttgtcactaaccccattttttgccttccattgcaacaactccagagtggtatccaactttttgtgcccctgctcgcaacctgggtacaacgaagttctgtggtcctccaacatcttgtccaatttatgggcctccttttcactttcgcagtcctccctggcgtcctgcaacatctgaccaagatcatccgcaacgtcgttaccatcagcagctatttcctcctcgcccgtttgatttccttcaaatccaacatactgagcaaagtccggaatattgtcgtcttccacttcatcttcttccatttcaacaccttgctctccgtgggatgtccaacaattatagcttggcatgaaccccgactcaaacaagtggaaatgaatagtcctggatgcagaatactccttctgattcttacacttattgcatggacaacaaataaaacccctttgcctgttagcttcggccactctcaaaaaatagtgcacgccgtcaataaactctttggaccgccggtcagcgtacatccattgccgatccatctacatgagtcaaaaaaaccgtacacaaataattattcttacaataatgacagtcatacaataattataagatatctttattcatacaaaaatcataaaatattataccaaataattcttaaaaactatttgtaaagttttaaactaattttaatgtgttttacttcttttaattttcattttagtttgttttctattatttaagattaactttcactagagtttttcttctcaactattttataaaaccttgtttagcaaatgaactaaatttctatatattctttcttccccacacacattttctctctcatcaacttacaactaaattttggagaaaaaaaagtgtgcaaaacataggtgcaaatgtagtatgacaaaaaaaacattggaggatgaagttgcaaaccttttaggcacctccgatttgtatgtaatcaccaaaataaattcaatagaaattttggcatgacctcccctcttttttaaagaaattttgaagcttgctcgggcagctggaggaggaagaagacatatatataggggtgggactttagtcccggttggtagcaccaaccggggctaaagatcacctaccaacccgggactaaagatcccgggggggcctgacaggccctgacagcattcgaaccgggactaaagatgatctttagtcccggttggtaacacaaaccgggactaaagatcaaatatgcccgttacccttttgaaccgggactaaagatcatctttagccccggtttttattgcatccgggactattgtggaaatcggccgaccgacgaaagatggtttctccaccagtgtatatatatatttggcaatacaaatttgcattcaaagaatatatcatgcatcggtactcaaaacgatatatttttcttgaatggaggagggaggagggagcaatacagcctctactgggcttgaatcttgtacattacggcgctcatgacaaggaaggatgcatgcatgtgtgaccagaggaagtataaactacgtattccctctaataaaaaaaatttactggatatacctatatactccctccgtttcaaaatatttgacaccgttgactttttagcacatgtttgaccattcgtctcttattcaaaaacttttgtgaaatatgtaaaattatatgcctacataaaaatatatttaacaatgaattaaatgataggaaaagaattaataactacttaaatttttttgaataagacgaacggttaaacatgtgctaaaaagtcaacggcgtcaaacatttcaaaacggaggtagtagtagtatactgtaccaccaggacgaagtcagtactcgcgcagagattaatgtatcaattaattagaccttattatctcgtgcagattaagctgtgtgtacgcacgtattatgtgtagaaataaacatagacatgcaaattaatatatatgagttttatgagaatccaatcagtaaatatcttaaacggtatcaaaatttaaaattttcagttttaaaatttgacttaaaacttgtcaaaaacaatgtgttttgtaacagatagtgaaagcacgcacgcttctcgatcatcctatgaaagcaaattgaaatgttaatgcacgcattattggcatcgatctctttgactactgcaaattgaagaccaaataatgcgaactcaaaatatatatcaattcaatgcaactacacagatgagagcgattgtaacaatagtagatctaacatcattatcatatcgtccatcgattttaaaacctagctatctacgtacccagaaggtaaataaatgtacgtacgtttgagcatataattagataaatccatgccccggcacaaggatgaaaatgatcatgttggagttatctcactagcttgcttaatttaatgtcgttaattgttgcttaattgaatacatattgcgcgcacataaatcggttgatcaaaatgtggtcagatatgtttccagatatgggttatatattaataaatacaatcccatgcattagagcaagttcaatagtatagctaactactagctccaattcatctatagccaatctaatagctcattcatacaatagttacatactacactattaatatctggtcccacctgtcattcacacactgtgtgtgtcttggagtccgtgctacagctggctacaaatatgtagcccgtagcccttctctctcctcatttatcttcttaatatatgtttgcagctggcttatagcatgctattgtacctgctcttatagtggaatatctagttaaaaatggttactaaacacgtggcaaactaaacgtgctaagaatattggacaaattaagatttgctgggtgcgatatcgattaaggagaaagcaaggtggtagtccattttggcatagtgagctgtttccgtaggcttcataatctagctatggatgtttcagggacacattaattctatgggggtgtcaggtgtgtgtcgtgggtggtctggcttaatatgaaggcttctttaccgcaattaattatcatcttagcaagtgagtttttttgggatcttagtgagttttaactatacagaaagtaataaacctcttacaacatgggaggcctcttaaaaatatttacttgggatcaggtacctcagtacgagggttttttaggtaccttaaaaaattggaataattaactatttggatccaatagatctaattctattaattatactaaacctggtagtatgggtagtacaaattttatagggaaaattttgaactgaaatatataacagcatgataaatttatgtatatgcatgccatgttaatacatgaattgataagactaccagggtaaagtttcgaatgaaatattttaaacacttggattaaaattgtactatcctaccaccgcttgtagcagaaggtacctaaaaatgagtacggccaaaataaactgatccctacattttgaaaaattcaccttttgcatttgctcatggaattttctctgctttttaactaggataaaattggttattgggctattgtagttatgtttattctaatcgatcagtatatgttcagtcggacggtttaatttaaatctttcatctctcaaatagtacggcggtgtttgaatctcttaaagatgaaaattaaacatttcacgtaaaatggtggtaataacatgtgattaattgagttttaattattacaaacttaaaaaatgaactaatatgttattttagaacaactttcatataaaaagtattcgcacgaaacacaccgtttagtagtttgaaaaacgtaccacaaatatccaaaactttatcttctatttacagatgattagtagggagacgtatacagtatgtagctcctaacactttgttggagaactgagtttggagtggcttaatttataagctgcacacaaaatgatgaagattagcacatcatagtaattaagtattagctattgtaaattttaaaattgaattttatttatttatgaaaaaaatatataaagtttttgaaaatgacacatcgtctaacttttgggaattcgtgcttatcaaaacgagaaagtagatctccaaataaacccaaaaaaacgcagcctaagtcatc

SEQ ID NO: 24 - DNA, 2423 bp, Oryza sativa
cctgccaaacgacacaaatgtattatgggtctgtctagtttttcaagcatatgaaaatgggactatctattgagctttcgacagaattgtagtttagaatcttgtaaaattttcaaccaatgcatatagcccgttttaaatgaaataactaatagacaaacatgtcaaaaactgtaaatctagaggaaaaaattgttataaaatcaactttggtgcactgtaactgagtgtatgaaactataagttgaacatacaagaacatgaatcttgatgcaagatcatatggatgaaaaaagtgaaatataggagccttatcgcaagtaaaattacaaaaccgtatgaaaacaccataaatttatggttacatttttagacaactaggattgcgtcgaaattcatatgtaaacagtagagatatcatttccactccccaagcccctctccaccctgacccctacccaaaacctccaaactctaaccttcctaccgccacatagttgccgaagaagagctcgccatctagtcaccaccgcatgaaagtagttgtcatcggtgagtcaccccctcctatttctcccaaatccaaagctaggttaaaggtaactaaaattcaaagcaattttagtgacctaaacaagttaagaatttgcacgtttgttattagaaagatgggtactccctccgtttaatatagtaaattattttagctttatcttaagttaaacttatctaacgtttaccgggtttatggaaaatatacccaacacctataacaatatatatcattaacaaaatatctttgatgggtaatttaataataaaattattctgatcttgtagatgttggtgcatgctgtcataaactcgatcggtcaatgtttaacaaaattgacttagaaaaaatgatttcttttctaaaaataattaagaacacggccctctcctattcaaaccagatgtacacagccatttggacaaaaacaaaactaaggccctgtttagttcgtgaaaagaaaatttttgggtgtcacatcgcatggtttaccggatgtcggaagacattttcggacacgaatgaaaaaaaactaatttcatagctcgcctataaaccacgagacgaatttattaagcctaattaatttatcattagcacatgtggggttactgtagtacttatggctaatcatggactaattaggctcaaaagattcgttatgcgatttccatacaaactgtgcaattagtttttctttttatctatgtttagtacttcgcgcatgtgtccaaagattcgatgtgacgtttttgggaaaaaaaatttgggaactaaacaagtcctaaggggtgtttagatctaggggtgtaaagttgtggcgtgtcacatcggatattatatatggtgtcgcatgggatgttcggacactaataaaaaaaaactaattacagaatccgtcagtaaaaccgtgagatgaatttattaagcctaattaatctgtcattggcaaatgtttactgtaacatgacattgtaaacacgacattgttaaatcatggagcatttaggcttaaaagattcgtctggcaaattagtcgcaatctgcgtaattagtttttttttagcctatatttaatattttatacaggtgttcaaacgttcgatgtgacatgttaaaaaattttagggtgggattgcggaagggaggaaggaaatagttaggagtataagttacttgggttggagttggggctacgctggaatactggggcaggaaccacagtgttctcttgatcatgaaggtccattcgaatggcagctctgccattggcgtcgccgcatcgtcgtggaaggagtacttgtacacgtggcacacatccggcattgtccaaatgacaaagtaggcgcatccgccgctcacctcgccgccggcgccgaacctggcggcgtcgacggcgaagctggtcgggcaccccaggaacagcgcgtgctcacccagcagcctcccgccgtccgccgccctcacccacagatgcgccagctcgtcgccgtcgccggccgccgccgccgtccccagcgtgtacagggacaccgacagcgcggcggcgtcgatctggtaggcgctgctctgccatggaatctcgacgcaggcggacatcagcttgccccgaaactcgaaggtgtacgtcgatagcagccgcttgtacaggaagccataatcaggcggccatcttcttgtcctggattccactactcggccgccgccgccggcgtcgtcgacgagcaccctggcgacgaacgtctggtacaggtcggcgaacacgacgccgccttggtgatacgtggtgcagcagccgtaccccaaggcggagtaattcatccccttcgactctaccgtcgtccatgccgtgtcgccggggcggaggatg

SEQ ID NO: 25 - DNA, 5440 bp, Oryza sativa
gaacgggacgtcgtgagccgacgccgccaccgccatggctgcagctgccaccaccacacccagcaccaccaccaatgatttcctcatctctccgtgcatacagtatatgactatgctggattgctgatgctgctagctagctatagtagtcgattgacttctcagatcagtcgatcgagcattgcatgaatatcttgtggaaggggtgcatgccatttatagagctccatcgtcgactaatttaatcaaaaccatgggcgaattgacgacaacgtacgactatttaatattatatactcaattttctctttcagattattctcactgggattcctatctttaggagttaggattaggatttagaagctagagctagagttaggattaggagacaggagtaccgtttgagaggtgaaagatttaagagtaaatttttcacataacttcatctattatggtcaaaattcgtcaaaaacataaggttttgccacgtgccatattcccttaggtattgtggccataaagtttcacaaaaccatatgctagtactatttattattttgactttactttattaaaattttaagttctacaatcacatcttaaatttatgggttctttatataaatgatgcatcaatataagtaatgttttttaaaaaatatataggagtgtgttaaattggttaatgatgttgttttgtgaaactctagtaccataatacatggattatgtatcatgtgttaaaatttcagtggtttcgtgtaacttggaacataatagataggattttattaaatttattcaagatttaaatcaaatcatccaactgaacacgcatgcaccgatcagaatgaacatgactgttatatttcaacataacactaaatacatatacctcacaccttatcataattttgacagcccaataaccaaatttcttactagttaggttaaaaaaattttcaaaaatatacatatatacatatttgatgtatatatatatatatgtatgtatatatgtatgtatatatgtattatgtatatatgtattatgtatacatgtatatttcaaaaatatacatatatacctttacatttcgtccgtcttatttgaaaattttttgaaaaaatttaaaaccataagacacgtataaagtactattcatgttttatcatctcataagaataaaaatactaattattaaaaaagttaaataagacagacaattaaagttgggcacgaaaattatggttgcacttaaaatggaacgaagggagcagcattaactatatttagtgaggatgaactttatagatatatagaatgcctcgtcgataggttaaatctacattcatctttgatttggattttctttttagtctagatagatactcacttcttctcatattgatcatcatataagaaaatgcaccaagactaagagcaagtataatagtgagctataagcctactataagcttatgtggaggagagagataacaaaaaatcatggacgttggctctcagagcaagtttaatagtatagccaactactagctctaatttatctatagccaatctaatagctcatttatacaatagttacatactacactattaatacctggtcccacctgtcatacacactgtgtcttgaagtccgtgctacagctggctataaatttgtagcccactacttttctctctccatgtttaacttcttaaaatatgtttgcaaccggcttatagcatgctattgtacctgctctcatgcaagagctagcttaacacaagctcctaagtaaatacattaaatgcataggtgagagatagagagaggagaagataattgtagccaactttatagctaatctattatatatattggctttaagatgggctaatagtaggaagtgagctctactattatccttgctctaaggacagcacagcctagttaattctggcattaaaaccacatcgaacaattaacagtcggtttgggtctcatgcaaagagtgtcacgcctaccgtcggatgaaagtgcattgtggcatgcaaactcctttgatccagcgattgcatgcaaacgcctacacacattaattccatgcaagcatgcatacgttacgaggaggcatcagcgagattatcaatggcactagctctatgcgacgatcaatatgacatttttagtttctgctagtaggatgggaaggagggagtattgtctttaacatttttttctgatccggtctgattttgtatcagttttgtcatatatgacgtggtgtataaattaatgatgcatgagaatttggttggatcagtttgtttgcgcgtgcgtcgcatagaacaggaaccgatcgacgaccgacgggccggcctagcgagaggtcggaatcgcaactacgccagcgcggagaatatgaggacgatgcggacacaggcaagcatgacacaacaagcgacagacgaaaatttaaaggtgatgattgaagaattattattcatttttaaagtaggtttgattagattagataggctcaaacgtactctctccgtctaaaaaaagacagatctctggtttccgtgcccaacgtttgaccgttcgtcttatttgaaaaaattataaaaaaaattaaaaagacaagtcacgcataaaatattaattatgttttatcatctaacaacaataaaaatacgaattatacaaaaaaatcatataagacggacagtcaaagttgaacacggaaactcagggtttgtctttttttgggacagagggagtactacgttaacgagaagtatacacacgtacgtaactacctggggttaaggatatagcaggccaaacgggcggcccggcccagcacgacacggcacgccgacggcacggcccactagggcacggcccattaggcacggctcctgtagcgggccgtgccgtgccggcccacgtgccaaggccacggcccaagcacggcccaagaaggtgctgggccgtgccgggccggcacggctactgtagtggcacgtgggctggtagccggcccactaatacatgtggcccataaaaattgaaatttgaggggaaaaaaagaaaaaaggcagaaaaaacataatataaaggaaaaaatgataaatataggataaatgtgaggaaaatttaggaaatatatcataaaatatatggtacaaatatgataaaatgtggaaaaaaataaaaaatatgagaaatatatggaaaaattagaaaatcgtaggaaaaataaatgggccggtgggccgtgccatgcctgggccgtgccgtgccggcacgctacagtaaacgtgccgtgccgtgccagcccacgggctgaggcatcggcccaaacacggcacgggataacgggccgtgccggcacggcccacaggctggcgtgccgtgccgggcctgggccggctacagtactgccgtgctcgggccggcccggcttggcacggcccatttggccaggtatagttaaggatcgatcgatcgatatgtgttgcgtgtaggttttaaaatcgatcgatgaaggcatgaagcatatgcatgcatgcagccagcatgtgccattttaaaacatgatgcgtttgcacgtcgacaggtaacagaggcgccgcaaaacagctggccaagtcaagttgaactattttactatccttaacaggtagtacgtcaggtatcatatgttcaatatctcgatcggtacctctctccagtataaatttaatatatagttataaatttttgcactaaaatttttatgttttttaagagctattaaatttctctaattaattagggtatacttcactgtactgtgttaatagagtcacatgattcatcaaagcataagcgaaatgaactaagtactcccaccgtcccaaaataagcatttttagaatagtgacaagtcaaactttttagatttttactattaatagaaaaaaataaaaaacattaatcatgtaaatttgatgttattatattagcattaaacgaactaccataatatataactctttttatttaaaacattttacttttatatatattatcggtcaaagtagcatctcggagaccttgttgaggtcaaaaatactccttccgattccataatttttaatattttaaacaaggttaagctcaaaattttattctttttttgactatcaacaatcttaaaaattattcgaaataaaggtactatataacaacatatataaatttatcttacaaaatactataataaaagtaaaaatatattataataaaaaatataatcaatgatgtaatttaaataccatgtcattatccaaaacgttaaaccttataaaaccggaggaaacagtacaagttctatcatgggtgatatggaatcggggaactagtatagtttggcagttcactactaccaggatatatatgccaagttcccgagaaaaaactcttgggaaacagcctaaatttccctgggtaaagctgtgtttagattcaaaatttggatccaaacttcagtcattttcgatcacatcaacatgtcatacacatacagcttttcagtcacatcatctccaattttaactaaaatctaaactttgcgctgaactaaacacagtctaaggataggtatctcttgcggatagatttcaaaacctatggacgatatggtaatatagatctctaaactgttgttacaaagttgctcttggttgtacctgtcttttaattgagtacggtacggtatatatgttgggttcgcattatttggtcgccatttaatttgcagtcaaaagagatcgatcgaggatcatgccaatcatgcgtgcatgcatctacttttcaatttgctttgctaggacgatggagacccagctttcgctatccgcctatccgttacaaaaacacattgttttggaaagtcaaaaactccagaaaaactttcagtattaataatactaccttttaagacatttagattggattcatgatcaattcatagatattaatttgtatacatcttattataataatatactgaatatgtatttcatagatactatatatataattcgttgagatcacttgtacatattttaatttgcaatatacaaatatagtggtcaaaatatgtattgaaagaacgtaacacatcggtaattttccctcgaaaaaagaacacatccgtgtacgtactcaaaacgacatattttcatgaaaagggagcgcaatacgcagtactcgtgatacagcctacaaggcgatcgagtattaatttatttctgcacgtaatacgaacgttcgcaggatggacgtatgtcagcttaatctgaacgagttaataatatataataattaattaattgatgatcacttcgatttgtatttctactgacttcgtcattacg

SEQ ID NO: 26 - DNA, 2393 bp, Oryza sativa
caagaagaacgccaggtacatccatgactttaacaggaagaaaggcatgtcctacaaactcggcctcaacaagttcgccgacttgacgttggaggagttcaccgccaagtacaccggcgccaatcccggacccatcaccggcctcaagaacggcaccggctcgccgccgctagcggctgttgccggcgacgcacccccggcgtgggactggagagaacatggcgctgtcactcgtgtcaaggaccaagggccatgcggtacgtacctacgtactatacatgattacaattaatcttaatactccctccgttcctaaatgtttgacgccgttgacttttttaaacatatttaaccgttcgtcttatttaaaaaatttaaataattattaattcttttcctaccatttgattcattgctaaatatactaatactaaagtttttgaataatattcataaaaaatcaaatgtgtcaaacatttagggacgggggagtacaattatacaaatacacacatgttatttatgcatatatacatatataggtagctgctgggcgttctccgtggtagaggctgtagaggggatcaacgcgatcatgacagggaacctcctgacgctgtcggagcagcaggttctcgattgctccggcgccggcgactgctccggcggatacacgtcctatgcattcgactacgccgtcagcaacgggataactttggaccagtgcttcagtcccccaacgacgggggagaactacttctactaccccgcctacgaggccgtgcaggagccctgcagatttgatcctgtatgtaattcattaatttaattgtctcaacatattatatatatgatgaatggactgataatacagtttgtgtatatatcgtacgcatgcgcagaacaaggctccaattgtgaagatcgacagctactccttcgtggatcccaacgacgaggaagctctcaagcaggcagtgtactcacaagggcccgtatccgtcctcatcgaagctagctacgaattcatgatctaccaaggggtaggctatactgctgtttgtttacagtacttctccctctatattttaatgtatgacgccgttgattttttaaccaacgtttgatcactcgtcttattcgaaatttttatgcaaatataaaaatacttatgtcatgcttaaagaacatctgatgataattacataaattttttgaataaaacgaaaggtgaaacgtttatcaaaaagtcaacggcgtcatacattaaaatacttgaagtactaattaattttctcccaaatatatatatatatatatatatatatatatatatatatatatatatatatatatatatatatatatatatatatatgaccagaatatatttacattatagaaaatgtggacacatgcatatagaaacatatgtagtcatgtattaataacaatccattatatgtcctagctagctacgatttcgacgtagtagtactcgctgctagctcagaagctaaggaccggtgaattgtgtttccgtcgtagtagaattcacccttgggatcaaggatttcttcgttgatgaatcccatgagttgttcttgaaccgccgtgataaattccttgtgtgtggtcaggttatccctcatgcgaataaactatatgaatgtatgaaattgattagtaattaaacaagaaatcgctacgtaatgaaattttgaatttatttgtacgtacatcgagctctcttgtggtgatgatttggtttgcaaggcagtggcaatactcgcacacgtaatagccgcacaagttagttccctgcttttgctttgcgcactacaaataaatgacaaacaacgagagatctaattaatatacacttgtatgtatttgaatcggagaaatataaatgtagagcatgtgtactcacaggaaatttgaacttccgcctaagtctttctctccatttgccgcagaccaaatgacggaaccgataccaagccctacatggagtttaaagctatgattcgtagtagcaattaacataacaagattttcttaattaacaaaggaacttatgacggtacctgtctataagttcgaaaaccttgtcaaacgtagactcttttttatccattgagtcatatacgttgacggtgcaggcctccaggtcgaagagtaaaagcacccagtggaatctgcaatgtgcgtgggatgcattacatatgaaacacttagcaagttcgtacgggaatgaaatttggtatgtaggaagacagtaaaattaaactaactctgtgttgtatggcaacagtatgaacgtcttgtaatgctgcgccttcaggagatggacgagattgtcctctgtttcttgtggatattggtcgagc

SEQ ID NO: 27 - DNA, 4274 bp, Oryza sativa
ggatatatatactaactactaaattattgcacattgatacatatcgtactacatatattaactataattatttatttaattagggtgtgtttagtgggccatccggaactgagttgaaccacgcggtgttggtggtgggttacgacgagacggaggacggcacaccctactggatagtcaagaactcgtggggcgcaggatggggcgagagcggctacatcgcatgatccgcaacatcccagctccggagggtatatgcggcatcgccatgtacccgatctaccctatcaagagctgcccctgccccatcaccgccgcttctgctgctgcttaaatcatccatgatctgtcgtcgtacgtcttccaacatatataccgtaaatgttatagcacgcgtgcataaaattatctgtggaaataaataaatatgcacgcgtcgcgtggatatataattactactactacgtacgtgtagacgaaataatatgagtgtgcatgtgtacttgtgtgtacctatgtgattgaataaaatagagctctgctcccgtatatacgcatgcatgtgtatgtagatatgcttgcttgacaagcggcaattaatataagagctctgctagttaaagaattacatatgttcttttatgttctatttaatttcggatcggactacgtacgagctgtatttatattagccagaactgtggcacagtgatgcaaaactacttaaattgtaagtattttaacacctacatccttcgtctaaaaaaatcaacttctaattataaatcatggtcagaaattagtcttgttatatgaaggttcactacgttaggttggatcacctctaactagctcaaaccctcccctctgatgggttcggccctgataaaaaatgagtggttagtgataatcctactcaccttactcacctctaccaactcgaggcccgttagaggagaatgtcgcctctaacggatcgcaacaaagtcgcccgttggaggtgactgtcacctcggacggctagatagggatacgaaagaacccataaaccttactcattgccagaattccagcccaccaatatggacaggccagtatctaggagttactagctaggcctaaatgggtaaggtaacccaaagtactgaagcaacaaatataggctaaattatgcgcacgcatatcagtaccgaaggtccttttgcattattagcttgtaggaaagcttgtacagtatgtacgttcattactactccctccgtcccaaaaagaagcaacctaggaggggatgtgacccttcccagaataatgtatgtggatataggaggggtcacatccctagacctaggaggggtcacatcccttcctaggtcgattctttttgggacggagggagtagtgcttcagcaaactatctaactggtacggtgtgccacgttttttgggaacggggatgaagtaagctccacgcgcgatatccaacgtaccatgcgggtagttctattattacacccatatacggcaattttactagtaaaaagttaagaaatatatgtcgatcgaaggaataattaacaacaagagctttatttatttatcaagcacaccaacgtacacacgcatacactgctatatcgttttattcaaactccatacacactcgggtaatgtatacatgtctttatccacatgtgcgcgtgctgaatatgtacctttatttatttacttatgcacatgtgtgtaatgtatatatagttgacgatctattaataagtttcgtagtacgtactatgcatgtgtatagtgtatgtgcgtgtagttgtacgtacatgtatagctcagttatatatgtatattgcatggtaggttggctagtaggatgcgatagcagttggggtttttggggggcagggacacttctttataggatatgtggcgtgcgtggcgatgccacataggccatctggggttcccacgtcacgtttcatgcggatgtagccgctctcggcccagtttgcgccccatgaattcttgacgatccagaattttgtctcgtagtcacaccataccccactaccagcacagcatggttcaacggtggtggcgtttggcaaggcccagtgaacacgccctgcatccatgcatgcacagtgataagttcattttcagcattttaattaaatttcactcgcgaattgaattaggtgaatattattggtgagagagataatcgctgaccccttggtagaactgccacccgctggcgtcgagtgccacagagatgggctgctggtagactttgagcagcagggcggcctcgcttttgttcacccactttacatcgtccaccgtgatgatgggttgtttgcctgccaccgttctgcacggatgcttcgtggcatcgtaggccgggtagtacggttccttcccgcaccgatccagggtgatcccgttcttgacgatgtactgctgcgcctggtcgggccaaccgccggagcagtcgccggcgccgaagcagtcgagcacctgctgttccgacagcgtcagcaggttccctgtcatgatcgcgtttatcccctccaccgcgcccaccgccgagaacgcccagcagctccctttgtaattaattagttaatcccattcattaattttatcaaacaatttattagcatgttttcgtaattaagtgaattattaaacatgttatacgtaccgcaaccgtcttggtccttgacatcagtcacagcaccatgctgcctccaatcccacgtcgccggaggggacacgtcgccgaccagcagctgctcctcctcgatcggcctcgcttgcagcgccggcgccggagacgccggtgtcgtctaccttggcgccggtgtatttggccatgaactcctcggaagtcatgtcggcgaacttgttgaggccgagccagtaggacatgcccttcctcttgttgaattcgtggatgtacctggcgttcttcttgaacacctcgaacctgctaaccttttcggcgaggtccccccactacgccggaccaggtcatctctgacgggcccaaaccctcacctttgacgggtttggtcttggtcagtgattagtggtcactgatgacaaaatcacctgtgacggatgaaacacccgtcacagataacccatctctgaccggtatataagtcatctctgacaggttaaaacttgtcacccgtcacagatgagtcattagtgacgtgtcgtaactacctgaccgtcactgatgacaaagcaagaaatacaatttttgaattttaaacgcaacaaaaaacctcaaaaaaatattttgaattttactagccatcctatacatggttacacatcactacctacaaattcacaatttttcacgcaatataacttgtatgctacaagtgagattcgaactcaagacctcaacctccatatagagctcccttaccaactcacctactcaacacatattgactactaacccaatgttattattttgtctatgcttgtctgaatcatttaacatatatttaacaccctaaatgacttcaaatgaaaatattatcaactaaatagttatagatctcatcgtgttttataacttttacatagaaaatatcttcatccgatgttgtttgaagaattcaaaattttcaaaatatatctcactttataacatgtaaattttgtgaaatgaaaatattttcaattataatgttgtagatctgattgagttctatgactttgatacggggcatgtatccatccatgtcatttgaaaaaaaactcaaaattttgtttttaaaagtagatctgatcacttgtaatgcatgttcggggatgtaaacgatctctaatagaaatgttgttagttataaagttgtggatatcattgagagctacaacttttatataggacatgtttcaatccgaggttttttgcaaaatttaaaaatttgaattttcactcatcactgacgggtcataactaccacccgtcagagataacgttatctgtgacgtgtgttagttaaagacccgtcagagatgagtggtctcttttgtgatggttcataatactacacccgtcacagatgacatgtcatgtgtgacgagccatggttgtgacccgtcacagacgatctgtgacgggttacaagtgcaagccgtcacagatgacttcacatctgtgacgggtcctccctggtagaggatattttttcggcccgtcagagatgactcatttttgacaagttgcgttggcccgt

SEQ ID NO: 28 - DNA, 15299 bp, Oryza sativa
agaactgtacaacacgagttccctacgattcctttttaacaggaaatgggatcggcagatcaccaattgatgatacagagagatacatgatgctgtcgacatcagaaaaatgacagcataaagctcatcggtagatcttccggcatgcacgtccaagcacattactatagtctctctgccagctacgtactaccgtctaaccatatctaccatttgggcaaaatgcaggcacaaaagccacagattacccaggctgcatgcgctttgatcagtacgtgttctgggggttgaatcgcctcctggcgtcgcgcttgtagtagggcgtgtcgtcgatggtcctcctcacgtactccatgaacggctgaggcgtacgaggtgacaactcaccagtagctggggacgctgggtcagccatcgcggctgctggtgctgacgcaggcgcaggagtcgcgtgtcttggtggtgcctctctgatcggtttcttctccagcaacttcatgaagagcgcaatcgtagcgattggaacaacaatgcatgtcacgattgcagccaatgttgtcaagcctgatgtcgatggctctcttctttctccagtgtcatagataacttctatttcttcagtctggcctgtaggtggaggaaaacaatgttgttagtgatgatcgaattgcaatcaccttgcataggagaggtgatacttaaattgcacattgtatatactgttaaggaggatcagtgcattcaaatgtaggtttacttggttttgacctcagttttaccaatcaccaaaaaggtggttcaggatgatggtcagaccaagacgactacttttattccttttgaaaactaccaagaaatgtcatgactctagtaatctactcattacaaggattttggcaaagatagaatagcataccggtggctggaagaattatagtgatcttgtcatagaatgattgccttttaagtgcttcaacctgcaaaagcatgtgagtcagtacatgtttaccaccgttaagcatcaatttctaaaaatacttccttgtcagttgcaatttacctgataactaatttgacttggaacacctcttccatttgtatcaacacgactggctgacagtaaatctttagcattccagaataactcaacatctggagcagggcaataataactctagcattagaaacaaacacagccaaagcccaaaggtctaaagttcatggacacaatagggttttatcctaccagtattcccaccaatagtgatgatgctatggttgcagcttggagtcagatttaactgcatcagataaccagctttttaataatcagttagaacaaaaagaaatgcacatgagatggggagtgggaaggtggctaccttcctaggttctttaatgtagaaccctttgacaaagagggcgtgagcagatcctgtcacctttggatcttcttttagatttgcatgaacaacaatgtgtaaaaatccttccttcaggtttaacttaacaggcaacagttgcgcaggtgaatatggatgaaataagcagtaagattttttagcagcatcatcactccacggctcaacaaacctaagggagaaaggagaatgagactttaatgcatccctataataatctagaggaaaagcaagttgtatgaccagccgatgatgggaaacatacccaacaaaagaaggttcaaccttgcagtcaaatgggacgttaatgtgattgatagaggagtctgcgctgtgtccagttgaatcacttctttcaacaaggggggaaaggttagtttttatcaaacataagtaaattcatgagtatccaaataccaagacaaaaaaaaaagctacagaagcgctatgttctgattggacttagtatcaaatactacgtacaattatagtaactttgtctattcaatactccctccgtcccaaaatgtagctatttctagcacagtgtcttgtcccaaaatgaagctatttcttcacctacctcctctcaaccaatcacaaccattcttcttcacctactttctcttttcaaccaatcacgcacttcctccaatcattctcacctactttcttaatacccgtgccaacctcaaaaatggcttcattttgggacggaggaagtacaggactatttgtccagttcctgctacaattatacgcctccctccaccatcctgttctctaatgttgctaagaactgatgtatgctgaagtatattctgttgcaagttatataataccatttctatatagacacatctaggaccaccagtttcaggtcacaatctccagctgtgaacctgaatctgaaagtaccaaaaatgaggcatagagaccatcttagcaatactactctgctggtgctccaagttctagtataataggcctaaatgtatggattgcaaaactgtaatagcctagtgtactagaagttcatatctaataaattatcatattagagtagctttggctttgactatattgatcaacaacaatatggaaggaatattgtgaaatgatatgagcattacaaaccttaattttacagagaacttgtatccaccaggtggtccagcagcatttgtcagcgtctccgcaggagcattaactactatctggttcaccttcagcacggtgacagttgtgtgcagttttgtatttggacctttgaatattactgtttagatggagaaatcacactgaaaaataagaatcgggagggaatgacactaggtaatgtattctactcattgaagataatcatagttgcataccttctgctataccttcaccacgtgcttgtgcttcaccggttattctattaatatgcacaactttttcattgctacttaaccactgactggatccacgcacatccatccctacaaaaggaaggccatggttagaaaacaaagcatagaatatatagtagcatgcatgtcctttgctcttacaaaacatgtatgagttaactacctattctggtagtgtggcctttctatgaactatccattttgttttctaatgtagggtgcgtcttcttttgcgcatacactaaggcatgcttgtaaggaagttagaatagtagtatataggggtagagggaacaccattcatttattggaatctgaaataggccctacatttctgaatatgaccagccagaaagggcgtcttacatttgtgaacgaagggagtactatactatcacccttgacccatgtttttccaaaagataagatcatgtactactaactaaaacgtgatgtgtggacagcaatgaatataaaaggataacaactaactaaaatataatcatgcacactgaaatggtgcatcagacgaaactcccaatacaacaaaaaaagatgcgaataaccggtagtatggaaatggtttcactggacgtacggtctccaataatggtgaagttcagttgctgcccagaacgaaggaccacatccctgggatacatctgtgcaccaacagatacctgatatagtggaatgtgttagtcaaaacacaaactgtattccattgtgagcattcaaccgaagaaatggcagttcggtatatggttttgctagatgatgtcaccgccagattctgaaagcatatgctattacagtttagtttgatacattgtgtacaagacatacacaaaaaaaactccacctgaggagcgctagccagaataagctacactgcattcaagtttaaatagctacgagcccattatgccattatggaccagacaaagaactctgggatagtagcattgaactttagcactttaccattatgaaatcggctttcttgggaatatggctgatttgcaaccttacaagagcagttccatgacttcttgcctgcaaaggacaacaaaacacaacacattttgcatggaagtctcactcaaattatccgtactcaagattgactcaaattcttgttacaacttccagaattagtttcaccaaaatattccttgattattcttgtcacagctttaaagcaatcattacaattgagaaagcgttaagatccactaaaaacccagtttacagcctgaacttcccaccagactcactctttttttttcagacttttgcaaaagttcagggttataaaaatggacctttttttccaaaacaatattgaagctcgattagaggggcaagcccatacctgtaacacaaaacgttcatgggtaccatgtgtaccattgccttcttttggcataagaattgacacgacatcaggatgattcgtctcaatctttacagggactattccaagtgcttcactgaaggtataacctggttggagggaaaggataaaaacaggaagaagtaaagttttctagatgaaaaataaaataaatgaagcattgatactaataaaattgttagtgaattacctaattcatcactgtattttatatccaactcaactttatcatgtacagaaagataggctatatggattgatgattctgcagctgctatctgtgcttgtgcaacctgaaaaataatgataacaacagaatcaaggattattttctaaaatacatagaaacatagagagcaatgcgattatagaacatctgtataaaatgatggcccaaaaattttgaaagagattcttgtctgcgacttatttttaggcatccttcagggccacggtggtcttttccaaaactaataaacagcctcaattagatattaaacagaaaaaattactagagtatgcattcccgcatgcattgaaatgataaactgacacatacactcaacatgcaactatatccctgttcctttttttttggtgaactatatgcctactttaactacccagtcacatacgtttgagtaccctttagtcataagtgacttcaatcataccaagggaaacattgtgtatgaaatgtagtccagaaaaacatggaaaaataaataatattacaatctcagagataatagggatgcctagtgctatgctatttgcaatagaaatatatgtaattagagtaccagcatccaacctcagcaactcgtaggcacgatgcaatttctgttctaccagttgagtgatcctttgcctgaatgcaatcaatcgcattgctttctccagtcctaattttacttccatcaataatgttagcattttgcaaaacaagatcacttttaccaatgttccttagcagagaatatccaatagtactctccaggtcatctgagtctgggtcaactgatctaggtaaaaggtccgtagtagtataaaagggtgggaataaccatgttataggaagtccaagtgcgagaggaggatctggcacaacaagaattgtcttggatgcactgtaagctatggacccagaactgccagtcatcaagaaatcacaagtaattgacacagaaattttggttttcccagcagatctgtcaaaagaaaaatattaattaggactcttgcagctaacccaacttaccacataagagtgttttttaaagtgtctcaatcaatattcatttttatttaaaagccaagaatagaaatagtccttcgttaggtccaaaaaagtttcaccaatcactgtaactttgagcaatgcataatgagttctcccaaacagctacttcggagtattagtttagctccctttaatatgaatattgggctcaacagaaacactccactactttcaaaaagttaaggggctaggctactttcaaaatgtacaaacaggcaataaattggcaattcagtatatcattcaatacttctatgtagtaccttccaatcacatgattaataaaagcattgctacttccattcgaaaaccatggatagttctttccttccgaatatagcccttgatcaagtccatactgccaagatctagctaattgaaacatagccacctagtgtagaacagtttgttagttcatagtgctctgaacttagcatttaaaagtatacaaggcaacaagaggaatattctaaccttgtcatcttctataacccaagtgtaactttggcaagtttcataaaaggaaaatagatctccctgaacagcatgtgtaatgttacgtagcagaacttcacaagatagtaataaaaggattattggattaaacataccttgggcagagaagggtagatgggcatgctgcaaccaacacaaagacggtcactttgagtactcaatatcatagccacagggatatccacttcaactcttccaaaagcttcacagatgaaggtgccttcatttgaaaaagcaactgcacgcatagtctaatggtgcaactggtcagtacactgatctgaactcggaagtttgaaaattgcacgaatcaaatgtagtacttcaaagcaagtgcaggtaagcagcatactttatattaaattgaaacaatgataacaaaaatcgcatgttcacttagagcatggtcaagaaaatgccttggatgggtatgacttacagagtttccaacagtctttgcagacagcttgccagtagaattttgaacttctacagtttccacattaagacttgtgtactcaatgacaactccaacttttggaccaccttttacagaaagctacaaggaagaaaaaactcaggacccaaaaaaacaaggacagtaataaaatcagagaaaagtacaaatagttgacataacacagaagatattaatggttaccacaaaagaggcacccggtgtgaggtagatatactctggatgtatttgcagtggtttgtacacttccaccttgacaacctgactcaaaactctttgaccagagtattgcttagcagtgacctgaagagtaaacgtagtaaatgatgcaggccaaataagccactaaaagtaaacaaatatccaccatgaaattgtcaacttacatatagagatgttgtgccaattttcgcagctttaactgaaaattttggtccgtccagcaactcatgtgaattaataagttccaaagtctcatcaccaagatgcacttcaattcccatgtatttgtactgcaaagaagacataaattggcggagtcatggatatatagtgtttagtgataacaaatctgtcaccgacaagatagcttgaaacagagttaagatagtgtatttggtatatattcaatacaggattttatgagcaaagaggaactatagcaacactaccaacagctaaggttccacagaaacttaccaggaaattatcataaaggatgaccaaatggaaagaaaataaaattttcacaataaggaatacaaagacaacactaatacatgcaattaatgtgtaaagatctgaaatacaagagcatggaggcatgggagggacctgagaatctctaaagacttgtccatcttgcgttccagcagaaatatgaaaatcttctgtgcttccttcctataaacagaacaagaagataatgaaaaaaataacccagagatttagcatctgagaaaactgatcacaagagagggaaagcatatctccataccataaggctgatgtgctcttctgagtttatcttaatccagtcaacatttgcaactcgaacctgccatatcgcataacaccaaaaatagctattatcagttaagtgcaatggactataaggaagatcagtacaactgtatttctaagaaactaggatacaatttgttgagttcatgtgtccatcgccaacaggtatataccaagagctttccttatcataagagaaatcataaaataaagatgagatggacgacaggacaggacatagctctggggaggtcaacggctgttatgaccaaaccaaacatggcaagcaataagatcagataaaaggcacttgtttcacataagtaaaaagtggaacattgagaaaattgagaagaaagtaccaaagaatcagttaatgctctaggagaaaggccaatgtcctggattgtaactgtagcagtgcccaagcctctagcaccaagaatcaactgagaacatagtgcctttcctggatgttgaagtatttgcaccacctgcgtgtcattgctagaggcatctaggaaacatgttccaccactaacagctaaggtttcctggtacaaataaattaggcagaaacaaataaggtaatttgcatataagtaggatcatgcaaaggaactataaaatgttgcagttacatacctgtgcttctggatgaaaaactatcaagacataatccggagtgactcgtaaggaagaaacaatctgtttgaagtccataacgattaagatgaaagctatacgcatagaagcataatagctcaaaataaatcaaatctgattacctgcaactgaatagcatcggtgagagtatcacgtgcgctttgaagaaacatgtgctcttcttcacgggtccggccatccactcttgaagaaaagccaatgactgtagcacggacagtgcactaaaagttcaaaaattgaaatagttaaaagagagatcgatttttagccaaaagagggcatacaattcttaatgaaatgtccaggctcctcaaaacactgtactattttgatttttgatatacaaccatggaatggctcgtataatcaacagtacggttcatacacctatctcaatatcagtgtgtgcacatgtgtgcgagcacattattgcaaatgaagataacaacaagcatttaataatagggccattaaaataatgcaaaaaaaagaatttcaaaacaattttggagtggacagtctgtgatgtaaacagtaccgagtactgaccattccagtagaattctgtaggacaagaaatctctcccagaatgagtcatctaacatgtctttgttttggtcaaagtagcaagtcctcacatcaagtgccttcccaactcaggcaaagagaagaagaattggcaaaaaatcttccatttccatgtacaccagcagcagctagacgcatgtttcttccatttgagattacaacaggtgatgcttgcagtctattgtgcttacgttcagctctgcttgcagcttccaaaataacaagtcggctttctgttcaagtgtaaaatatgatagctaataagttttacagaatggagacagcaaaataatatcatcatggacatgtgaatttatgaattatattaattatccaaatgacagtatagtaccattttcattcgcgatcaatgttatggctgacgggaagtcacaaacaactgccaactctgattggcttacagcaggcacaggatgatcttttccaatcatgtttccacgtgagaacagcagtttctacagaagtacaacaaattgaacaaatatatggaagcaacaaactagaattaagaacatactgtacagcataattgtaaacatatgtgaacataactattgacaggaatggactggattgatcaaagtgcaaagttgcattcaaagtacttacaaagttccctttgcttgggcaggatactcggtatagcctactggataatttttgtacagcagtagagctaacaacataattttttgattcaccaataacatcaacagtttcaacaaaatcgaccagttgatcccattgttccggccctccagagagaaatacatccatggttgatccaggaactaagtacagctctttgggagaattgttaaccatattctgaattccactatgtattctagataagtcaacccaatagccaccaaatcggttcccacttcctgcttgaagtaccacaagaggatagtatgcagatattttagaagtggacttaagaaaaataggtccactaaaaatctcagaataggactctgaatcaaaggaaaatgttgcaactagtgtggcttgaccagcagccgacgcatttagagatacccaagcacaaggattgccatattgtgcccaagaaccagcataatgctttaaggtttcggtgctcaaagcatcagctgtgccaacaactacaaaagattcattctcagatagtaggctccaccttataaaagcattaaggcaatcacatcgcgagaatgggtgtcctgcagaaatattaatgctcctaatggttattggaatgaacaaaatagttttcagaacaaagaaaatgagtttaattgttaaaacatagaaagaagttatagcaaatgattcttgtcacgaaatatatgtttcttttcagttgtcaaagcaacatatcagtctctttgaatttcgagtaccatgagaaaatagtatgagagggctcagttggagagaacatatgagaggatttagtaaggtaggttagagtgtggggggctgggggtggttattattatcaggagagtcaatggaaagtagtttagcattcatatatcatattttgtagaatgcatgctacttgctaaacttaaatctatgtcataagggagataatagccaatccaggacatgttagtcaccattagatgttttcaacgtcacagcagcttgaagttgtgtcccgacaggcacttcaacaggaaagtttggcaagatagcctgtgcagaaggagtggatacttcaacagtgacctgcgtgatcaagcaaacccaatgagctgacaaaagcgagaaagaaattcaaacagatggaaggttcaggtaatacagtaggtagtggacttgaaaaataaaataagaaaaaaggacccgcatgagcatgaactacagggtaggtaaccaaaccctaacaaacttttcacactacttagaccaataacagaccttcatgagcatctatcaagattagcggtgcaacaatcccaatttcccaagtcctttggtaacaaaccaaatgggtattgccaaagcccaaaagtttggcattactaaatcaaccaaaacgctacacattatgaaactacaggtaaaaaaaaaaagaagatttgaataagcagcgatttgatcacgtgagtgcgtggataagtgatatactgataccatatgcaagtgtagagtttttgcacatgacatagtgcaaatacatggtagcatcacatacagcaactcaacaaaggtgaattgacatgcgagatgcaaatttccattcaatgtgatcagactcatcttgcatgatagttaaacagaagaaaaggtgtcaagcgaatattttactagagaaaagtggtaaaatttaatatacacatcaggatataccatgatgaataaaaaatcatgcattccttcaaaatcttttttccatcatttataaacctaatactaaaattggttttccactttatttaggctaaaggtatagcagtatgtttgcatggaagaagcactttctttcctgtaagactcgtataacatataattgctagtaaaacagcatttcagataaaatccatcacccaggcaggtgaattatacaaaaactagcggaaagagaggcaaaaggattatttcttgagtttaaagtttttgttctaaaagtaatataagcctaacagatcacaagtagctcagtgctacatattgggaagtgaaataattaaataatcttgctagtggcatcactcttcaaatcttgcagaaaagaggtagttgtgtgcttgcatgttattcatcaaacttcagcttacattttcaaatcaaatagattacagataaggagttcaggaaagagaagaacaacaaaaggatatcaagaaattagattgtggcatacctcatcaaaatttaaggcatcaaaaacagaaactactttgatgacagctcgaccaggcctttttgtgcgcacaatcagtgagtcggacacagaagcaacactttcatcagaggaagatagcttgtagtcctccggcatcttgccacaaccttcagttgaacacaagataataccagtcaactcaatttacaatcaaaaggtgggttaagacttaagagtattaagacatcacaacaatcaacctccaactgccttcagttcaacttcctgataagctccaggaacccagggaagatagatagttctggaattatccatttcttcatcccatatggctttcactttactgcatacattaacttcttgttgaagcttgagaacctagcatgaaatgcttcaatcagcaaactatgatggtttataaatgccaataccatcctgacaaacattacatacaagtacagaccaccccaaaaaaaatgacctagcagacacaagcatggaatgtagtatgtacctttgctggtccagatgcctctgttcggtaagttaaaaaagcatctaagtatccttttcccttggaaattggagttagtaatctagatgtttgcacttcgtaggaacctgcagaactgtctggaacctgtgataagttccagaactccacagtactgctcgccaatttaagctcattttcctaccaagaaaattagattaaataaatagaataggattccatgtagataacaacgtctacatgaagaaacattagacccataatcaaagtgctttaacattcaatatagaagttagtttcattttatcaagataggggaatttacccacatccatagcttacttttttatgtcatagaacaaccaagtgaataaagctgtgtaagagtgtatatgcagcaggagcatgtaccatgcatgggcaccttaacatggattcacatgccagtgtagagatgaatggatctaaagacaaatagtatagatacaaaacttaatgtaaaaaggtgtggttgaaagatatgaaggtaatcactgcaacacagcactgtatgcatattcaaatgaatcgatgtgtaaattttgttcttttggtttttgtgatgcttgaaaatatgtgtaaatattttgttccaagttccaacattacatgttacatgatgcatcagaagatataagtaacaaagacaagaaaccaaatacatcggacgaatgatacctcagtaataaacatctccttgaaatcaaatccctcagcaaaagctttagcaaggaccacatattttcgtccaggaaagacataccaaacttctgaagatggaatacttgttatcccatgaaaatgagcagagtcgtccacaaccggaactagataaaggaagagtgcttgtggaataacaacatgtagagatgatacttgtgcatggccagaaacccttgtgtcttcaacaacaatattagtaaatcccaaactcaaagcatgtaagacacccaaggaactatccacttgggccacagaagagtttgtcacatgccaatgatgatgctgtgatggtaagttaacaactggtgaaaaggaataaagggagaggatttgttagctttcagctgcaggctgaaataaaggaattgcaggtagatagattctaatagtgagaataacaaataagaactccatatggtttttctaaaccgtttcactgtaaagcatagcataatttgctagttgtgcttctctttttttatattgcttcaatatatgacatgggtcacctgaagctgaagtttaactttctgttgcatgaactctggctaaagtttggtttctatacttagagaatgtcttatgaacaagactcaatttgtttgaagtaccttggggaactttttgtcgaaaaaccttgagtttgaactttaccatagcaccgacggtcacaaggactggtgaagggggctctagtgacatagcttcagcaacagttaaagtgattgtatcattcacatgttcaaactgaggttcaaataactgggcattaacaacctcttggccaatctcaatgcccttgaccacaaataaatctgaaccaagattctgcgagaggtatcataaaagagtatgcattttcatgtaactgcttatcggtaaagttaatgaaaaatgaggccatatttaataacagatatacataccctgtcttcaagctcaaatcgtatattcatatcaccacaaaagccactgcagtcacttaaatgtgtttctttcaatggaatatgaaccagatgatggctattagtatcaacccacctcggggtaagctgccacaggaattgtaaccccaccaatgatgagaacacattgtctgaaccaaaaggaaacaaactaagttacaacaagagaagaggattctacagctattagaatagctgacccaatgaagtactagagactagagaaactatgctattgattgtttcagtagaaagtttctagaccaagaatagaataggttacagttgagaaccaacgtaagaaaaaggtaacggacaggtgatggaatcaggaattccaatttgtgcacattgaaattcatgaatatgtggaagtttacggcaaacagtaagaacagtgatggtccataagcatagcacgagctagattgacatattcaagcagtatcaaagtaacaagtacgagttagtggaggtgggaggcctaatggaattttctataacaagagctcatccatattctgagaaccttaaagaaataaactatggaaaatagctctttgcaaacatggaaggctatacgaattaccttcatcatcaaaggcatgaacacgcaaggtggcaacttcatctaggtcaatttttacagcatgatggaaaatcctgatccgagagattctgtcaacaaaaactttgcaatgtattgtgattccactaataatatcagtggcatagacagaagtttccttcctgccactgtaaggagcaattgatgccaaacgagcactagttgagcatctgctgctgtcattgtactctggtttaactgaaataatatcatggtgatcccatgccctgtagatatagaaaataaataagcacgttaacctcatcacattgtgaaactgagaaaacaacaatgtcaaagcatagtagcatggtcccaaaacagttcccaattctgacatccttctgcagcaagatgcagacatacacgaagaattaaaacccaatggtgcatcagcattagcagaaatctttttcaagtttatttgtttcaccataaaacaaataacacaaattcatgcacaggtgacctgtaaattccaaacaagtggcaggcaaccgccccctgatcgaaatccatggaccaagggtgaagcaacaaagcatagataatgtgaaggtgggcatggcattttctttaccgcagtcacttctaactcatcaacagcgatttcaggttacagcaagcaaaaaaaaaaggggcacaaatgcacaattaacttctcattacttgccacgcagttaattatccgaaacga

SEQ ID NO: 29 - DNA, 1404 bp, Oryza sativa
gcgaattcgataaatttcaacgaatcggcagacaaacaggagttgttatgttattatcccacccgagccacgttatactacccaacaagtgatgaagtaacccactcctcgaaggcttgtgttccgccgcgtcgccgtcgcaaccgaatcgcatcgcatcgcatcggtccaaactcccaaccggcgacggcgaggccgacgaaacccaaacccagctaagcttccctcttcgattccccccatggacgacgacggcgacgccgtcctctccgacgtcgacgaggaggaccctctcccgcccccgccccctccctccacctacttctaccaaaaatccccatctccttcacaaccccaaccccaaccccatgcgcaggcgcagcgcctgcacgacctggccgccgagctggaggaggagcgccgcctccgccgcaaggccgaggaatccctcgccgaggccgagaagcgctccgaacgcgtcaaggccttagcgcagaacgtcctccgcaagcacgacgacctcaagaccgaggcctccaccgcctcctccatgctcacttccggcttcgagaggatctccgccaaggcctccccctccgccgccgcttcgcccgcgccgctccccacttcccaaaagtactcctccggcctccccgccatcgcttacggcgtcctcaagcgcgccaacgacatcgtcgatgacctcctctcccagatcgacgccgccaaccgcgaccgcgacagggcgcgcgagcagatggagcaccgcaactaccagatcgccatcgaggtctccgagctcgaggcgtccctcgcgtccaggtccgcccactgcgactccctctccaagtccctctccgacaaggacgccgagatctcggacctccggaacaacctcgccttcctggagaccaagctggacgcgcagaggcccgtgctcgccgaccagatcgcctgcgcctccaaggtgtacgacgagatacgtgaggtggtcaagctagtggacgcggatgccgcgagcgcgctctctgactcggtgttcgtctggaaggagaccgacgtggaggagagcctcaaggtgtccctggaagggaccaagatggcgtacgatctcgctaccactgccctgcacaaggttggggcatgggttgataaaaaggaaagcaaagtgagggatttggaagcgagggtggatgagctattgcgggagaaagagcacattggggtgttgctccgcagcgcgctgcaatcaaacaccagcgaggtgctcaaggttgctgaggatggactaagggaggccggaattgaggttgggctcaaagagcgcagggagcacaggccagggagcatggagaaagatgaagtctataccctagtaagatctttgtaatgctataatgttgc

SEQ ID NO: 30 - DNA, 826 bp, Oryza sativa
tattttcttagcacaagagcaattattcacaatattcgtaataattttattcttgtgccgagaaggaaatcaaaccacagaaattaaattagtggctagatcaaaaaggaggaatttggatattgggatttagaatcaaaggatagggttaaaatcaaaggatggattaacaaataattctaatgagattggaattattttgggttaggttcaagggcaaaattgggaaggtttcttggaccacaattcataaaaataataaaaaggggttttcaagcaaaattgactaaaaggaatttagtcaaaagaccgttttgaacgaaatcaagaaatacctcactttaaccaaaacatatttttaagtgaaaaacacaaaagagattaaataccatagaggctttcgtacaagtcatttttaggaggtcccgctaattatattttcctaggtttagaaggttattaataacataagaatcagcatgatgcaaaattagcagagggctaatttttgggttgttacacacggctaggccatatcactttgtgcaatgagtaaataagctaatttagagtggttgcaaaagagggtgcaaaaatatcggtctacaaaaaacgatattggtgaaactattgaagattttgataaagtagaaaagcttggtcaagggtttacatcggccgatccgttggaggaagtagacataggtgatggaactaaaccaaggccgacttttgtaaacaaaaaaatgagagccgattataaggttaaaataatcgagctacttaaggagtatgttgattgcttcgcatgagagtatcatgagat

SEQ ID NO: 31 - DNA, 680 bp, Oryza sativa
atagcatagatctaattaattactatataatttctcatcagatcgtccgacctggtggcatggagaggccaacggacgctttcaaggagacgcacaacctggtggtggcagttgaggacacctacgtcggtggactcgtttccaaccttcaggtggcggagctcatcgcgtgcatcgccagcaacaggagaacggcctactgcaaggtggtcgaagcgatcgcagagaccaccgcgccattgctgcccacggaggatcagctcgccaacataccttcaaagcgggtatacccatgcctattattagcatttaatttctccatttcatattataatttgatatttttcacagtcaatattttttattttaagctcaatcaactttattagaaaaatatagcaacattttcgataaaaaatcatatattatcggaatataatttaatgttagtttcgacgaaactagggctgcattttttcgcttagatttgagagagatttttcaatgcacgcaaaacgagaaagattattagtatatgattaattaagtaaataattataaacttgaaaaatagatttatttaatttttttaaacaacttttgtatataatttttttttgcaaaaaaacaccattgaacagtttgaaaaatgtgctaacaaaaaaaataagcaagttaaa

SEQ ID NO: 32 - DNA, 1530 bp, Oryza sativa
  unsure (1)..(1530): unsure at all n locations
agggcatatatgagtataaatacaagccccccaggagaagaggggtcacgccacaacgcttcaaagccacaagccaacacacgtcgccagatatcaacatcagatataagtctagacataccccatccgactcctacggaggctggcaagagggatctagcaccatctctgatctcgccgagtacggattcgaggaggaagactaccctgttgtcgactacgggttggttatctagccgcctagtcgacgacggctagatgagttatcccaattattgtacttgtgtgattcagatgaataaaggagcaacaccagctgcggccaacaggatgtagggctattacctgtcagataaggggcccaaacctgtataaaaatccctgtctccatctcttttacctcaatctggcatataccctggtaccaccgatccccataccatctaaataacgtagtcgcaatatcaaacgttaacagtggcgtgctaggtagggggattttggtgcttcaaggttttgacgagatgggttcgagggatggattctccgacaacaaaatactcgatgacttcggctatagaaagatctaacccgaccggagtatgtccccgcnagagatcaatgactttaccagnaagcctccgttcgagtcgactgcccgggaagtgacatcgtcaattaattttgattctgttgggacctggattatcctcacccctaacacatagtgagaacgtccatcccgacaagtcgtggcgaggagaccgaatacatcattattcaagaccatcacgtactatttgctcctgacatgtgcacctacatatgcatggactcaatacatgcctaggtgtgcattgatttgacgacatgtacatgcacagaagacaattcagatcggctaccaaggctaattaaggtaattagtagattaattaaattgatctactaattccgtagatatattcggcatgtatctacaaaggtacgcaatattttatatacaatttatcgtacctattttccgatctatacaatattgttagataaataatttattatgtttacctagagcatgttttctatacaatatttattgtgcaagtgtttccggtgttaggccgactacggtttaatgctgggggctcgctctattttcttctgtataaatcatgtttgtttatggtttacataatgtccgatatttaatctgttcattatatcctgataatactagaagatccatgcagtcttttgagtatatactcgatattctctgctatacatcttgtcttctagaaaatatttttcaggaacgattgagcactcgagtaggatgtggtcgagtacaccgcattatcgagaacattctcgaaaaatgttgagttgtcgcacccaacctaccaacgaatattgacaacttatctcatgtatagcatcggctacagctagactatttgagaaaatgttgttaatggataattcctcgcgaacattgtcggcttgatcacccgacatgattgcgaatag

SEQ ID NO: 33 - DNA, 509 bp, Oryza sativa
ctttgtattgtctgtctatgcccgtacgtgttatggttgttggtactgaaagtgaatttcatctttgttaaagtcttttgatctcatataaaactatgttttcacctttagtgagtttcggatccttcataagagtcttgctcccttgttcatagaactatggcattctaaatcaaattaagaatatagtaataaaaatatgttctatggtttaaattgttataagccattttgttctaattaaattgaggcatcaacacgtaccttgtactggggtaatcattctctatttaagttgttccatggctatttctttttcttagaacaatgactaatcctgccaattctcaggttgacacatctacaggggaagttgatgaggatggtgtggaggatgaataccagatcgaagacctggaaattgtttcggctgattacatgctgagggttgcagtctccaacttcaggaatgcctgggaaaatatggacccagaaagtgagcgtgtcga

SEQ ID NO: 34 - DNA, 998 bp, Oryza sativa
ttctgagtttcttacccataaaatatttgcaggaagaagatgccatggacagggatggaaatgatcttgatggtgatggcttacatccacagaagcatgccaaaagtcctgaactggcaagagaatttcttttagatgccgcggcagttatatttaaagaacaggtaatttgtaatcaaagtatagaaaagaaatgttggaagcaatacttgttgtaatgattgtggctgtacaaagaaagaaaaaaaacttgattttctaaaccacagctcccaaatttgggtgcacaacctgcatatcatacattccatttcaataagatatattttccttcaattgctacttcataatgaaggaacagtaacttaccagtgtttgtgattgctatatgaagtcctccacccacatacaccgtgtgatttgtctatcttatcaaatggcaactgagtggtatgttatttccagcagcactactcctttacctaaggttcatgaataaaagttgttttttgttgttcttgtttctacccgtcttgcccccatcatagcattgtcagtcactttagtcacttctgaggttgtgttttctagccactgttgtagccattaagtacatgccaatctagttctggacctccacatatcaaagtcaattttctttttttattattcaagatatttaatgcaataaaaaaattaaagaacgattctccacagagatatgtacataaggggatccatattcttttatcctgtaatattactagtagtggttactgtagttactaagatcaaatcaagatttatttattgagggttttgctaaaatttcagatgcttatgttacaagcttaagcatatgctaaatatgggttattgcaggtcgagaaggcattcagagaaggtacagctcggcacaaatgcacacagtatttttgtgtctcttgcattagaacttttggaagagcgagtccatgtagcatgcaaagaaattatta

SEQ ID NO: 35 - DNA, 20075 bp, Oryza sativa
ctcccctgtaaaagccccaccgttctcccctctcctcgctccatcttccccctcctctccctcttccccttctccacgcgccgccgtcgtcgtgccgccgcgtcaccgccttcgagccgccgcgccgccgccctcatgctgtcgtgccgccgcattcgtaccgtcgcgtcgccgcctcagtgtgccgcaccgtgtgccgtcgtcgccgccgccgtcgtcgccaccgccgccatcggtgagccgctgcccccccctgtttgtcgccgtgccgccgggtagtgagggagccgagagagagagaggaagggagaagccgagggagagaaagaagaaggaaggaggagagaaaccgggagggagagagagagaaagaaaaagaaaagaaaaagaaaggaaggaaaaagaaaaagaaagggagaaaaagaaaaggaaaataaataggaaattagagggagattagggaagtttagaaaatttaaaataattacaatttaattatagattaattatagtcgaagaattgcgaaatttaatataaattatggattattcttggtaatttctataataaatcaattcgcggtagtaatttagatgtaattaataactaaacaaatagatgaattcttatagattattatagattatttttgggtaatctctataagtaatcgattcacggtagaaattcggatttaattactagggattttagccgtgtgttatatttaatcgtttaatcatagactaagttaaatcgtacaatattataagatgatttttggattttgtccgatatttagctcgcgatacaaaattctaacatatatataatgctcgggtagattaaattaaaaacttatgataatgacggagcttggggctcctcaccgggagaccgcgcaggcccccctttgccggttcggccgggggcgctatgtgaggttcttcgccctcgatctgaggaatgtcagcgagaaaaagcacacgagacacgggcgacgtagacagattcgggccgctgagaagcgtaataccctactcctgtgttctggtggatctgtgtgtgaaggaatacagagagctccagagctagagagctcgagagcgagagagagttctcgctctggaatccagtggccagagtccccctccctctctcgcttctccctcttttcttttaggccagggcctccttttttttttaaccggttcggggtcaccacatgggcctctagatgcctaagaaaagaaacatgatttttacaatgagggctaatctacagccggaaatgacctctgacaagcagtacacacgcctcctgctccgctcgtcagctctcccggtggacgcccgtttcaaccttcattcaatggccagcgactttcttgccatgcttgcgctgaagcctggaatggatctgaccgggactgacataccaactccagaagtcagcacgccagctccggctagagacgagagccaggaagctctcatcattccgacgggacggggcgaggcgtgcgacaggccgcctgttgccacctaacccgcgatctgaccggtctgtgaccggtcacataccgcgactggtcatagaccggataagcatgcgctgcgccgcattgaatgcggcgtggcgcgctcgtctaacccgctataaatgcggttaggtgagcgccactgtgctcacctaacccacacacgtggcgccaacaccacagggggtcggggtgccccagccctcggggccgaaacaggagtggcccgacccctcggggagactgagggaggggcggccacgtcaccctcgggcccgaccccccagagggggtcaggccacgtgggtgaccgcggctacccaagcctctagtcacgatacccccggccccatgtcaccgacagataacaaaatatttatacccgcaaaaattgtttaggatgtataaatcgagattgggtttgccctagttcgcgaatagtgaagttaatataaaagagtcgactttcgcattcgacttccatttggatttatttggatttttatttgaattctaaccgaattcaaatcaattttcgcacgtaactatagagcccgagggagttgcggatccaagtgaaggccaagacccgcaagactttgaacaaggcaagtcatcactattctttgaacatgttgatcccaattccgaaattatttttatttacaaataaaaattgtatgcaatgatgaacatcctacttgtgattatgccttgccttgattattgttacccttaaatccttgtaaccatgatttacgtataagtccctagtcaactatgacaaatgcttagaaatgctactctagatttatgcatactcatatttatcaaatgctatatgcttgggcaattacctttgggaaggtaattgagatgcggcatgtggagacatgagcgccacattgccatgatgttgatgatatgatttgtgaaaggagaaataaaattaaacaactgttttcgactggggcggacggaggatttgggtggtatctggaaaaggctagtaccgtccccgatcaattaaggaccgagccatgaagttaagcatgaaacgacccctgtacaaccgtacttctcgtatgggtatagacctagcggattagatagccgagcggaggcagtatccctgcatagatggttcacccctgagtgaggcaggtgcgctacggtgggacaaccattgaggtagggccgagaggcgtgccctacatcggtgtcgccatcggtaggactgccatgagtgtgtgagagagagaacttaacttgaaccataatttaatatgtgtgtgagacttctctttcccgggagtgccagaactcctctcactgctagaaacatggacgcctagagtgcatgaggatttaagttcatggagcgggtacgaggctcatgtgttgggcagtcgcggagtgcgggtaaagtgtacatccactgcagtgtgagtaaaccaaatctattcgaatagtcgtgctcgcggttactgagcaccgggacatgtattacacttggctagactctaaattcttaacttgtgtgggatgggatattgcatgataatttctatgctgatggagccacttcctgagaggcgggaaggtggacgtcctcagaaaaccatgtcgactcaatagcgggaagctatccttgggatcacaatggatggtggatagaaccgtcattgtttaatatgaacactggtaataaaatttgatcagtctgtgctaggtcttaggtttgtgaaaagaattacaaaacttgctttgcgcaaaagaatcatagccatcctttgaatacccctgtcatatgcattgttgctgtggtggcttgctgagtacgggtggtactcacccttgcaatatacaaacttaatcagaggccggagatgaagcttcggaggatccctatgcctattaccaggagggtgatgaagacgatgacgcccagtaggtctcagttacggtcgttgcctgtggcaatggcgtgccgctgccttaactccgctgccttatccacttctgtttttggaatgtattccggaccgctcggtccgatgatttaagactatgcctgcgggcttatgatataatgattcgtactagacactcgtgtatgtgcacttggtatctcagctacgaattcgtgtgtaccagactacttgatccaggaaaatggtactgtttgcacgattgactcctgttataaaaacgggggtcgacatattgtacctgctcttattaggtggggagggacatggccctttattttcttctttttcaggggataagcattgttttatttttcttttgaaaaaagtggtatcaccaggatttcccttaccgtcggcgccggagttaccgcaccctgacgataagcacggttgccacgcggtaaccgtggcaaactgtataaaatttatcaataatttgaattattttctaaatttatttgaattttaatggggtttccgcggatttatctttatcgtaccctggaggtaagcgcgataaccgcacggttaccgctggttttgtaaacattgggtgtcacaaacttatgaactttgagtttttgcgtaatccatttgcaatgtcttatggtgctcaatattagcaattttttccttctaatttgatatctcttagccaaaatatagaaggaagcaatccatctgacatagagttcattttgtagttggaagtagcttttaggtttcttatagtattagatatattgaatccatgggttgaaaaatccttagttgatgcggtaggttggtgttgttagagttcgaatgcttgagttgaagaaactatttgtcctcaaaagtaaagaaaagttattttttgtccaaaggtaaagaaaattattttaaagtagagtaaatttcacaaaactacacgttttgtggtccaagttacagacaaccacacacactttgacacttggcgtttaagttatattttggtagtgtagtttcacaaaaccacactatcaatgaatggattcacccgtgatatgacgtggctgttccacttaggacaaggacgtggcaccctattacaagccatcgcatgaaattaataggatgccacgtcctcatcgtaggtagaacaaccacgtcatctcacaagtgaatccattcattgatagtgtggttttgtgaaattataatgccaaaatatatgtatttgagtgccaagtgtcaaaatgtgtgtgttttatgtaacttgtatcataaaacgtgtagttttgtgaaatttactctttaaagtataacataaatcttggcaataaaaagttttatatgggagttgaaagtttgtgttcgttttacttgaaagctttttctcgagatgaaaagtgatttggtggtggcaatctaaacaggatgaggcgatttttcctttactttcagtaatataggataattgctaaaagcaacatagtaaaacattttgttaattcaactattataccattattcttttattctaaaagagacctttcgatgatctaccgttggatcagcatcacatggatctatgtctaccctgtaccctttatatagccctcttcctccttcacaccctaaccctagtccaatacctcctccctccaccgcgctgcgccgccgccgccaccaccaccctcatgcttagatcttgccaacaattcagggcggtaatgatgttcttcctcaatagagtagagatggacgcgatgtactcactagtttcctttgcaggtgctctttctaacttgatctatagtattcttctaatagtaccaggcctccttttgcacggagggattttgcgggaatttcacgggaattgagttgattcctgaaattcctgtaaaattcttgtgttccaaaggagcccttgatgttgatatccctggccctgccccctagatctgagactccttagcttctataacttcgatattcatcggttttccaagaccgaaggtggaagtgcaaacgttgcattgccaccggtagattccacaaaaaagagcatcacgatgcgaaaatcatgatagccgccttcgaagcccttattggagcatggattaaaacaacaatcagttggtaagaaaatcaactattttcactataaagttcttcaatttattcattgtgcatcctttagattgtataaattttctattgagatagtagtagcgcggtatatattttcaagggaagaaatggaaataaaaaataagcatggatggcaagacatataaatttctttttcaatactcatttgattgtctatatttattattgaattcgttcaataacataatcagcatgatgtatcattttcccacacatatatatatatatatatatatatatatatatatatatatatatatacatacacacgcactatatatcaatagatgtatgctaattactaacacacatggcaagtggcccactacatgcaacattcaagagaaaaacagagcaatttgttgttgtaggattgctaattttcctgttttatattgacatatctagtaaaaaaagaacgtgtgaggtatatcatatatgccctcttgacctacttgtgataaacaactaattaatttaagattcacctctttattttgaactttgaggacggacaaattatactagaatgagggaaaacttagttgtccatctgaagacaaagatcctaatattggtgactccatttcttttctaatcagcgagggataattatatgtagcatacccttgctagttaagccgctttcatcgtgtcaattcataccattgacgtttagaaaatgtcgaagatgccttctgttattttccaatgaaaaaccttgaatttttcgtccgttagacgcccaggtggaaaactagcattaaagtaattaagtaaggctaatgaattaaccaggtgatgctaagaaaatatattttgaatcagatcagcttttgatttcgtatgaatattgaaacatgcgtgcctgcattttgattccgattttatttatggacaccattcacgtgcatatataatcagaagcagcaatggtgtctttcccagtataaaagacagaaaacatttgctctatttgatgacactccggtgacgtgttctccatacagtcaattctagtagtccacatggaagaattctcatcttaatttatctgattatctggtttttcaaattcaaaattccatactcaaaacaacacgtgttacaaatacagtggaaacctcacggtgtcattacgcgtaagcatggctgttaaggtggtgctagccatgtacctgccatattggcaatgccacagaaatcctgatacaactgtgtttgtatctgtactaggggaatttttattgcaattcccaaaacaaaggggggaaactcaactagaaaaagggaaagaaatcaatggaaaatcaatgcggcccattttttttaataaaaaaagggaagcgtcccggtagccgccagctcagcgcgcacgcagccatctcggggcagaaaaggcgcccccaccccacccgcagccgcaagtggaaagcagagagagagagaggcggccgcggcagcagtagcaggcatcattagctgctaatccctcaccccctctgtcgctaattaatccctcggatcgccgtatttactaggtttactaatcacgttttggcgatttagtcttctctcttctctctctctcgtctctctctcccccacctcttcttccctttcccccgcctccctctcctcttcgtcgtcacccgccgcctcccgctgaatccgcggcttgggaggagacgccggagtcgggggcgtggacgggggttggatctgcttgccttgatggtggcgattggagcgtgaattcgtgaggggggcgtggtggtggtggtggtggttatacggttttcggtttcgtgggcgggggagagatggcgccggtggaggatggccgcggggtggagttccccgtggggatgaaggtgctggtggtggacgacgaccctacatgcctcgccgtgctcaagaggatgctcctcgagtgccgctacgacggtgagcaagctctgctttcgcctctgcctctcccgcgttctctgtccttgtagtctatcgcttgctgtgctgcggttgtgtgggcgtgacatgattggttgcgtggaggcggttggtcggataagtttcgttgtttcggttagtgtttcgtgttccgatttgtctggggttggggaggagtcggctgctccgtgggttgatttgcttttccgtgaattctggggagtttttattttttttctgcacatctccgttattgggaatttttgcccttattgtcggttttctcaatctgggaatagattgttgagtttatatagattagtgattgtattggagatctgagcgagtttgcggtgtgaaatctgaaccgtgttgctaatatctaatcctgcctttttgtttgtgctaatataagcagtagtttttaagattcttaggccagtcacaatgggggtttcactggtgtgtcatgcacatttaataggggtaagactgaataaaaaatgattatttgcatgaaatggggatgagagagaaggaaagagtttcatcctggtgaaactcgtcagcgtcgtttccaagtcctcggtaacagagtgaaacccccgttgaggccgattcgtttcattcaccggatctcttgcgtccgcctccgccgtgcgacctccgcattctcccgcgccgcgccggattttgggtacaaatgatcccagcaacttgtatcaattaaatgctttgcttagtcttggaaacgtcaaagtgaaacccctccactgtggggattgtttcataaaagatttcatttgagagaagatggtataatattttgggtagccgtgcaatgacactagccattgtgactggccttatattctgtggattcatgcgggcttcgaattactattatatcatcccaacctaagacttgcaatatattgggaatatatcgtcgatgctcctagcttttgttccctatcccgataacattttgttatgcctaatgactgtgaattatcacccatagtaatgactgcaaattatcacggaaagtttagcttaggatcaggagtttattagaggcgctatgcatcacccacctaccccacagttaagttttgttgcaacaggaacgaatactccaaggatgcaatgcggcatatctaggttgcagcctatatagaatctttgttctgtaaagtgttgctattcctttctagtttctgttctgggcgccaatagttcacatatgcgcatcacagcttaggggaaataacaaataatataatgggtttattactgatctattttttcttattatattacagttgatttatttcctactataagttgaatgtgtgcagcatgagaaactgttggattttattccttatccagtcttctctattgaatgatctctgctttaaaacgaacgtgaaaagcattaggcatacccatggaggtattcagtattcataatgtaatgcaattgtacataaatatcatctgctgcttttatgccttcaaatacacttttaagtttatatcatgttgtgtgcagtactttttcgttgctttgttttgttttcactctgttgtttccgaaaattccactcgttcgtgggaagctaatatcgtaatttgcatctgcttcatttgtatgtctgaatagttattttgtttactttgttttttttgggcagcgacaacttgttctcaggctacaagagcattaactatgctgcgagagaacaggcgtggttttgatgttataattagcgatgttcatatgcctgatatggacggattcaggttacttgaacttgttggccttgagatggatctcccagttattagtaagtagattaatattctccaccctgcttgttaattctggtttgtcaaaggcattactgaaatctgttgataatattgcagtgatgtctgctgattcaaggacagatatcgttatgaaaggaataaaacatggagcatgtgactacttaattaaacccgtcagaatggaggagttgaagaacatctggcaacatgttataaggaaaaagtttaatgaaaacaaggagcatgagcattcaggtagcctagatgatacagatcgtaccagaccaaccaataacgataatgagtatgcttcatctgcaaatgatggagctgaaggtagctggaagtctcagaaaaagaaacgggataaagatgatgacgatggtgaattggaaagtggtgacccttcttctacatcaaagaaaccaagagttgtttggtcagttgaactccaccaacaatttgtaaacgcagttaatcatctggggatagacagtaagtttttcctacttttggcacttattttcatcaacagcaatgtttggtcggctgtacacttgctaatttatttttcttttggtgttgtttaccacatttgaacacctgaaccttgcaattacatcaaatctttccgctttcaagcttacacaaattttataattttctcttcagaagctgttcccaagaaaattttggagttgatgaatgttcctggtttaactagggaaaatgtcgccagccatttgcaggtttgattctggttttcatttttaatcacgggtcctttttcttgtatcatatttagcatggtgtggtggatgttatgtttactggcaccatggaatatctacccttttgtattatcctaattgttattattcgtatttattttacacatccttgctctacctgaatgtatctactctgatttaattagcagtagaaaccaactaaccaaaggacttgctcctggaatgatcttgtaattccagggacttgtacatacactattttagtgctgttacactcttttattgtagaatgaaaccataccaaattatagatcattcaaccagtgcagatggcaacgaatcgctctataatagatgtttgataataaacattgtttttctgttgttcttattgtgttgcctggggatcatccatttgaaggttttgtctacagagtaaaattccattggttaccttgtgcatttgtgctgcttgtctgttgagctccaatctccctgttaccttcatttttttaatatataccaggacctgtttaagtgcttagttcaatagtcatgatatacagtagcttagaccctgtttgaactcaggacgtccctaagttatcttgaaacaatgtcgtttttcttgggcatattgaagttgctgaaacagtaatgaagtatctgtttgctcttgctgtaacttccagttttttagttatgtaatgataatcatggtgatgcaatgagttttttttttctattttcagaagttcagattgtatctgaagaggattgctcagcatcatgccggaatagctaatccattctgcccgcctgcttctagtggtaaagtaggctcactgggaggacttgatttccaagctttggctgcctcaggtcagatccctcctcaagccctggccgccttgcaggatgagctcctagggcgacctacaaatagtttggtattgcctggaagggaccagtcatctttacggcttgctgcagtcaaaggaaacaagccccatggggagagagaaatagcatttggtcaacctatatacaagtgccagaataatgcatatggggcattccctcaaagcagtccagctgttggaggaatgccttcattttcagcttggcccaataacaaacttggtatggcagactcaaccggcacattgggaggcatgagtaattctcagaatagcaatatagtcttgcatgaattgcaacagcagccagatgccatgctgtcaggaacccttcactctctagatgtcaaaccttctgggatagttatgccttctcagtcattaaatactttctcagccagtgagggtctctcccctaatcaaaataccttgatgatacctgctcagtcatctggttttctagcggccatgcctccatccatgaagcatgaacctgttcttgcaacttctcaaccatcgagtagtctgttaggtggtattgatttggttaatcaagcttcaacaagtcagcccttaataagtgcccatggaggggggaatctttctggccttgtaaatcgtaatccaaatgtagtaccttctcaagggatcagtacttttcatactccaaataatccatatttggttagtccaaattctatgggaatgggctccaaacaaccacctggtgttcttaagacagaaaactctgacgctctgaaccatagctatggttatcttggtggtagcaacccccctatggactctggcttactctcttcacaatcaaaaaatacacagtttggtttactgggtcaggatgacatcactggtagctggtcgcctctgccgaatgttgacagttatggtaatactgttgggctaagccaccctgggtccagttcatctagttttcaaagttctaatgtggctcttgggaaattgcctgatcaagggcgaggaaagaatcatggatttgttggtaaaggtacttgcattccaagccgctttgcagtggatgagattgaatctccaactaacaacttgagtcacagcattggaagcagtggagatattatgagccctgatattttcggatttagtggacagatgtgaaggcttcttgaatttgtaagtaggtaggtacaatatcctaattttggtagcagatagctttggtgttcttaccccaaatattgctttaatgcattttgtcctctctataatgtgatcgtctctacctagtgatcccatcaattttggcatatcattcatgttgcttctttggacaatagtagaccttggttatgtttcaagctatgaacaccttgatggcttggttgctatatttattttacctcgcgcatttgttatggagtatttgatttgttatgcctatggtaatttagcgaactagcagtatgttcttcgtgagtcatgttcataattgatatttcaagttgactgtaccttttgccttttatgcaaaaacattgtttaattgtgcaattaccgaaacctcatttttctaatggcattgtttatttgtttatgcagggtaatcactggaaacaatttttagtgggttgatgaacggttgccgtgtttttcatttcatccttttttttttccttctgtaattggtttataaagggaataatttatgtgacagcatgtcgaatcttggtttatagaaggttgttcggtttaaacaactttggattatttagcctcatgtgacatagctcattttcctttgttcattttttgtgtacagttttctgattttgttgcaaatcttcttctctcactagttcttcagcttttctgttttccttgcgatcttccacttaaattgttaccaaattagctattcatccttgcatctcccaatgagcaggttgcaattcatttgctgtacatgttctaatcactcttactcttttcatggagaagatgttctccaagtgctcgttacttctcccatttgagttaccttgcgacatattctgcgcataatgatagctgctgaaatacaatgttttgcattccgtaaagttcaaatgtatcttaagtactactccgtccaaaaaaaaaaaaaacaaaccctagctacgaaccatatgttacgttcaagttcatagctaggattaggtttttttgggatagaagggtagaacaactccatttgcatgtacatttatccgagctagtgggtctggaccatttttatccgtcagttcatcatttaacagtctgttttctagtagtactctcttccattcagtatatgacatcgactgcatcagtatccatctaccaaccggaagtgaaatcagacatgcagatttgctccagatgaaggaccatgcattgattaagcagcagatttgtcgagatatagttcaacactagatcacgtgttgctcggagaaaaatatgataattgttgcggtaacccgagctttactagatcaataatactctcttactgatgacaaaccaattcatgatgctctaaccaaggactaaatcactactccgtacggtacaataccctgaagaatcataggaaatcatgtacacctaactagcaactacgacccatcaaacgctcaaaccggggggaactaaacgaggctctccggtgcaccgcactgcctaatcctttccatggcacgcctcgcgcgccctatgggtgctcattcgtcgtcgtcctccggggggctcgccgcccgagccagctcgttggagacggaggccaagccctgcatcagcctgacgacctccgccgtgtcgtcgaggtagtacttggccttgctcggcttgcggccgacggtgcaggcgaagacctccgccgtggccgccagcgactcgccgcaggtggagcttgtgatcatctggaacatttcctcgtcggagcggtcgtccccgatgcacagcacgaagtcggtgcacatgcccctctcctgcatgctcgccagcagccgccgcgccaccaggcccttgctcacgccctgccaatggcaaaggtatcaaacaccgcgaacgaccatggcgctcgatgctaacaacaacgaagatgacgaggattaggaggaggattcacctgtggcttgacctcaacggaatggccggtgctcttcaccgagacgggctcgttggcgagcacgctctcgaggtggtcgacgagctccttggcttggcatgaaccgaagtcagggtctgcgtcctcgtagttccagacgagcaccgtctccctgttctcgatgatcgagccgtccgtggtctccctgtacaggcacatcaccggctccgcgatctgcttccagctgcagtccgcggggggaatggaaatctcccactctgcatccctcgatgaccttcagaaacatcatacagatttgtcaaagtgttgaaaattgctcccctttgcaagaaacatcaaggcagaaaaggcgtttatagtgttgaaaggttttctcatttggccatttcaatgttactactgaaacatttccccatccatgtgacactatgttttactagtgcagatcacaatcatgtagtactacgcttttcattaagtaaaaagaatgtactaatcttttaattcatttctagtcatgaatcttgttatcttagaatcaggttagctagatggtccgtccacatgcacaattcggtattttgagtcatgaactgtccttgcaagaacacaaaccagagtaagtcacaggatcatacctcaggaagtaaccgtgctcagccgccaagccaaggttctcgcaggggaaccagtcatggagtgttcccttctcgaacccgctgcagaggaaaaccttgttgctcttgtccctgcacaagctggtcagcgtttcgacggaattggcgctcgggctcttgttgatcgcctgcggcatgagcgtgccgtcgtagtcgagcaggatggcgcgcgtcttcgccctccggtacgccatgacaatgtgctccatggcgagcttcctgaagctgaggtcaagcgacaccaccctgaaccgcagcccgaagccgatgccccagcaccgccgctgcgcgtgatccttgcacgtcctctcgaggtcctgcaggaagctggtcgcccagtagcccacgtcgtgggtgtccacgtagcggtagtgcttgtcgtggcgcatccgcttctccttctccggcagcacgagcgcgctctccatggcgtccgccacggcctcgatgttccacgggttcaccctcaccgcgccgctcagtgacggcgagcacccgatgaactcggacaccaccagcatgctcttcttctcctccggcttgctcggctgcagcatcctgtcgagcgcctcgttgccctgcctggacacgatgtactcgtaggggatcaggttcatgccgtcgcggaccccggtcaccaggcacacctcggcgacgacgtagtacgccacgcgctcgtagaactggagcggctcgtcgatgagcaccaccggctcgtacccgggcgcgccgtacgcctcgttgatccgccgcaccatggcgtacgtctcccccttcacctcgtcgacgtccttgccgcgagccgcgcgccgggttcgcgacctggacgagcaccagcttgccgcgccactcggggtgctgccgcagcagctcctccatggcgagcagcttgaggctgatccccttgaagatgtccatgtcgtcgacgcccagcatgacgaccctccccttcccggagtaagtcgccatcagctctgccaccttcgcctccgtctccggcaacgcgagcaccgtcttgagctgccccatgttcacccccaccgggaggatcttgatgctcaccgtccggccgtagtactccaagcagatgtggccacgcttggactcgtaggagagccccagcatccggccgcagcaggagaggaagtggcgcgcgtagtcgaaggtgtggaagccgatgaggtcggagttgagcagcgcgcgcaggagctcctcccggacggggagcgtcttgtagatctccgacgaggggaacggcgagtggaggaagaaaccgagcttgatgcggttgaagcgcttgcggaggaaggttgggagcaccatgaggtggtagtcgtgcacccacacgaagtcgtcgtccgggttgatcacctcgagcaccttgtccgcgaagatcttgttcgccgacacgtacgactgccacagcgcgcggtcgaagcggccgccgaggtcgggggagagcggcagcatgtagtggaacagcggccacagatgctgcttgcagaagccatggtagtagcgctcgcgatgtcggggggcaggaacgccggcacgcagttgtacgactcgaggagcgcctgcgcgacggcgtcctggtcggccagcggaatgtcgtcgcggaggcagccgatgtagatgaactccatggcgggggaggagcacgagtgctgaaggtgccgaagaaggaagtcctcgtcccagaaaaggtccacggctccgacggcgacgccgggcggtgagcccggataggaaggtggttggcgaccacgatggtgcgcgccccggcgacggggacggcgtcgagggggacagcggggagtcgtcgatgagccccgcggtggtcaccacccgcggcagccgccgccggagcgcgccgagcgccgccggcgccggcgcttggtccgccgcgccggtggccaggtccagcaggttggagtaggaccgagaaaccatggcttctatctggttcaaagttttggatcaaagatttgggctctcggttggggaagaacagttgctgctggggaatccaagaattgcgaagaactgaatccaaacagcgccgcaattggggtttaattagccaagaacagagccggtgtgttcggctcactgtttcttgcaggaaagttgcacactcgcactcgcagcagtggttttttttggcctttcgggagaggtggcacacgcacctggattcaacaagcctccaaatgccagtatcctcactgtgcccttctctttaatctcgaatcaatatagttgtggttataatacaagggagagaaccttctcttgcaaattggtgatggtggtgttcctttccaagttctagcttggttggtgcaagaacatgggaggcactgagaaacacagctcagatactgtctctgcggtaaaaatccaatccttttcagctaataatgaccatcaagatttgatctcctgcaaataaggcaccacccggcaagaagaaagaaggaaaaaaatatcaggtaaaagtgccagaagaactcaaatgaaaagaacccaaaaaggaatctgggagcctccgtgcctcacacaacagttgctccaaccccggacgatctagggctgctcatgtcgtgtgagagggagcgaggagggagcaagaaaaacagcttttaataggagaggaaggatgactcacctcatcaccagcatcatctcgttgagttgtccttggattgatcaaacgaccgggacaaaataatcgcatgggacagcaggagtgatggagactgcaaaatttttctcttcctctcttttttgtggttgatggatcaattcaaaggcgagcaagcgaagggaagtacaagaaaaggcgcaaaagagacgcgagattattcggagattgagaggggctttgcttggtttggttttggtggtggcgtttggatctttcggtggctcacagtcacagccacgcagctgctagattagttgaactgagcaagaaatttacggaggggaaagagagaccagtggccgttccaatcaatcaatttaatcgttttatagtaggacacagtgaaagagcgtgcaggtctaacactttatggatttgtttctcttgtggaatttgttccattatggttaggataattttcttaggacaatattccaatcactggaatttgtttcatagaatttgtttcggaggacaatatggcatggcatggaacaggtaaagaactgaaatagcaaactgaactgactccacccacttatcagagccaaatacaggctagattatatgctctctacccaacagagagaatattgcttcctaatttaagctgccggtagatgagatctatccatcaaggcacagtcgccatcctcatcagttcgcaccaaagggataaaaaggactgcattactaatctaggtttagcagcagggaatcttgaattcttcatcacccttaagtcttagggctagtttggtttgtgaactaaattgaccttaccaatttttgactatgtcaaattttagtaagttttggcatgacaaattttgggaaggcaaagttgtatttggattgaagccaaaatagcctaagttaactattgaaatggcctattttcgtaggcatgctaaaatttggcttcaaaacaaatagacactaaacattattaaaatttttaaatattggtaagtcaaatttagacctcaaaccaaaccagcccttaacctcacgccggtcaaaacaaggagataggagatgcctcacgcatttggttggagccaccggacaatcttttgtgcatcacgattgtttgtttaatcgaagtggattccgctctccaccgatgactcttctgcccattgaacactgacaaacctctagcctgcgtgaagatgccatgcgagcgagccgcgatcgggagagcgagcgcgaacggcaggggagagagcgagcggcgagcggcaacacgtggcgagcgcgggggccgcggctgtccgtgcggcggcaacagcgacggggccggcgtggcgcgctgcggtacgtccgcggcggcgagtccggtcgggccagtgcaccgggaaaaggcttgacaagtgggtgccaggcgcgcgctgttcttttttctcggggagtgcgatagatcgaggaagagtgacagtgactagtggtaaatgtcatactccatgttggggacggtatctgaggctgtgttcagtcccaaccaaagtttaaaatttggttgaaattagagacgatatgactgaaaagttgtgtatgtatgaaaggtttgatgtgatgaaaagttgaaaatttggaaaaaaaaatttggaactaaatacaccttgattgggtttccactttactgtcatccacgctggatctggcgttctccagaattgtctcccaaagagtacaattcacccattttaagccactcctcgtttaattatctcctcatcgtatatataatactccatatatcgcataacactctttatacgcccaaaatatattttaatttgtaccgaaaaatgatttattattgagtaaatttcacttcgggccaccttttgttacctatgtttcactttggaccaccctttaagcaatattttcactttggattgggtaaacttacatttgtttcactttggaccacccaactctcttctcaagcatatgaacgatctcgattacgctgtctcctactcgtcaatgaactaacacagctatatgtaagactatttcttcgacatattacaagttggatgtagatggataaaagagtgagggtggtccaatatgaaacaaaggtaaaaatatccggtccaaagtgaaaacattggttctaaggtggtccaaagcgaaacgttggtaataaaaggtgggccaaagtaaaattaaccctttattttaggatgtgtgcactaccagtctaccaccaagttattatgcagagaacactaccaccaagttacaggactgaaatgtgatgtcattggaatggtactcttcaatctatatagtacagtactgaaatgcagagtagccgcatcctgttctgccgagcctgtgacttgttgcggtgtcaactgggccacaaagataaggttccagc

SEQ ID NO: 36 - DNA, 8854 bp, Oryza sativa
tatttgcgacctcaccacacgatgattcgtcgacgaggaaacgtgacgagccgcgagcaggcgcggccccgtcacctcgccctcgtggcacgaacgataaccatcatctcatcaaaccgagaacgcgcgtcgtgatggccgagatgacccgcgggcaaacggcgcacgtactcctccggtcccgaccatccgactattagccgtgcgaaatccgtcgacgcgacggctgcggtgcttagcgctacgagatcttttttccatactccagttgcttccatgggcgtgcacgtctcgtcgctgcaacttgccatgtataactgcggccccgagtcatacggtttgctccactgcaactggtggtggctgtcggtgtggctgatcgcactgtagtactgtaacatctactacaggggagcaactttgatgtgaggactagtaaggggaaggcatgccacagtgccgcacgcaaagggcgttccactgataaggcacactgtacgtgcatcgtgtctactaggagtagaagtactgctattattatctgttattttcagcaggttgggcctcgttgtcaaaggagtcaggtagcgtatcgagtgtttaatctcctgatcgtgacgtctgctgttattaacttctatagctccagcaaccttggacgcaagccacccgcagataaaatttccaggtaaatatcgtgggtgtgacgagccgtgagatttgagaagactgtaaccgatgtcggtctcattggatcgctatattttgggcctttgaactgtcattggtcggtaacctcttgaggtctcaggtatgacttacggaacagtatcgttttcgctaaatagaagtacaagtgacttgcgtgttgcatgtcgaggttgacttatttatttacagatcactccaaatataggcccactaaatctcaattcagcagaatatatgcttcgacttttgcaacttaggtttggtacaaatccaattgaacgaattaagttagatactactccatccgttagcaaatactccctctgtactcgtaaagaaagtcgttttggacagcgacacgatctccaaaacacaattttgaatttttgtttctataaaaatatttattaaaaaatgaaatatgtatacttttattaaagtatttttcaagacaaatatattcatataatttttacattttcaaactcaacaacttgagagttattcatgatatatattcccaaggtttgacttaaacattgtcctaaatgactttctttatgagtacggaggaaatataagcattttagtagttttagataaaatcaccttgtaaaatgtcgtcgcgagattactttcagaaaatatcatactgaaagatgcaatcaccaatgagcaataaatgcagcgtttggatgaattgaaaaattagctctcccgttttaaaacatgactttgaatttttcttatcaaagtttatttttatattggtttttaaatcacaaaggacgtatatataaaagggtttacctagaaattattattcgtttgctaataaatcgtatggattataatcaatatatgattaattgatgaagactggtactagaaatatttacgtttttggataaattttaaacgataaaagtagttatatttctgaacgacggcaatatggcaatatgagtttcaaataattagatcacaaaacttcttgtgctactagtacttaacgccagggtttacgttaccatcggtaaccgcgcggttaccgtggttaccgggcttaccacggggtacggtaatataaataccacaataacctttttaaatttaaataaattttaaaattaatttgaatttttaataaattttgcatggttttttatggttaccgcggtaaccgtgcttgccgccggggcgcggtaaccccggccctggcggtttgggaaaccctgcttaccatctcaaacctttgagcagttgcacatgctaccactctcctctctagacttgcctacttgcctctagtcctccgttggtctgcgtgctctctttctaccaacaatccgctcaagatctcgcgcttctcacatgtggtcatactctacattttggcgcttcttgttactttatgttaatctcaagttctcaacctctactctcgcccatagcactagtgatgggttacgaatactggcctgtttgctttcgaccattgggctgccacccgatctttctgtatccccacgctgttcattttcatagaagggatgaatgcacgtgtttcttgagctttaaaccggtacgaattttattaaaaacaatctatgtattaaattatttaaattatttttaactataatagttattattaatttgtaacctagaataattctcacaaatcatcgtggtattctgtcacccagccatttagcgcaaaaaaaaaaaacttaacaccctcatattgctaatgaactttttattcgtaacccaaagctccgatctgataagagaaggctaacccgccccaatcgcaattgacatccaacaaatagagattttgctcatttttgggaaagaaacttaaagtaaattttgtttggcaaatcccttaatcaactatttattctataactacgagagtttagggaaaaaacagttaatataggatcaattttgtattgatggtacagaccctaaatgctttaatctggataagattcgcagcttgtacaacaactctcgcttttaatatttctaggtagcagatactcctacaaatgacttggttgatgtgcgggccgtgtcaacatatcagcttaaggaccaagctgccatttaattgggtcgatctcgtggcaattgattcttcatcacgcagaagaaagcgaggacacaggacactgtggctgtttttttgtaagcgtgatcaatgtttttggcacacacactgatctcgttccgtgtcaactcgtcatcaccaaccttgcttgccattttgcctacctagtacagctactaatcctaatcctttcgtgattatccaaatggtcgttgcagccaaagcttgcaacaaaccaggaatggctagctaaataatctggcaaactatccacaacttctcttgtgaaatgtagtctttgatctatacgcattcttcttaaataaattggtactaccatgcttttcgccttttcctctaaaaatatctcacactgtctctcctaaaggtgtgcttatattacttgtaggtaggcagttgcttgtcactatcttttcaattagatggaaatgattgggcaacgtaaagttcagttaaaaatcttcttttccgtcaagaaaaaagtaaaaaaaatgttttccgagacaaaatatataaagcattggtaaattttggccctttcaacatgaacagagatgaaactttctgttggctaaacacgtttggctgcacctcttgttcggaaggtctctaggataatacagtaatactcacccatttgttgagtacgcactacaacagctaccatatcatcaggtccaaatgatataatgcaacatccgacaattggtctaaaattagtgattagataaagatacattttgtgggggacaaagaaaggttgatgccttgttagtatcaacttggagaagattcattgaacctgggacggtgagagcaacgccccatcgaccagttgtagaatactgcatccgtttctaaatatttgacgccatttactttttaaaatatgtttaaccattcatcttatttaaaaaaaaattaagtaattattaattttgtttcctatcatttgattaattgttaaatatacttatatgtatacatatagttttacatatttcataaaaaaatttgaataatatgaacggttaaatatgtgctaaaaagttaacggtgtcgaatatttagaaacggagggggtactaatgataattaatggcagtatcgcttacattgaagttggcctcaaatggaagctgctgtttttctaaccatggccgctgcccgctggcccgcatcgtatgtaacgcggtcgcattgccggttgctagatcaacatagaaacaacagacgaacacatgatcgctttagcttctgcaaaaatactctcataaagtttctttaacctcgatgatcatgcaagatgacgaagcaaagccgcaaaagcgacagcatacatcttaagttcgttgatttactcaagtggcagtactaatcaagcaaagcttttggcaaccaccggcagagcaagaaaatacctgcataccatccttgcggatgcaacattttcctaggaaatttcacttaggaggttaggaacacattatatacagaggtctacttatggcactgatatataacttgtcttcgtactccctccggccccccccccccccctcaaaaaaaaatcacttatagagtttaaattttattccatagaaaactaacttctatcattctgtcaacccttaacacgtaaaatgtgaagttttattcatttaatattctttatctatctatcactcttacttttttttaataattaaagatattttagccattctcatttctcactaattctaccttgaaatatcatgaattattttttagacggagggagtacaagattaatataaagtagttagcatgataaccaactccacttggaattatttactcacatgaattgttccaaagggaatcaatcaaagttcagtaaagtcaaagtgaagtcgatgagttgatggtgaaactgccgcgttgcatcagcagctaccaacctgcacggttgcaggacctggcaggcgggccttggtttgttaattgttagtaaattaattactccaggtcattgtcttagtaaaaccatatatactcatgccactagcgtttgtttggctgtggatggtgacgaccgatgacgtgtcactggtgcacgggcccaccagccagggacgatgccgcctagtaaatcctagaatgttttataaaaaaccaagttagtacgggaatgggacatattggggctgattggttcagctggctgcagagttttgggatgcagctgtccagcccagccaatcggctgcagcctaaaattctacagcaactcttatgttttgaatgtgcacactgctgcagagggcagctgcttgttggttgccgttgtagttgatgcgagctggctgctgcagctctgcagcgctgcaacaacaatcacaagcgatcagccttattatatgtccaaatttatagtaatagaatgtgttatatctaattttagattcttttttataggacatagaaagtatacgccaatggccggccggcctgcctagtatacaatggaacggcgcatttgcgtcgtcttctccgacggcgttggtggacagaattgcaatgcgagagattcagctggaggcagttgcgttatccagcgcgcagtagcggaatacgtgctctgatgaagcaatataatagaagggttcatcagagatgcaacttgcaagatgctctctctatgatcctatccattctagggaccgtacgagataaggttgggattagtttcagtagaggtgtcatgtgccctgctgcatcttctgttcccaaggacgagaggagtaggacggagccgataagataatgaatattactactgcatctccttttcaaccaaacaaaaaaattctaaatctttgcttagggagtaatcaagcaatcatggtatcctcttgctggggaacgatggatggaccggtagcattgccattgtcagctctgatcagcaccggctactttgtccatctgtcttctttcaaaacgaacaacaacaacgaccagtctaaaaaaacgaacaacaacaacagaaaaaaaagcttgggcctttgtcctgtatactgcgaagtttattgggcctacattcttttatggcctgtttggggcaaaatgccaggctggttgggcctgttttggaagagaggatacaagggccttgtggctctctccggaagccagttactagttcaccaaggtccctcaatttaacatcaagatttttttaatattccttaatcacaaaacagaaatatatacacctaaactcacgtatgagcaagtttaatagtatagccaactactagctttaattcatctatagccaatctaatagctcatacatacaatagttacatactacactattaatacctgatcccacctgttatacacactacgtcttatagtccgtgctacagctggctataaatctgtagccagcttatagcctgctattatacctgctctaaaccatataactcatcgatgtcaccgttccagcgagagtgcctgagtctcgaggaaggagctgatggatgacaggactggatttttcacattttgatccttttaaaaaacttatttcgcaaatagacccctgaaaaaacttatcccagaaatggtcctttttggggcgccagagtggctggcgccgtcatccaacgggacggcgcctcctcctgccaccgtggcgcacgcgaaccgacgtggcaggaggagggcgccagcatggctggcgccgccgcctccattcctgtttctctgtatggagttgcaacggtgtcatttttattttattttttcggatgttttttcacactcaggatcacgatacaaccaaccacaaaaaaaatttaaactcgaactaccacttagctaagtctgaaaatatctagcataccacttagtctactttgcaccttcactcaaattagaccataactcctttagtaaaaccctttgatcagcatgttaaacataatgcactctaccactatataaattacttaatctaattcaaaatataaccacatgaaatgacatatataagttaaacagtacaaagagatgcaatttttttatttttatttcatttttttgatatttttttcacacttaggagaacataggaaccaaccgtataaaaaataaactcaaacggacaaaatatgtgacatgtagaattttccaaaactctaccgaaacggacaaaatatgccatctattaaaataggcgtaactttctcatacggactcggaatcaggcaaataatatatgaacggacatctacagaaaaagttacatccgattctcccccgctttgccgggttcggcgatattaaaacctccaaattccgcttgcaagattgtattttcgaggagagaagtttttcggtggagctttggaaaattccacatgccacatatttcgtccgtttgagtttattttttacgtggttggttcctgtgagttcctaagtgtgaaaaaaatataaaaaaaataaaataaaaataaaaaagttgcacatctctctcctctgcactagttcggagagaggagaggagaggagaggaaaaattctacatgtcatatattacgtccatttgaattcaatttttctatggttggtttttgtgtgtccctaagcgtgaaaaaaatatcaaacaaataaaacaaaaataaaaaatttcgaggggggcgccagccactctggcgcactccccctagccacctcagcatcgccccgccaagtcggcggtgggacggcgccaaagaggctggcgccgtcctgttgaacgacggcggcagccactctggcgccccaaaaaggaccatttttgggataagtttttctagggatctacttgcgaaataagtttttcaaaaggatcaaaatgtgaaaaatccaggatgacaggaaggggaagaagggtggtggtcggcgagaggcggctctccggtgaggaccagatcggcgtcggcgacggcggagagggataacgcagttagcgccatcaaccgttgcgatcgtggcccagatggaggagagcaaaagctggacctttctgaccgttcgatcaacgttagcaacggccgcgattaaccaaacggcaaagggaatttcgcaacggagccctgatttaactggagcttatcctcagttgcactaatcccatctggccgctacgctttccttcctcttgctccgcgcctccgccgacgagctccggtgaggagcggcggcgaccggcagccggcagccgagacagacagcagtgaaggattgccatcaacacgaaccaactggacatcgaaatgctcttgcgcggcgaagccggagaccagccgtcggccaaggtcttccgccgcttcgtccatgacgccatcgagaggtgagattctaatcctgaatgccccccaacatcaagtactctctcaccgttgttagtactaacgattttgctcaaatgcgcagaccggacgagttcatattgcatcctgccgctccgctgccaccgtccgtggagattgtccgcgtcatggatgtgatatccaattttgtaccccacttcctcttgaaatttgcagcatctgagtaggtatggagggagtgatgcgttttttgcgattgatgatttggtcaggtttactcactgattcagcagagctgtagaggaacacgcaatcagatatgcaaggctgtgtttagttcagcgcaaagtttagattttggttaaaattaaaaatgatgtgactgaaaagttgtgtgtgtatgacatgttgatgtgatggaaaaggactgaagtttggatccaaactttggatctaaacacagcctaaaatgcatggtgcaatgaatctgccatggtggtaagctgtgaaacctggatgctctggtctctggaacctaaattatatactccctccgtcctatattataagggattttgagtttttgttttcaacgtttgaccactcgtcttgattaaaaaat

SEQ ID NO: 37 - DNA, 567 bp, Oryza sativa
aaggtcctccttttatatcttaaggggataccacatgcaccatttctctcttttttgtggggacttaccccaccttttcataaacagacggagacttgtatggttgctgtccgaatgaccttctgatgagacgggccacaactacctccacttccgccggaagcaggcgcgacgtggaatcgtggctgtctgctgacgacatgaccggtatcagaccagtcacgtcggtcattcttgtccaccacgtgtcagcttagcaacctacatgctcacccttcttcacacaacatcttgcctgtaatggttaggatgaagcctggcatatatctgaccaggactaacgtgccatctctgggaggtaacacgctagctccagctggggacgagcgcctagaagccctcgtcctgacgggatggggcgaggcgtgcgtcagatcgcctgttgccacctaacccgcgatctgaccggtctgtgactggtcacagaccggataaacgagtgcactgcactgcgttacatacggcgtgacacgctcagcccaaccgcaataaatgtggttaggtgag

SEQ ID NO: 38 - DNA, 684 bp, Oryza sativa
tctagtagtagcaactaaagtgaggtcgcagaatattatgcctaactagcgatggttttgtcatagtcacgtcccttttttttatctaatcattctcttatttttatgccttactctctccgtttcaggttataagatgttttgactttggtcaaaattaaactgcttcaaatttgacaaagtttatagacaaatatagtaatatttacattaccaaattagttttcttaaattaataattaaatatattttataataactttatcttggttcgaaaatattactattcttttctataaatttgattaaacttaaagcagtttgactttgactaaagtcaaaacatcttataagttgaaatgtagggagtattagttagaaaaccaaaaattttgcgattttgctaaatatttatttacagatttttttttggctaaaaatcactcggtattttttaccgtccgattcattgatgatttctgtgcttcgttattagccgcacagtttctttgcgtgtcctctttccttttccctgtgttgtatgcacatatttattcgttcactacccgtgattggttggctatcgtttgagagatagaagatgcatattctctatttactagctgctatatgactatgcgaatggcttctgctgttcttttgtgagactagcatactactttt

SEQ ID NO: 39 - DNA, 2292 bp, Oryza sativa
  unsure (1)..(2292): unsure at all n locations
aatcggctccggaggagcataactaaaagcaggagttgggaagtgatgaacattgctgtactgcactggaaaatcaggagactgctttccaggtactccaaatccaagtggattggaatagaagtggctaggctgggcatactgcatgtatccacttgctggagcagcccagggatggttgtggagccccattgtggctgaagaatgtgtaggtacatgcatgctttggtgatgcaacagctgatcttggaaagggggtatgttgaatcccaatctgtcgttgtgaggccggtgcatggcttttggttggtattctctgaaaccttttcctgcacaagcctcaagaaggaccgtgaaacggtctttgttgatggagcttcctcgatgctgttgactctctctggagattcctcagagtcagatgatgatgattcttgatgttgagcgctcaaagaagtcacactgcttgtgctgctttctctatctgcttcactcgtacatgaagacaagccatcaggctggtagagttcatcatcagctcttcatcatgcccagaaccttcatcttttgttgagtagcagtcttgtttatccaccataatagtaccaccgcaagaagtagcttgatttttctcattgttttcacatggtcgatctgtttctgatttacagatatccctggatctttcagaagattgacttagtggctcatgccntgcgtcaaaatttgggcattcactgctatcttgttccactaatttggttggatcaacattacaaactgctcccgacccattgtttttgttgtctaacaaattcttcttttgagaatccattggttccatacttgctttggagcaccatttttctgctgagtattaccagtcggctttcttttgacacaataaagttgtccaaaggatagcacctgcggtactgcaccctagctctctcaactcctgtttttcttgccatctttgtctccctacctgatccagttgatgatgaagaacagctgtcatttattacatagtcatcacgagggtcacagctgaaggaaatgtagttgtgtctatcccttgttctgttatttgtagtaaacactgagttacaacttcgggcactatgtcttgtcctttcctttgattgccactgaaaatcaccaatgcttccattttcatctccgcactcatcatagcaacaagaggactgatcttgagggaaatcttttctcagcctcagattccatcttgatgattttgattgtccagatgtgaaaaggtcactgctatttgttcgagcaaattctgtcaatgtattgcagtagtccatattgttttgcacactaatctccctgcaagctgtttgatcaacaaaggtgtcaggggagcaaagatccaccactgtggaattatcttcttcttcactagctgaatctctagagtcaggagtatttgttgattcatcattagtagatgttgagttctgagagttgaacatgaattatcattgatgatttcaacccaaggatttctttccctttatccctctctttttctttcagcctctcttttctcctgtgtttcttctctctctcttttgttctcctcctcatcctgcgctcttgttcatcttgcttttctttctcttcttcttcaagaagcttgttctgcaagaagtgtgtcaacgaagttgatgtgccccaaaatcatggatgatatgaaatattttatgacttctatgcaatcaccacaagtacctgcttttccaacgtaataatttctttgcatgctacatggactcgctcttccaaaagttctaatgcaagagacacaaaaatactgtgtgcattttgccgagctgtaccttctctgaatgccttctcgacctgcaattaacccatatttagcatatgcttaagcttgtaacataagcatctgaaattttagcaaaaccctcaataaataaatcttgatttgatcttagtaactacagtaaccactactagtaatattacaggataaaagaatatggatccccttatgtacatatctctgtggagaatcgttctttaatttttttattgcattaaatatcttgaataataaaaaaagaaaattgactttgatatgtggaggtccagaactagattggcatgtacttaatggctacaacagtggctagaaaacacaacctcagaagtgactaaagtgactgacaatgctatgatgggggcaagacgggtagaaacaagaacaacaaaaaacaacttttattcatgaaccttaggtaa

SEQ ID NO: 40 - DNA, 532 bp, Oryza sativa
  unsure (1)..(532): unsure at all n locations
tccagctgttgatgcttatcagaagattctctcgtccattcctgagttctccgggtttggaaggctcttcaaggtctgtagcttctataccattaatgattttgattgagtacacatgctaaacccctctctttttccccagtcctcagaacctgtggagctgacagaggcggagactgaatatgcgattaatgtggttaagcacatatacagtagccatgttgtgttgcagtacaactgtacaaacactatacccgaacaactgctagaaaatgtaagcagcaaacaattaagtacaattaaatatgttcttggaggcacagctgtcaactcacactgaagattttttttcatatatgtatgttgattcttgtaggtgactgtttatgttgatgccactgatgctgaggaattttcagaagtttgttcaaagccacttagaagtttgccttatgattcacctgngcaaatttttgttgcttttgaaaagccagaacatgttcctgctactgggaaattttcaaatgtgctg

SEQ ID NO: 41 - DNA, 667 bp, Oryza sativa
tggccgaggacccttcccgcgctgacccacgcaccatggggctggtcaccttcctactcccactcctctgactccttctggacgccgacgcgcgccatagcttcaagagccggcgcggggtggaccaaggagtctcgagccagtccttgtggtggagtcaagctcgagtggtcaggcggaagcttgccgcccctcaccggacaagctcgccgccggaccatcgtccacgagcgagggcacagcccgagtaggactagaagggcatttcgggtaaaactacaggaccattgtgtacccaccgtccaatcccaccagctcctattaggcgaaagagctacttttgatagagcagatacacttcactaggggtaaatgtaccatgctttaagattcgtgcgcacacgtgtagggtgcagatcgtgggtgcatatgaacccacgtgcagattatccaactcctataaataatgactgcctcatgtcatacgttaaagtttaactgcatgctatgtacctgggggggagcaaggcgagtgtgttagaggctgtatcaggtgttatttaatacgtagcaccttataacttattagatgaggcagtaatattttactcagccctcactagagtggtgacaggcgaattagaagagagatgactcagtgattttt

SEQ ID NO: 42 - DNA, 507 bp, Oryza sativa
tgaattagaacctgtgaagaacaagccattagtcaactggaggagagtaccaatctaaatcctctttaagtgaagatgcatgtactctcatgagctgcaaggcaggttggctatatgccttaatgagttctattagctttaattagcaaagatgctatcctgtagagcattcttaaaagaacacacctttgtgagcttgactattggttgtactcttgatattttaggtgaatcttctagtaagcttactaagagaccaatgagtatgacttatacactctacccgaggagcagtctactgacggtctagtaccagataagactctgtgtgaaacttgcttgcacaagacttgcaattcaaggcatagtccattgttcaagttgtgagtaagtgtagcttgaagttctaggtggatgttcaatcttaatcggtctccatcaacagttggtatataaacagtacattggaaaaaggcaaatctcagtaggattttgagatttggtggg

SEQ ID NO: 43 - DNA, 1304 bp, Oryza sativa
  unsure (1)..(1304): unsure at all n locations
aatatctccatcctggaattttctcttacacatatatgcaccatcgtcaaagaggattgccagaaacccaccttgcaagcatagcaaggcattgctttggcatgtattctggagcagtatgtccaccaccctacacaaattaacaccaaaatactctttttagttactgagggcctgttcactttgatgccattttcaaccatattatttttttaaagttataaaaaaaatatctacgtttagtttgttgccaaatttggtcaatacataagaaattctgccaaaattttgacaatattgccatcttaccagaattttagtattgccaaaacttgataatatttattttggctacaatctaaacagaccctagatcatgcgtaccaagatattaatgtgttgcatcccttgaaggaagctaaaacgctggcacataccttgacagttgcgaatgtgaggttattggagtatgaccttatatatctgcacataagacagacggataatatatctggtcagagacagacacagtactcgcacacgtactcaattaatttgatggtatcgatgaatactgtgtgtcctcaccctgcaacttgtccatccacaaaccatggtctccactcatccacgacagagaaattcagagatctaatccaggcttgcgtgccgatgaaagggataatcatgtcatgatcaccactgtaaattaggcttctgtagcctctagttgtcaaatccagatggtatcttactgaacttttgatgtcataagtgtacagaatggcgtagatgcatctttgccacgaaggaactgttccctgcattgcagaatgaatacagnggatcattgcattgtgttgtgttatgctgtgtgacagaatgatcgaacctgcatgcaaattactgttcaattgaatgatgatgaacagatgtgtatatacctggtgaattccaagggcctctcttactgtatcattgttggcccatattctggacattgtatattctgccgtctgcatgacatgaagaaataccaaatggtaagatttggtcggctaaccaatactacccactaacatatactctcacagtcccatattataagatattttgagtgtatattatgggacggaggatatattttaattagataggatatattagtacaaggctgttcaaattttttgggaccggaggggtagcttgtactccaagaagatttgataaagaaaataattagggtccactgactctgcattctgaagaaatctcagacaagtgaaagtcttggagttggagta

SEQ ID NO: 44 - DNA, 1217 bp, Oryza sativa
catgattctcaatggtttcaatggtgaacctacggaggcgaaaggtatctttttgatggagcttaccgtgtgaaacaagacgttgccaaccgctttcttcatcgtcgatgtgcaaggtaactacaatgttattttgggtcattgttggatccatgccaattgttgtgtgccttctaccttgcatcaatgtttaattcgatgggacggtgatgatattgaaattgttcaagcggatatgtcggccaaagttgcaatggccaatgcgacattagagtggcgtcatgggaatattcaatgcttatcggggatggatctttctagctatgattttattagtattttcgatggcaaatttgtacctatctctgtaaagccagctagtgtagcacggtgtcaggtcctgaaactaatgattcggaaaccgacatgtttaaactgtatcaagccctggattagtaaattggtacatgttcaacaatctggatcttcattgcatacgtttgaataagactccaaaggatatattattacaaaatatatgggtatttaaaaacttgtggctaactaatacagcaaaagctatagaatgacttaactctaatgtttggctatagacctaaaccatctatctaatctagacttgagaattaagttagaatgaaactaacttatgtgattgaactcccagctttggcaagaactccaaaatgactctgaaaaaggtggggttgaagcaagggtgagtacaacgtactcagcaagctattatattcaatatgaatgtatgaaatagtagcatttaagtagggctagatttaattgcagaaagcagaggatgtagaagaagaaagcctgtaatgactttaatgcaacagtatttagtaaaatcttgaattaggtttctaatcaaataccatatgagtcccggtactcaattccgtgagcacgactattcgaatagtttcatgaatattctactgcagtagatgtacgctttacccgcagtccacgacttgccaattcattaggttagtcatggcctattattaggttattaacaattgtggcacttggtccatgaactctagtccccatgcgctctgaacgtaacgttatcagcagcgagaggagttctggcgttcccggggtctttagagagaactgatcgtatgacaccatgtcatcgcaatcagggttcacaaacagactagtcatca

SEQ ID NO: 45 - DNA, 1505 bp, Oryza sativa
ccgggctgctctccgagcggatgaagtagtaaagaggcgcacgccggcgatgcggtccacctccacgtacccggtctccagctcgaaggggagcgccccatcgaacccggggagatgcctcaccactctcctgctgctgctgctgctgctattgcttctctctctcgcagacaggcagctgcaggtgaccaggagaagaagaagcagcagcagccgccgccgtgttaccgccgcctccgtacatagatgcatcgagaagtagatagcttcacctatttcttgtccttgtccttcatccctcacgtttttgtttgtgagatgatcgatcccttcattttggagagcgaatatgattgattgcctagctagcttacctgtctgtcctcttcgctcagcagtacaatatctagtaatcttctattcttctttttccatgctgctcctgcctccttaattacttgtcttccacttgctaattattgttgcatcgttgacccaaatcagattgatatggcggcttgtttggtaacttgatgaaaagggattggaagtttatcgaggaaattgatatgagattaagataggattcgatttttaattccaatacattgtttggtagaggtgatgaaaattgatagggagtttagttagagattatatcattaataaaaacgcatggctgagatttgcttagataaaatagaggaggaattccctcccaattacctgcccctacccaggtattaaaaagtagggagttccttcctcaattcctcatccccatcccaccaaagttcccatatctcccaaccaaacaaaacacttaatagtctcatccctctaaactcccaatcccttctaaaaactccctccaactaaacaggccgtgggtagatggatgggatgtgtacgatcacgagggcattattatttttttgggttttgctatttaactttttatcaattttttaaggtacaaaattaataaaaattctgaatctcagaaatttatttgtcttttcctcccttgcatgtttctaaaagaaacgagaaaaagagtatatatccttgacttggtgggagtgggaacgtgacgtagcatcgttcgatgccactaattaattaagcttgcccagcacagtagacgccgcagcccgcactcttataattaaaggtctgttcagacagtcaaaataaacctcattaaatttggataaaaccaaaattttagtaagtcagtaatattaccaaaattttgacaggattttttttatatatttaccaaatttagcaacaaactaaacgcagacattttttataacttttcaggaaaaatggtcaaagtagcatgttgaagaccgtatcgaagtctaaaaatatttatttaactcttttttaaaaaaatcatttaaacaatatagcgtataatatattgatttatatttttcatatagcagataatatatttttttgaaaccgagcagataatatttttccttgtcata

SEQ ID NO: 46 - DNA, 677 bp, Oryza sativa
gtagtttatcaataatgcacccggccacaattttatcgagtaagacacacttaaggagttcgagttccttagccatggcatgtatttcatgagcctgctcaagtacaaaacgtttgtcaaccatcctgtagtcatgaaactgctccatgacgtacagatcattgctagcatcagtagcaccgaatttggcagtgcatcccacaactccttagcgtcagtcatgtgcatatacacctcgactagacgatcgataagaacgctacgaatccatcccacaaagagagtagtggtcttctcgaattctttctgcttttcagcaatgagaactccttcaggtttgccattattaatctagaagcatttcatagccatcaaccacagagtaaccctgatcttccatctcttgaagtgcacaccgatgaatttatccggccttagagcatgggaaaaactagtcatagtaaaaccacaatgcctataataaggtttttggattgttgaaaatattagcacataattatttcatttattccataaataaatcatgacattgcaaatgacataatcacatcatacgatctacacatgtaaactagacagtaaagtatgaacagattgaatatgcggaatatgtcgaatgcataccgagggttttggaaaactggctgctcagcagg

SEQ ID NO: 47 - DNA, 617 bp, Oryza sativa
tcctccgacgggttcaaagtcaagcagggcgaaacaagctctcacccaaatgggaaggaccgtacacgatcacacaagttctgcggccaggcgcattcaaaattgcagacggcgatggtcgcgagttgtcaaattcctggaacattgatcaattacgtaaattctatgtataagttaatagtatccatgcttgtaagacatcttacagcttcaataaagcctatttttaggtacagactacaatcaaagtgttccttcccgatgatcccttacccagatgacacctagcgttgaaacctatcctcatgtccctttacgccgtcttgacaaggcctccgaggaacctaagggaacttcggctggggatgcccagagccgataaggccttgtcggatcctgtagagacgaaagaccatgtaagatctggtcgtgtaagagttctcgccgtgcgtattaaccaagccgtgtaatcaaaaataaactttccaacttcacagctgggggctaggattagtgcttgttcaatcgaggcaggtcaaaggtacaagagccttatctcccgagaagaattctccgatgacaaggctgggggctagggagagtgtataagtcaaacg

SEQ ID NO: 48 - DNA, 509 bp, Oryza sativa
tcttcgcgctcccaagtagcttcttcttcggcgtggttgctccactgaaccttgcaaaaacgggttactcggttcctggtcctgcgctccatggtgtccaggattttcactggcctctccacataggtcaagtcttcgcgaacttcaatttgctctgaatcggcctgctcggatggcattcgaagacatttcttgagttgcgacacatggaacacatcatgcacgttacccaaggaggcgggcaactccagttggtaagcaacttctccacgtcgagcgatgatacggaagggacccacataccgaggtgcgagcttcccttttgtctgaacctgtgcacacctcgcaatggcgtgacccgaagatacacaaagtcatccaccgcgaattccagatcacggcgacggttatctgcataacttttctgccgagactgtgccacctttagattatcccgaatgattctgactttagcttcagcttctctcaggatatcagtcccgaacact

SEQ ID NO: 49 - DNA, 1838 bp, Oryza sativa
  unsure (1)..(1838): unsure at all n locations
accattagacatagacatcaactaagcaggacaatgatagcaagaaaaagaagttatagaaaaatcanatttgatcagcttggatttttnttcgttttttccattctacctagataatgcaggtgtagggctggaaaacatggtttttcaacagtgaaatcatgatctgggcaatggggaaagcaagccttacaaatcctaaaaagcagagtagcagagggttacgtaacctgtatgtatattcaaaggttaaaaaatattcagaaatataattgttgttgacaaacacaggttagcattaacggtacctattcttgattaaattctcaaagttacccaaagttgttgtattcatgaaattgggatttgtagtatgtaatgtatgagtttcttcattgctactttggggttaccggcatgcaacatactattatgccctgaaaatttcaggttttcagttagccctatagttgtcatgctcaacatagttttatccagttaagactgagttattaccattggctgaattcgtcaagaaatatatggatagctatacttatcgggctttctcatagcatgtgcagtaaaccagaatatgaaaaacctccttcaaagacaaaatccctgtggtgctgaactatttataacagcaacattatgagaaaaaaacagtgatcgacaaatcgacacatacatttcttaagggttgaacacaaatgaggtgttacatttcctaattgctgacatatatacttgatcctaacatgtttgacaattcttaagggttgaacacaaattcagttactacaacagaaattcagaactcatgtgaatcctcctgaacttggatgcattttgatttttgaaatgtattatcaaatttcataatagcattagcatggggagagaactcatgtgagtactcctgaacttgaggtaaaaggaaatgcaggagtcatatattacaaattaatgtcctctcttgaggtgctaaactgtcagatatttttccagaacacagcaatatataaatttgaattcctcagattacctcatagcagcctagcatgtagccttagatttaataaatctccaattgcttcagctggaaccacaagttgaaactacaatgcagaaaacaaacaagtcataatagttgcttgaagtgcttgaagatcatactatttattcacaaggaacatgatgttctgaaattaatgtgaatatcaactttcctaagctgttctcagagttaatctcagaatcttatttttaactctcattagtgaagtgattaacaggaatgtgaagtgattaacatgaagaaaatttgattcagaaataaatcaagaaacggttgctgattgaaaaacataagaggaaatttgattcagaaataaatcaaatggttgttgattgaaaaacaaaagaggaagatggtagcagaagcaatgccgcctacctgtggtgaggtagggattagacacggagtcggcgtgggaagaaggtggcgtagacctgctgcggcgaccgttcagcggggaaatccctctgcagtgcaacgccgacctgcggggcgacggcgattgacggcgacctgccgggacggcggttagctcgccggtgggttccgctgcggggttgctgcgtgaggcgcgcagcgggggcggcggatggggaagcgacgtggcgaggaagggatggggacgccggggaggcaagcaggcggggcggcagatggggaagtggcgcggcgaggaggggatggggacgtgggggagggaggcagcacagccaagacaggggcgtgacggcggcgtcgtagatgagagcgagca

SEQ ID NO: 50 - DNA, 566 bp, Oryza sativa
cgccttggttaaatgggaggcaatgtcggtttgggaaccgacctaggcggtcaagggagagggctagcgctcggcggtcacggccaaaacggcgataaggggggggggatgacgccggcgggagagaaaagggaaaaaggagaagggaaagggggcttgccccttgccactttggggaaaaggaggagggagagagggcgacgcggcagagggaggaggagctctgcctccgtcccttggaggctagcacgcggagtggcggggtcgggttgtgacgacggcgatgaccacgggggcggtgtggagcggaacggcgacacgggctacaggcgcatacaagcgcggcagaggctgacggcggcggcgactggccggtcggccaccatggcgcgcgcgcgcgggaaggaacggcgtgcggcgacgatttggcggcgttggcgggaagcggcagcgagggcggagggcgctcggttcggcgcggcccacacgcacgcgcgcgcggcacacgggcagagcgggggagagagagagagatggggagggagggagagatggggagggaggga

SEQ ID NO: 51 - DNA, 614 bp, Oryza sativa
gaactgtgctatgctgtcatagcatcttataagcagcaaaaagttggcattattggtttccggtagtatgttcctttctaattcctttaggataatcatgtcaaaggcactcaaacaaaatcatgttttgcaaaactaccatagtatttttctgcacaaaactggttcagctgctcacattaaagagcactaaaatccagggttaatttggagttaggtgcccaattgcattaattgttggattcaacagctttattttttttcctcatgtatgcagcacagctgcagcatggtcaattggagcatgctgatggaaatggagactgggttttaactatatttaaagctctgtcactggtaagtatatttttttatagatttttttgtggcatacttgttaataagcttaaatttattcatagttcgttttccgggtccctttaatgatagtccttttttttggttgcttcacctaatgttcgtctgaaacgcatcttctacgcttctagcacaatggtcttcatctgtgtttctagttaaggttgactatggtacatgtgtttgtattttgttctcattacaaatctatcatcgtacaagtaggaagtgcaaca

SEQ ID NO: 52 - DNA, 1226 bp, Oryza sativa
cctgcaatgccaacaaaaaattgatgtttaagcctaggttgaacaccattcagccaattaccaaaaagattagtaatgctagtaggcggatggatcccaaaggttatagacacagcattccagattaatctaaccaaatgacaatcaataaaaagatgttgtatcgtttcattagaatcacaaaagaacacttagtgctacctttccaccttcttttttgcaagattatcttttgttagagtaacccctttttttaagtaccacaagaaaattttaatcctcaatggaattctaagccccaaaggaaagatttccttggaattactccgttaaaaatgagagctctgtacatggagttgacggtaaatatttcctttttattggctttccacacaaagacatcattttgttctgtaagttgagttgacataacttttgagaccaagttataccaagctgctaggttatcccctacaatagctcttctgaaaaaaacgtttaggggcaccttttccaacacttcagccaccattacattttttttcctgactagattatacaacgaaggatacatcttaaaaagaggaatcaccactccaacaatcctcccaaaatctcagttgtgtgccattacctacttgaaaagcgccacaagaaagaaaagagttcttaacctccatcagccctgcccaaaaatgagaatcccctggttgtttttctacaagtgtaattgttttcttagccaagtattttttcctaagtagtttttgccaaaccccatcctcattgataagcttatacaaccatttactcagcaaacatttattctgcacatttagattctgtattccaagacccccacaatccttaggtgtacaaatcacactccatctcgccaacctatattttcttttatgtccatcactttgccaaaagaatctagacctgtagtagtctagcttcttgaggatacctttaggtacctcaaagaaggacaacataaacatggctaggctactcaacaccgaattaatcaacacaagccttcctcctactgagagacatttccctttccaactactcaacttcctctggaacctctcctcgataatttgccaatccttattagagagcttcttgtggtgcataggaattcctaggtatctaaatgggtaagtcccagatctacacccaaaaagcatgacatactcattctctgcaaattt

SEQ ID NO: 53 - DNA, 1768 bp, Oryza sativa
gtccgcggcttgcgtagttgacagtgagaggagagagagagagaggagaagagtaagagagagaagagagagaggaatagtggaatatgagtatgacaggtgggtcctacatttttttaataaataaaatgctgactggactgccacgcgtatgccatgtagaccaaaaccatcgtggattgggtcgaggggggtaattcgtccggtttgcatagttggggggtgaagaatgtccggttttatggttcagaggggtaatttggacgaccgccatagttcgtgggggtaatttgtactttttttcctattagtaaacgtgggtaaccgaggaggtgtaaggctccaaatggtctgtttctgtacttgtttttgctacattcgcttcctgcacattaccagatcgatttattattcatttatgtgcttgcgattctcctcccatcttttcctcatgcagctcaccaagcatccttgtacaatgtccgatggtcccacgattcacagggaatatatccacggtacaaattctggtctcaatttgccaaaaagctctactagaccgagcatggctggtcctagttcatccatggggcacacttctatccaatcttgttggacaaccatgtgcatcgtcaatctggtggttgtaatccattctttcctcttagccatcctctgtttttacccctcctctcctttcatcctgtgcctgttctccgcacatcttgcgccctgctgcccccttttctgcagggtgaaatacacacgagcggatgactgtccaatggcaaaagccatctcgattagcagatcgatcgaacatggataatgcatcgcctggacgcagccaactgccgtccatttttcttttgtttcctgcctccagttccagatctgattggcgctcggcaccatgtttcagtcctcacctgacctgctgatggtttctggagtggttttcctgtttgatccactcggatctcagcgcccggttgggcttttgtcagtttttcaacatgttacccctagaggctgtgactgtatattagtttatacttagttcttcatgacaattttctttaactaaaacaattaccaaatgataattcaatatgaattactctccccagtatgaccaatcctagctgtggtgttcttatatgttgggacatctgtggcaccccattacaatagcacgggtcgcacgaagaatacaaattcgttcctgcatcagttaatttctttttagatggtagcataagttgtctatgacactactgttcgtatcacatgaattgggattagaagtgttggagaaaaacagtgcatgtggaattgtagttaattgacaaggtttttgatggggataggttggacaaaatgaggagtatcttggttgacctttcttcataaaaataatacttgccatctagtaaactaaaactgttgggaagtagattccttggccaattgagacaagccagtggtgcttggaagatgcaagattctgcacagaaaaatgggttgcaaacaacaatttgagttctttgattcaaacaaatagacataaactagctaatttgttctttgggtccccacaaaaaaaaattatttgggacaacaatgttactcttgccaccttggcaactggcatgacttctgtgagcctaaagggtcatcaatctggagatctcatgcccgaccctaacaactgattgccctcatatgaacatatgaatgattgtaggcttgttgcataatatatcaa

SEQ ID NO: 54 - DNA, 1535 bp, Oryza sativa
tttcttttagctgtttcactgctcatgtggtttctgtaatttttcaattgaaggccaatgagcaaaatagtatttggagatatgtcacgactgttctgcttatcaatctccaataaattagtgatgcaatgtaaatttttgttcctagctcttgtgatccacgccatctgtaattttctaccacatgataatcgtgaacttttaaaattggtaatttacttcttaatttttagcaaattcatgtcgttgctttaaggacgaattcttgaaattcttcaggttatttttgacattttcttacagtagatatatcatttttcactgtggcgtgtgattttttttaccagatggcgtgtaattttcattcttcattcgtagattattgagctgttacttctaataagtaggagatttctgtaacaaaatgccatgaatacgggatgcctaatctgtgtagagttcatcgaatactttggtcattgcaaccttcatgtttcgtttgttgcgattggctgttgtgacaggcatttagtgccgtggtttatttttatttttatttttatttttttttcagttcagttccagcatagcattcatgctatagggctgagcggatcacagtcgtatcactgaccggtgattgcgctccagtgatgcatagtaagagcttgatccgttggtctaattagtcaatgccaaaaatcaaaaattgaattttcatatttaattttaaagttaattttaagaaatttttggcacagttttttatattgacttttaagtcactaagaacatttctataaaaagtttatctataaattaattcttgttctttaacaagctgtttttatctataaaagtacgaattaccctctgaactatcgtggtggtccgaattaccccccgaaccacaaaaccagacatattagacctcaaactattgaaactggataaattacccccctcactcaatatgaagtggtattgatcctacgtggcatatacatggcgttgaggtggaaatccgatcaacattttcttttttaaaaatggtgggggccacctgtaagacctcatcttcccatcttcctccctctctctctcatcatcttccacgcggtcttggttcccgacggcgtgcggccacggctgcgcggattagacgacccccggcgtgcccaccgccttccaggaccccgacggcgtggtccagctcggtcgcccgccccgcacctcccgctcctgccgcgggcagaagtagaaccacggctccccctcctcgccgctgctgcccagcatctcgtggtgaatctctgcaggtgtatacaggtgacgcggcgctcgcgcgacgacgtacgacgaacgcaatgcacacgtgtgtgctggtacctgagagctgcaacgggtcgacggagtatatgtcgaagacggggatgacgcactcgatgtcgtcgtggaggccgtcagcttgttgcggaggtagaagcatatcagctcctcctctgttgggtagaagcggaacccgagagccagcc

SEQ ID NO: 55 - DNA, 1823 bp, Oryza sativa
cagttgctgatcaataaaagctgatgctgaagccgtctgcttgacattcgctgttgtcgataactctctgccgcttctccttcctcaacctatttcattctgttgttgctacttttgctgctcctccctgcagttgcaaatagcttctctgggaagcttgctgaggccatctccacctcctattgatgtggcatggtcacggtctggttggccaacaggataaagctgatagggagatgtcgaggtggccgatgatgtggggagaagcctgtgagaaacaaacggcatggggacagagagaggtggccagctatttatagtgataggctgagctgggctaccccacctgatcacctcttctcttccagagggcaaaaaccattgtacaaagcatggtgagagactgagcttgcttggcccacctggctatgtccattcttcgctgccgtccttttgttcgccaatcaccagcaccacctctgttctctgcagcatgcatggcgctctgttgctaacataaccattacctttcccttttcccctccgttattctagcatcatgcttttcggcctgcatatgctgttcgaagtgaggagcccaactacgctagtatgcgttggttcacatgtccattgatgattttggtgagacaatccatttcctcatttccccacataagtaaacttgcggtttcaagttctgaggtattgattatcaattcatcgtctcattcttcaagccaaacatgacattttcaccagattctgtaggaaaggttgagcttttgtaaaccttatgtgtccctcatgttatttacagactacgggaagttttcaatagtcatttttctaagtagttctagaattgaatgactaagctttatgtgtttgtgcagcaaagtgcagccttcaagatcttgagaactcggctgaagactgtgcctttcagtgaaaatttgaaacgcacatcttcaacaaatccatactctcagattctacaagtgacagaagatggtaatcgaaatcacgacactcagagctacaatgcaatcaatttcccatcccggctccaccagtttgagagcatgcagcagcagcacagagttcatctaaagaatcaactgcaatcccaaaaatctgcttcagctatagtattatcacaggtaatgtttctcttgcattaagccattaacatatatctgattatattgtatacctatacgtagttgcttcccccattaaagtgtaactaggtttttagttgcgtactgaaaatggttccttagcttacctatgcaactaagatctgtgttttcttggtgttgaacacttcttcttcttcttcttctttttttttttttggggggggggggatgggggggggtggtctttaatcctttcatctacaattggttgtgagagtttcttcgtgttaagttgtaaatccttctctttgcagatatattaaatatctgatgtctcccgtatcaactgtaggtctacctgaatcatcatcgcatcataatttaatcttgtaacacatttgttagtccctttgatttgctactaaaatgttatttcccagaaacctgactgttttcagaaatctgccaactgcaactaggaaaagttgctcttgaatggcttctttgattgtgtaccatagtttctcactgcaaaccttcataacttagtcaaacaaaggttgccactaagatgcttattctttgataggaaaaccgctatgtaacttttgtgaattgcatgcaggaaattcaaagatacgaagaagcacattcctcctcgacagggctgcaggaatt

SEQ ID NO: 56 - DNA, 556 bp, Oryza sativa
gtccccaagctggagcatctggaaagcgagtcttcacaacatgatagtcctcccaagtagcatgatctgctggtaataaagaccatttcagcaacacctggacatgagctgcattgccgcgcttcactagtcgacgctccaaaatcgcctcaggaacaacgtcagcagcatcaagaaccactggggatggcaaagaagtataaacaggagtatgatctggcacctgagctttgagttgagaaacatgaaacaccggatgcacagtgctgctggcaggtagatccaaacgataagccgccactccaatgcgctccaaaacagtaaaagggccaaagaacttataagccaacttaggatatggtctattaactactgaggactgagcataaggctgtaacttcaagaaaacagcatcacccacagcaaaaacacggtcagaacgacctttatcagccttgttcttcatacgcagctgggctcgagttaactgctgctgtaaaaattcagacaagccctgccccttcagtctaaacatccaccacatcaggcagagtag

SEQ ID NO: 57 - DNA, 1487 bp, Oryza sativa
aatattttgagcagtgatttcttgcctgtgggccagggaagccaccaactggccagccaaggggccagttcacatccttttgaaggagtgtgtactcctgctcaataccgtacctgtttggattcagagataaaaccttatgagaatggtatagcagataagatagtaaagtagatatagatttgggggtctccacatttggtggtccttaaaaacttttttttattttgaacggccttgaaaacttttagttttcatatttagctatttgataaactaaactaaactattatatttgtgtcaacaaaaatgatctagattactactcaccaagtagtaatttaaatcacttggtgaatataacaatcgtttcagaacttgaaagttctgacatgcttatatttattggaaacaaggattttttttaacaacggagttaaaattttaattaagtcgtatgcaaaaatactttaataatctggagagaacggttcttaccatggcacctcagcaacaacatcagggtggctgaagatcttggcggcactgtgcctcttgttagtggggattggctcaccttgtggcgtgtagcagtcgcacatcacctatagtaacattaaattaaaaaagtaagcaaaccagcgacttcccgatatagggtatgtttagttcacgccaaaattaaaagtttgattgaaattggaacgatgtgacggaaaagttgaaagtttgtgtgtgtaggaaagttttgatgtgatggaaaagttgaaagtttaaaaaaaaagtttggaaataaacttaggcatagttgaaaattaagggctatgcagttactgctttaagctgaatgaagtacatctaccccctttctccctaacttaaaccctaacatccaaagaaaattttaaggagagaaacagaaaccacaatgccctcaattaatgtgaaagttgtattgatttactggtaggtcgggggtattgaggtaataaaacttcttgctttgcggattgacgatagttaagaagatagaaggtgtttattttggaataaatttcaaattccagaaattgttttattttgatacggaaggagtacggaagctattcgtggccaatgtttctaacaggctaatttatatctatacacaagagttgaattccataaagtacgagcaggccaatcaatgatgtaagaattttggcatgtctacatcagggtgtaggcagtttgctggctaagagcaagataaacagctaaaggtttcgagcacatccaacagccagaaaaaataacctaactactagttaacatattcataattttatttttcagaccaagctacaattcaacaaggttaacacttaacagtgcctgaaataatatgtttctacaacaaatctaccatctcacacattcaaattttgtttgcaaaggacctttcgttcccttccttttggccatcataaagtgtcaatatgtcatga

SEQ ID NO: 58 - DNA, 532 bp, Oryza sativa
ctgttttggaaccagacctccacctgccttggcctgaggttcagttgcttcgctaaagcgactttctgcttctgctcgaagaaacaaaacaaaagcggtggttcagtgacccatatatattcgatcaaaaaagatgaacaaaacacaaattaatatgcgccatgtttttatcttaatttgctccttgtgttctactacaagtgcagctttctgcagctaggctaagcggcggcaagtcaatagaacgtaaggagaacgcgcggacgtacgtgacgtaccgggttgagcgtgctgtgctcccggaagcggtcctccaggagcgcggactgctccttggtcagccggagcttcttgcgggtgctcccgtcgtcgtcgtcgtcacgcccggccgccgtcgacgacaccctctcgccgtcggactcctccgcgcgctccctcttcacggccgccgccgccgccgcgccgacggacagcgacgacacgctgtgcgcagggccgtccccgccggacgcggtcgcggtcgcggtcgcgg

SEQ ID NO: 59 - DNA, 1968 bp, Oryza sativa
ggcgcctgctcctgctctgcctcgtgcccccgcccggcgtcgttgtcagatggcgcgtaggaggaaggcgaggccggcagccagggcgaggcggcggccggtggtgtgcgaggtggtgctggccggacacgcggccttggcccgatgtccggcggcgtgaggctgtggaggtgctgcgcgaggagcaagccggcggtggtgacggggtcatcaagtggctggctgccattggtgacctcagtggctttctgcagcatgcaggaagcggtttggcagtgaagagttcatcctctgtattgccagcttgacctgcggggtggtagactgagcttgggtgttgaagggatggcgtggtggtctggcgatggtcgttgtgcaggatggttgtgtggggttttgatgggaaaccgctggcgaaagccttgccaggccatgggctggcatgacgacggcgacgccatttggcgccgttcccctccttggaggcgtcgtcctggcattgacccctcgtaacacgaagaaccctctacgcgcaatggtagccttggtggactcctgcaatgtccccaaagctcttcaggtctagggtgtttgacgaggcctcacttccttggcttcgttccttgctacaacgggtgttcatcactcttatctggttactgtggggtagagtcggaactgctttgctgggggcgacgaagcttggcaacaatgacacactgcaatttctttataggattgttgatgctagctgtgtgtaggagtggttccttggtagcttgggctgatgtccttcgtgggtgtcgttcttgtttgttcattttggcgttgggatagcatcacattgaagtcgaagctgctgtgtcacttgggtgacaagcttggcaacgataacatgtgtaagctgccgtgttgtctcaaatggcaagcttggccgatgccttgtgtcgggctctgtcgtggtagtttaggataggttagctgttggtgtggtgttgtagttgtggttttcgctcagttttctctaattaactgaggtgttgtagttgtggttttcgctcagttttctctaattaactgagcactgtaaagtttgatcccgttttcttctcaaaatgggatatcttcttcttaatataaaatgtcggcaacggcctgaccgtaggtttcaaaaaatatacgaggcagtttctcttttgcttttagcctgcaacacgctagctcaaagtgcaacactttgcacatttggcacagacgtttacatccatccatcgaagttattcgcatcagtcagagtgacatgtaaagagtggagaagatgtaacccgatcgaacaaacagacaagctgatcgaacaaaaaaagacagcggttttccatatatataaatcacgatataggaaaatcaagaacatccgtccctacggaaaaagcaaatccgttttacaaagcattattattcagagtacacaaaatgacactcggtgaacaggacagactagtaataaaattcaaagggccttgtcgacgccaaggatagaccgagaccgaaatccaacgttgacacatcacggctgatgcacgcacgcgtacgtttcttttttttgttttttttgggcgcagaaatgcacgggagaggcccgccggacggcttagttctgcttccacagcagcgtggtctcggcgatcatgccggtgacgacgtatgggtccatgttggacgccggcctcctgtcctcgaagtaccccttgccctccttctccgtgtcgcgccccacgcggatggacgcgccgcggttcaccacgccctgcacgcacgcacgcaaaaaatggttatgatctcatggtaggctagccgatcgatcaacgaacggggggggtatgcgtggatacacgtacccattgaaggtgttgatgtcggcggtctcgtggcggccggtgagggggcgctcgttgccctcgccgtagg

SEQ ID NO: 60 - DNA, 7223 bp, Oryza sativa
ccggcgaatccgagccgttggctcgtctcccctcgtcccatgcaacctcccggtgcgctcgcccttgcctgcatcgctgtagatcgccccgccgctcgccgccgccgtccgtcgtccgttccggccgacgtcgtcgtcttcctcccgccgacccgcatggcagccacgtaggcgccacgtcggcgccacctcggccaagaccgggtcaagcctaccccggtccgctgctaccctctgccccgctcgcgcgcgcggtccaccgcgagccgtgaggttgcgcgtgggcccgccgcaaccgcacccaccgcgagccgcgcgcgtgcaccgcgtcccttccccaaaccctagcgcgcgccgcgtgctccctccgcacggtgaaccgtgtcaccgacaagcgggtcccactcgggaccacacgaggtgagcccggtccaccggctccctctctcctcccctcccgcgcgtgccttgggccgtcttctcgggccggccggcccattaagcttggccgagccgcccctttctctcgggccgcgccctagctgcccgagggaagtctgtttcccctccctcttttctctttttcaaaagggtttaattaaatcatttttcctttagaccaaaaatccaataatcttagaaattcaatatcttctcaaccgtatgtccgtttgactccgttcaacttccaaaattcctcaaatctcgagatctgtttaatggcacgtttagaggtcaataatagggctctattttcgccgtttgttgagttgtcccgtttcgcgtgtagtttcggagcccgaagacccgcagtgcgaggatttcgaggatcaagctcaagatctcgagcaaggcaagtcacctttgatcatcttgcacctataatttaaatctaagtatttctttttcgcaaatattgcataaataggattatcacgagtaattcggccgcggcttgcgagatagcctgccggcccccaatcctaattgctgcaattaccctccttgaattattgaacacttaaacctcctttgtcgattgttgtgcttcgatgcatgggccttcgggcacgcgcatcgggacacctcccctcaaatttaaaatatccaatgatgggtaaaacttggggtttttacaaaagacttggaaaaacccgacacctgggtcggtgcttgcgaactaaacgaaatttcaaaatcgcggatcggggaacgtaccgggagtgcggtttcccgctcttgcacttaaggaccgttttccttggaatttcatccgaacataaggcaagtgcgaccacatgggtggaatgggacaccccctggctgagtaactagctaatcgggggaaccatgatgccaagagacatgtggattcaacggggtggtgccggggagaacccccgggtttcctggcacagtatagtctgggacctaacctagtgttggtctgggacccctctcgttggcatatggtgaacctgtgttggctctcgaaatgccttgtcacgaaagcctcaaggtctccagacgtggccgttctgcacgggctgggtgatccgggttagtaatgtcgtgtgggtaaagtgtaccctctctgcagaggttaacaaactgttcgaacagccgtgcccacgatcatgggtggatgtgaggtgattcctagcgtagttttgtttgactactgcttgtgaaattactgttgtggaatgggttcgatgtttgaaaaatctgcggctgatgggatcagccaggcccgggtggccgtttaaaagctgttggccgggtgccaaccttgaatcaattcaaagactgatacattgcacaaactccgaccgaacgagacacactgtctcatccgtgtcgtttgagaagcactcacttagttgtttcaaaaaggagtttaaataaaaacaattgcaaaaacaacagcccttcctttgaagcctgcattaaacacttaattcccatggcttgctgagtactcctgtactcacccttgctctatataaataatccccccagttgctaaagaagatgatgtggatactgctgatgaggagttcttccaggagcaagtcggctacgatgagttttagggtttcggcctagttcccaagttgcgcctgtgatgaatagtccaagtcttggcttccgttttcccttttgtaatgcagttgtgagctcgggatctgtccgcaacccaacatgactgtactcctactctgtaataaagagacctctgctgctgtgatattctgtcttcctgtgataccagcactgtttcctgggactggtatcgattaacaggttaatttggagcgtcacgggctagttccgctcggggctagttcagggcgtgacaccgttaaccgaataaaccaaaagtagcccattaggcccattaagcccagaatcactggaaaactctagccacgtcatctcttaacacccccatccccagtcattcactcattcctcctcctcatgcacgcacccaaccgctgcgccctactccgtaccgacgcgcatcctgcctccttagctcctccacaccaacaatgttgcccaacacgccaactatgatgaatgttgattaagtgttgacccccattagcagcacgtcaaggcagttggcctatcggaacataccgagcagcagcactttcttctttcctgctactgccacaactttatttctcgaccatgatctatcttcaccctttaggcaatgcaatttggtcttgaattttagacgaccgaagtttctctaaagtccccgagcccgaactgattggtctgactgattgcccacccctaatggagtatcatgatacttacttgatgccatgaaattatcatggtaaatttatcgttttatgttgatacctcctcggcaccatagaggtatcataatacttaattgattccatgaaggtataatgatacttttatggtatcttctacaataaaaccatgaagtatcggtgatacatcaatttattgtgatacctcgttggtgtgatgaaggtattaagactttttttatgttatcacagtaaacctctacgatacaaccaacaacatttacgatattttcatgatatctccaaatatttcgtgaaatctttgtaaatataaccatgatgacattttcagatatgatggaaatcatgtggtaccatctacataaataaaacatggagatacatgtgagatatgatagaaatcgtaattacctctatgatattatggagatacatgaggcacaaagtgtaagggtcgatctgatataacataattaagttcacttctaacaagccttatcctaccatgcatatgacccaatagtggtgtatgctcatgtattatccaacacagaggaggtgcttgcccggtgtgtagaggcttggaaggatgtgcttgagggaattgtaaggaggacttgctcgcaagcgtgggtgcacactgcacacgtggaaactgcacatagaagaatcgcgggattgtgatttctataccatccctgaatggtacgacgctctataggaatgtttgtattaggcagaaccattttttaagatatagtctatatagcagaacgcccaaaatagtatgccattatgtggttccttcacagtatgaatacgttcttctcctatgatatctatagaagagaataaaaatgcatttaattttcaccaatcacattaatatgataattcattcacctacctcgagctatatatggattgcaccggccaatgcaccactagactatatattggggaaaagaacctcatccctcttcagccaacataatcaagaagacagggatggagcagcaacctaagatggtgaccggatgggcggcaagagacgccaacgggctgctctctcctttctcttaccccctcaggtgatctctagctctcttgctctatctttttcctgtgtgttcagatgttcctgggtcttgaaatattcaaagagaagttcacacaaaattcttgagttataccgttttctttttatgaaagcaaagttactgataaatagtcaatagtcatctccattacttcgttaattaattgtagtcaggaattctagttttgaacgggtaccatcaaactgtatcgatcgagatttatgaggaatatggaattgcctttgacaattgacgcaccaagcacataaacgctgccgtctacgttttctaccggtctccggtgatattttctttgtgtaatgaccgatgagaagtactgcatggctcattggttctgtaactctgttaattattgaaaaataactaaattgcttcagtcagtcagtagtaaccaatcgttgggttgccactctaacgaaaacatcactggtgtactgctatatagaaattagaacactgagaactaaagaggtagtattgtctgttgagttttgagcatttttcaagaaatttgcagctacacaatgcgttctgaattacattttttgattaaaaagaaacttatgcttggattgcaaagatatatcatttactgcaggaaagtaaaggctacacgggtgatgaccaattatgcactatacattcatcatgaagcctcgattgccatcttttagaaagaatgaatgatagccattcagtaggtagtagtggcgacgcactcatacccaacttccacggctgaaaggaatcaaaccattttggcaccgatggcttgtttgcacgccattgggcgagttcgagtcgttgcaacagcatttcttccattattcacctgctgatttatgtttatgcattgtcaaactatatgcattctccccaattgttttctttttcgtgagtacagaaaagggttaattaatcgtcatttccaccgtgcatttcatatttcagagctaagggagacgaagacgtcgttgtcaagatactgttctgtggcatttgccactctgatctttctactatcaagaacgagtggggcaacgccaagtatcccgtagtaccagggtcagtacgtacacatgcaatgcaaatcggctaatgcgcaacagaattatccagagatatattattgatcgatcgttttgcgtgcttaatccagtcatgaaatcgttggggtcgtcgccgaggtcgggagcagcgtggcgaggttcgccgccggcgacactgtcggcgtcgggtacatcgccagcacatgccgcgcctgcgccaactgccgcgacggcttcgagaactactgcgcgggcctcgtgccgtccttcaacgccgcgctccccgacggcgctacggtgcacggcggcttctcggagctggccgtcgtcaaccagcggtacgtcgtccggatccccggcggcggcggcggcgcgtcgccggcgccgctcgaccgcttggcgccgctgctgtgcgccggcgtcacggtgtactgccccatgaggcggctcgggctggacaggccaggggtgcacctcggcgtggccgggctcggcggcctcggccatctcgctgtcaagttcggcaaggcgttcggcgtgaaggtgaccgtgatcagcaccagcccgtggaaggaagcggaggccgtggagaggcttggcgccgacgcgttcttgctcagcaccaacgccgaacagatgaaggtgaccaaaaaacaccgatctgtgcgccattttgcatccgaattctgaagctaagaaccaccatatgtgcaggcagctgcgggcaccatggatggcatcatcgacacggtctcggcggtgcacgacctgacgccactcatcacgctgctgcggactcacggccagctcgtcccggtcggatcgccgggaaagccggtgcaactagccctgtaccctctgcaatcaggtgcgtgtggttcatcattactgggccttacagcctcacaccaaaccaggcccatcaccagttggcccgcgaatagattgggctggaggcccaatcagagctagatgggccgtgctcatggtgtgcgatgtggcagatgggaagagcgtggccgggagcatgatcggcgggatgagggatacgcaggagatggtcgacttcgccgtcgagcacggcgtcgccgccgaggtggaggtcatcggcatggaggacgtcaacggcgcgatggagaggctgcagaagggagacgtgaggtacaggtttgtgatcgacgtagccaacacaatggcccgtgctcgttagagtttgtttgtggtggtggtttctcagggacagaagaagcaagagatgcattgaactatgatttttcgaagtcaggactgaagaacgtgataagattcagtcaaaactgaagaacatgataagattcactttgctcctccttttacttgccattgcttgtgtttcgtgtaagcgaggagtggagtatgcggctatgcccatgcatcgccgtggaaatcctgtttatcagtgatagaatttcatagtgtattcgaaaatgcgcaagggaatgaaagttttatagattagtaatggtgagctaactttggaaagaagctgaatcatagccataaaaatcactgattgaacggttggcatgtcaataaaaggaaaaatccccttttccatctgagaacagtgcttactactgctgagaataagcgtacatccattgaagggggaaaaaagaagggctgaagattaaagagaaacgtgaatacatgatattattcctcgggtagttgcatacggataagatgtgatagggttacacttttaaggctgtactacgtgctactgctgcatatatacgaggcagttattctatctttttatacttttatctgtgctgtgtatatcacaaacttagaattatcgggacccccgcgtcgctctcgcgcgggcggctcgggggcgaaaccctagccgcccgcgccgccacaccctcatccccctcctccacctcgccgccgccggagctcgccggtggcaaagccggcggcgtgccgggaaggcggcggcgaggcccaaacggctcggcggaaccggcccctgcgcgaggaggacggagaacgccgacgatggcgcggccggaggtggagacgacagttcggcttggggcggcggatccggcgcccctgtggccggatctggcctccccacccacggatccggtcggcacggtgagaggcgcgatggaggcggagcgggcggtgagcggcgcgggcgtgccctgccggtgcagcgggcggcaagatgg

SEQ ID NO: 61 - DNA, 982 bp, Oryza sativa
tatggtaagcctcaaatcattgcacgtttctttcagacgacaatgctagtcaatttgaaacagtgggatgtgagaaccccacaaggaataaagaagatgagacagatcaatataaaaagacgacttgggcaaagtcttccagtctacatcttcattgataatgctaagcccatccatggcatcactattaggcaagagaagcacagctatatacatcattatgcatagcaaagcaccttattagcattgatccattcacaacttggagtacctcctttctgcttctatctctcctgcaaatggagaatagcgagcaagagaggacggactcaccattggagtatgatttgaggaagtacctccttctgttggccacccttgtggccacggtgacatatggtgcaggattcagcccgccggggggtgtctggcaggacaccgaggccgggcacctcgctggtgactccatcatccgggatagccagtatcgccgataccttatgttcttctactgcaacgcgactgcattcgcgctgtccatcgtggtcatcatcctcatcttcatccttgctatcctgcatgagaaggggaagttacagatccccatgcttccactgcgagcagccatggtgctggacctgctaagcctcattggggcctatgctgcagggaccagtcggggtgttctcacagccggcaacgtctctgcacttgtggctactttcatctatatggtggcacagatggtggtaactttatggcttgacaagaaacagactcaggatataagctcaggtaatctactaatcctcctaattcagcgcactaaatatggaccatgtcaatattcagaggggaaattgaccaggtgatgagaagaaaaaacggcaccgcaaggtactgatgcttctcgcaacatttgtggcaagcatcaatacatggctgggctgagagcaccgggtggctactgggataacaacca

SEQ ID NO: 62 - DNA, 889 bp, Oryza sativa
tcaaaaaagaaacatgccacacgcaaatacttgatgctgctaggagtcttggctgcaagtgttacttaccaggccggtctcaacccacccggcggtgtgtggcagggaaatagtaatgatcatgcagcaggtaacccagttatgcatgacaaaaaaagataccgttatctcatcttcttttacagcaactctacttcatttgtggcatccattgttgttatcatcctgttgctaccagagaaactgctgggggaggcatggtcacttaatgtgatgaacataacgattgtgttggacttacttggcctcctactagcctacatggctggctcaagaatgaggttgcagtcttctggatatttcgtcgtgtttgttataggtgcactaggctttgctgcaattcacaagatttggtcatatttgcaaaggaaaagaaatgatcagcacagactgttagaccaacccagatagtcaagttagggagtttagatgttctagtgtgctttgtaattctatccatccatgctttctttgtttagtcggatgcattatgttccaatatatcattagctggttaaagtcagactcaatcacgctactacttcattcttatctccccattaacagcccataaatcaaacaagagctacaaatgttaaaagttaaatcgctatacatattaacttaagtgctttctaaaatttttaggactttaattaactctgtattttttgaaagcccttacccattttcagaatccaaaacagatttttcttttccaaattttcaaaagtatgtgacagattaagtcttgtacttaatatatgctagtatctattttggaaaatacttgggtgccttaggatataagctactagtccatatgtct

SEQ ID NO: 63 - DNA, 34861 bp, Oryza sativa
ttctctttccatctttccccctcttctctctccaatctctgcccgtcctattctttattctctttccatctttcacccttccctctccctaaattgtcgcacatgcgatttccatcctatcttaacgcgattttcttcccagcatgcataattccctacagcgcatgcgcccttgaccccccccccccccccaccttgcccgtgtctacctgatttcacaatatattagaatccaagacgtgtagaagggtaggcggtggggacgctctgatccctgatggcgctcagacgcctaggcgatgcttttaaaaccattggctgtgatatttttgaactgcatatttttgctattacatggaaaacatacattgatagtctcatacacaccattaagcatgcacacaacactcacaaacccataagtgcaccccctgatacatgctcaaagagaaggagccagcgacaaatccctgacttcactaaattcccattgaaagtacaccatgtgtgtgtaatatatgtgggcactaatatttaaatcctagtgggtggaatcatgcactcgactccaccaccacacatttggtgtttccccatttttgaactgcaattgatatcttttcaatcttaaaagttaacatattttctggaagggtttttctccgtaacatttctttagaaaagtttgtcagtaccaaaataaaagtgattttaatggctaggatcttatagaggagtgaacatatgtcacttgcttataaagtatgaaaaactacgaacaattgttgtttatttatctctctaataaaatttctgtcttcctgggcccaaacctagctcagcccagtcttctgctcgtcccctcagcccagtgcggtctccacttcagtccaagcatggaatcagcaatgaagaccaaagatatgtgattagggatgagcaagggtcaggcgacccattttagttcatctttatgaacataactaagtgtatatatacaaaattgaacaccacatggaccagatgtgaagtgggggccatagccaggctcaaccctacacctcaaaacatatttctgtatagtgcaaaatttcctgcatccaggactcagctatcatgattcatgatcttgcatacatctagacaggccatagatcagtcctaaagttgtgattgtatacaatataatgggtacaaaaagagctgccaaatataattcttgctgattttgcaaagaaatgaagaggagagaagtgcatctcattatatcctaaagagtaaaaactatcaacttctgctggtcatttaaaaataatccacttctgctggcattcactatcaatgtactttgaacatcgatccagaagcaattgaatagtctgaatgagggaacaacctacaactacatgatatattatagtgtaaattcacaaatggccagggcctagtggaaatcatgaagaactttggcccggcatccatgtggttgaacctcatgaagattttgctatttcatttgcaaatagtcggatgtatgtatcagttaagacgggacgaaacaaataactggtactggaatgcaatgcacatggatcagaaataaagaacacaaaggtcatgtacaagaaacagataagtggaggctaaacagttgttttttaactgatttataagaaacatgtgcgactatgtcccaagataatccataagaaacattgttctcttacaggctactgaaaattagtcagggttgcaagcaacagataagaaactgtaacagtagtagtaagtttgtgacattcgttgggctatttcggcacaatctatcgaatcgactatataatttgcctcctctgtgaggaaaatgcagggggttagtgcatacgaatgtgtgaagcggtacaccactgatgaacaatgcaattacaaacagccgaggacagagcaggaggaaggagatgaaaaggaggagcgattaattagggcgagtagctcacctgtgacgactctcgcgtagccagcagaacgtgtacggtggcggctgccccttcccccatcggtgcgcgaggcgaggggatgaatcgaagaggccaagggaggagtttaaccatcatgggttcatggccttgtatgctcccgccgccgccggcacttgtggtggtggtggtggcggcgggtggtagccgatcggaatgccggcgcaggtgggcggcgccgcggtaggtcaaaggggatcgggggagggctcgcgctgcgggctgcggcaagctggagggggagcgagatgctgggagtgggaggtcgattcgcggggcggatgatcagggactgacacatcggcagttcgagccgtctgcccgtccagggatacgatgaatttgatgacgatggatcgcacgagaattattttttcgagtaaatttcaaaataaaaaaaagcagatacattaaattatacaaaactacatatttaactcgttgtatcacaaaacaacatatttaacatcaaatttatcataaaactaagtatttaagataaagtttcacaacatgtttagtaactaaattatcacaaaactatttttttagtggaattgctacctgtctgtcgacagaaaattgagggttgcatcgttcgttttttggaccgtgcgatttgcttgcgattcgtgctcgctaaccgggtcctcaggttacaacccattatgactagtcaataggatgagctcgatgggctttttaccgttcccctcctagagaaattctccctccgtcgacgcgaaatgagaggcgatgccattgacgattctgaggcgatttgttcttcggttccctactcgatcttagtggtaatctatggcgaggttcttattttggaagcttggaatctctgtgcccgttttggtgagttttttgttggctgatttgctcttttttatgcattttgagaagtagttttatgcgatttgacaggaatttgagttctattatctgaaatcctcgtcgttaaatggatttgtgagccactaatttgactggatttgaggttcttcttcgattccgagacgttgagctccctcgttatctaggtattctctgtggacttgatttgttctgatagctgatttgtgagctgattcggtttatggtgcttcttgtgactcgttagtgcttgttcccaacttgatctgttcattctatcgagctctgccatggattgtggaaatggagtgtggctgtgctgattgacacggtgtttttcaggcgaaaggcttgcgaggaatgtggtgaccatggcggtttgggaggcgtcgaccaagccgctggctgccaataatggagacgaccgagttcatcaacgccttgaaacaggaggtacataaacattgctttcctctcagctgaaatacagtattagtcaaggtgtactaacctgagtattatgtctgaccaaccacttgaaccatttggtatttgcatgcagtgggacagaattgaggacaagtacacggtgatgacactcgcagccactgcgtcgctcaggatgtggagccggcggagttgcatcggtcggtactgaaactggagaatcacatttgcttaattttcagggagtttttgattatgtaggtacagtcgttaacttgggtgtttggttaattaccttgcaggcaattggcatgcctcatgttattcctggtctaatgaaggctgttggcattgtgtacagtgaaggtaagattatgcacatcagaagttcaggaaaaaaaaatctccccatttataagtaatataaattctttgacatatagatatactttgtgcagttttctaggtacatgcctaaatctgatatactctgaattttttgacatttttgctattgactttggctgtaatataaattctctgaaatccaaattttgatataagttctgttctgaatacagtacatatgcagtacatattctttgaaatgcacctgcacatatgttctcctagttgttcaaaaatggttttaaatctgtactgctacttattgtaagacagattacttgatagattatatagattctatattgttaacagtttctatagattctataaactgaatcaaacatatactaaatcttgatgtttctgtaaagtctcaagtctacaagatgttagttacatatttttagtattgaaattacagtgttttttttatgtaattcttgtacaaaatgactgtaatttaacaacaaaaatttagaatgctgctgaatattctcaatatagtgatttgaatcgtttatggcaacttgtagcaatttttagtttatttttaggttgtaatgcattatgttattcggattttgttgtgctatgaatttctgaatttcctgctaatcagtagatatgcaatgatttgtctgttttctgaatattctcagtgagttatggtctgaatttagaattctttgaagagcaaaaaaataatctgaagttgtatttcattgctgcctaaggatgctagattgcaatctaagagtttcctgacaattgtactttaaatagtcaaaatgctagcttaagacaattgtcatctttttttgtaaccatctatgtctctgacattgatcagcaagtgagtaatgtaaagagagtggtgtatttgaatttttttttctgtctgatcatccttttgtttcctctctaggtgactgaacagaagcttgccgtagtgtttctaattgtggacaagtaacttatacttgttcatctctgaaatctgaaattactctctgtcctggagactgtactggaagaagctatactgctactaaagttcagattggacatataagttcagaaaaaaaatcagaattatatcttgaattcatataagttcaaaaaattcagaattatgtcttgaattcatacatctgagtacagaaattgataccatttaagtttctcagatctgttcaaatatgcaatacaaaattgtcagatgttttctgtgaagttctgtgatgtttctgtaaagtttttaagtctagaagttttttttttgttatgaatttaacatgctgattggtttttcgattggttttcctctttctccttgtatttgattcttctcctccatctccatctcctccttctcttctctctttgatagatctgtttgtgtgtaaaaatcccgaagtgttttattcttgcaaaccaagttgctttattgctttactgatcagatcacgtgacactgtaaagattcttcttagtagtcaagttttctcaatagggtataaggtacgcgattctgttaatctgggcctaatattagatttgagtaacggtttgaatttgggctattatttggatttgggtcctggtagcatcgaattgatttgggcccattagcatcaaatgtatttgggctcaaataaatgggtcatgaatagcctttcagatttaggctagtatgttttttttttttaattttttgttctaaaaaaactgaggctgtttgattcagatcttgtggctagaaaattcgacagattgcaagttaaaaaatcggtcgactgagttgtattgtaattctcctcaagtaatgatagacctatttcaaacatatgaatttgcaattttttcctcaactaactaatggaggcatgaaagttactaatcagatttaaacaatatatcaattacctgattgtgatgttgttgcgttcatgtccatgttaatttcttcttctgataaaagctttgtgatatacctgcatatatagacacaaaattacagtgtttagaatttaaaattacagtgtctgtaacatgtaattatgaaataaattgactgtaatttcacataagtgactcatacctgaacttggtacatgttttgtcactcttgaattgctatcttcattattcccatctttgaatccttcaaatttagacattttttttctcacagtgtaaattaagtagttaaaatactttatataattctatcttctaattttgctctagattctttccagattttcttgatcacaagttgtcaaaatttgtataactaccattagcaaaatgtaaatgtacatgcaaattggatgagtgaaagtacaacagttacatacctgtgctttgaagttgcttatcttccactatattttgatagtttgatgaatttttcttcttactactgatacaatttttctctttgtcctctgtgatgattgcaaataaaatgtttttttttattttcatattaattttcctgtttggttcttactgtgatagaatcttagtttgaaataatgcactgctatatcaatcaaacatacctggatttattaaccacttttataaaaaaaatcactataatttaaaaatagtgattcatacctgtacttgatatctcatttgtcattgttaagctgctattatcatcattgtcaccttgtatacttacaaatgaagggaaatttaagttgaacattttgtttccaggtaatgacaaattagatttgaaactaagctcatcacagttgtgacatttacatattttttatttagaaattacagagttttgtttgtgtaattcctacataatttcactgtaattagtttgaatagttattaaatacaacatactgatagatttttctaaatatctgtttgattctaaattaagaactacttaaaaattaatattagttctttcattatggtattatattttttttacttttgatttatgacatcctaattcataggaagataaaatcatatggaattgaaattcaaaaattttataacggtttgtctcttatcatgcacttttctctttttctgtactttttatgcaataattgtacaaattgaacaattagaaacctctacatttgtttccagattggagatgctcctattccacattctttacaatatttgatgcttttcctttgttagttgtgatgcctggaaataattgtagaaaatgaacaacatataaaatcatacaaaatatcttttgactatgttgaaattacataaacgttacattgaaattactgtgtttattaaatgtaattcctgtaccaaatgattgtaattacatatatagttgcagaaaaagaagtctatatgaaatcaaacaaaattacatacaaatgctctaaatttaagttttggagccagttacatgaatttattactgaaattatagtgttttttctatgtaattctcatacgaattcattgtaatttgacttataagttagaaaacagatccaattaaactgttttttctttataagtaatcaactgtattgttttgggtcaaacttgctttctacaatttgcttttagatgaacttatagtacgatttgattttgatccgcctgctagtgaactaatgtaagcaaagtttgtttctcttgactcatttaatgaaatctgcttgaaagttagtttatgctacaagtgaactttttgaaaattaattttgtacagaattggagaaagaacaaataacttgtatcattgtttttctctcagaactttaaattgtaaagaattaagtaatgttcatttgtgctatatataaacacttttttgattaaaagttataccctgtttatttttttttccaaacagttaatgtatgttttgatttgtgtatctttgcagaccattttgcaatggaatacaaaattacagttcaaatcaatccaactacgcaaaataatcaatttttgaatctgaaaatattcaaatttgaaactgtatagtgttagtgaaataatcaaatcgttgaatatatattagtgaaataatcaaatcgttgaatatctattttatttctgtttactaaaatcagtttattttggaagataagttaaagtttagacttaatttgattataagatttaaaattctgcctattctccagactttaaatttaacattaatgttgtaatgttaaatgctctagatttacactgatatatcacaataggtacagcacaaatcattcttctaaatgttcagattaaataataagtcaaacagttcagattaaattattattcctggatagaattgttcctgtatctgtttttctctgtgtgaagtcctgaagtgatttgctttttcttgaagtgatgatcagatcacgtgagtttccaaagattcttcttggctgtcaagttttctcaatttggtaatgagtcacgtgaactgtgcaagacaaattgggctttatttgggatttcaattctgattctgaagatcaaatttgtttgagcagtgaatcttaaaaatttgttattgggcttaaattttattatatgatgggcctttaatttgattctccttttgttgttatacagtgggctgaaaacatcagttttgggctttttttgggccacgaactaatttgggtcctgaaagatgggcttgcgaatacactgttcctagcctgtttgtagtttttcaattatctgtataactagcaaaatgcccgtgcttcgctacagtgtattaaaactaaaaatatttgttttaaccgaagttattttcacactgctttaatacttttgctcgctagaaaaagtttcaaatgacagagagaaatatagttccgaacaaaagggagataaaaaaagacaaagccggtttgatttccacctttagacggtgcaagtcaacatggactctgaagatatgggtagatctacggagtggctcggcagcacggtcgaccagcgaacccactcagaccaatcgacgaccgatcgacgaccgtagcacggtaggtagcagccgcatctggctgtccgcttcccttccgcgacaccggtgaccatgactctatgctattattatttcaatatttcttatttttaattatagccttcatccgtcctgtgacgaacggaaagcccatccctcctggccatcggcgaaaaccatagcctctcgcccgagttggggcgaacgacaaaaagcagtggtgccggcgtatgccccctggctggtgcgcgcactcgcccgagggtgagtgcgccgccgtcgagcggccttgcctcggcgcccctccccatcatctccccctcgtcttccgcgcagcgtcgacgacggctagtggcggtggttgattacccgcgctcgtcggcgacgaccaacggcggcagttggctacggtgaatatggcagcggtggcggcgggttggcggcggccgtgggcggatccgagcgtggtggcagcggctctctccaccccctctagcctccctcctacggcagatccgcgggtggcggccgcgggcggatctagcggcggtggctccctccgcccccgctcgccttcctcccacggcagatccggcggcgttggcggcgtcggcagcgttcgcgagcggataaggagtggcggtggtggcgttggcggcgactgtggatggatccggcggcgggcgcgcgttggcaacgacgggcggtggcggagggcttcccacacggcgtcggcgacgaccggccgtggcggaaaacttcccgtgcggcgtcggcgacggccggcaatgaggtatttcgttcccttttttttcaatttttggttaaaatttttggggcttttcttcgggaatccgagaccccctttttttgtacggacgaaaaatcacccgatggatgaaacggactgtgaagaaagaaaaattacaaatattttaattagtgaagatatagaaaaaattcccatgcgttgtactgggtgaagactatcttaatcttattattattatatggtttatctaaagtgaaattaattgtaggaatttgcttggatattgtttttagtttttacacgatcatgagctacaattaggagtccgatcgtctcaagttagtatgcaaattgaagatgtttttttacaaatatagaagaagctccttctatatttctaaaagcaaacaaatttaaaacctactcaaatacaaatttgtaattcaaaaagcaaatgaacttaaaagccaacttaaacacgtatgatgtatcacagtactgataaaaacatcttcaatttaaattgaaatagtagagatagagcagtatttaaatgatattgaaaacattcatggctagtaaaacaagtatactaattaaaccatcgttgtctaaaaaaaaattaaaccatcaatgctcaccatcagccagctatttgccctccacgcgtcgttgagtctcgggacacgtcccagtcatccatggcgacaacggacggacccacacttctcgccacttcccagtcggacctatccgcccaggcgccctggtatcggtcttatcctcttttcctcgctttctccgtcatccctcgttttctcgcgccgctgcttgcctccgctgagctcatctcgctgccctcctcacccatcgcccctggccacgccttcactgccgacttcgccgccttggctacgctcgcggtcgcgctcgcctggagggccgccgcgccgtggcgggatggggtcgtcgcgcagactccaccgcaccaggtcgccgcgctacttatctccaccgcaccgtcggccatggagataaaggctgctgccaccggcgataaggcggtagaggagcaccttgtgattttttttttgtcatctccatctaggtagaggagcgggtgaggtgaagcgatgatttctttgattgggatgttttgattgaggattacttaagtacacatgtgcctttcttgggtaagggaaggatgtgggtggttgatttggagggagtttcttagatcggtttgggattgggggagagtcgctgctggatttgggtttcttgctggtttctcatgattcttcttcccccacagccacgagatagctagaagaaaatggtaggccaatgcagtctttccttctcgaatgcctcggcagcgagaggagctgtccttgaaaatttgtggttgttttacggggatctttgcctctttgtgctttcctgattcgctagctttgatgctggttcttgccttgtgatgtggtgtatccgatttggttcatttgttgcattgaaaacctcctggtctgggctggcagacgctcaggatttctcggaggcgggaggcccagcaccgcgccatgcgtttttccaccgcgggggcaaccgagacggattacacgaatacacaacacggaagtcacacgcgtagatttttatcggataacaggagacggacgatttttttagcggaagccttgcgtattttttaattagatatatatagatttatatgcttcaagtccttggcggttggatctagatcggagggacaaaaaatttgacagattgagagggttgttttctgtcgaatgagcagtagacagtccattatcacaaaactatagatttagaactaatttagtcataaaataataatgcttatagatccaacataataataatggttatagggatttaaagttgtagttttgtgataactccaattttaaatatgtagttttgtgatatttaactttaaatctgtagttttgtgataaatatgatgctaaatctgtaattttgtgatataacgccttaaatttgtagttttgcaatagtttaatcaaaataccaaaagttttgtgaaatttactcttatgcgtttcttgccaattaattactccacatgtttgccaccattaaaacacataatagcatatttgcattaagaaaaaagaagctagaatacatgttatttagcttctcctaaacctccaactcttttctttcaaacagtctagttcccacctaaatcttaggaatatgtggttgtagaataaaatgaattagaaaaaaaatactgaagctaactacgtcacatcatctataatttagtacatattaaaactcgacatgtaaccaatgctaaaatttatcatttccataatatttcaatctatatctatctatcatttctttctttaacatttaatacatatccatccatcatttctacaacatttagcatatatttatcatgtatttggcagcaaagcaggagatgtaagtgatttgtgattcaaagacataacttttatataccagcttattcactatatatcatctctgtatccatttcccacctattaacttttgtactacattattacccacccactaactatttattagtttatttttcacctactaacttttgtgttagtttatttcaccaactatcgtattttgtattacgatttgttttatttttactaggaaaggaaaaggcataatttcctatatttgtggactgaggtaatatgccattctatttgcaagtttttagtttttggcatccaattcacacgtctgtcgcaaaatatggcaaaagaggacgaatttctcccctctctctttatttcttcttttacatttttctcacaaatgtgtggacgggttttacacagcagcacgttacatacgtagatcgatgaactgatttttttttataagacaaactgcgctagacagtacaacatttcatatttgatatattttcataaaaaaaaagattacaagattaaaacattgggtaactatatataatgacgaaaaaaaataaagacacgccatcacatgctaacgactcctatcacagacacgagaaaattctagtaacaaattgaccgccgctatgtaatttcctctaaataaattttatgattttgctttgttcaagagcaatcaaatttgttttatgtgttctatacattgttatttcaatcactattacaaatcgatttttcatggcaccaccttatttgctttttctgtggcgtttatacgtggaaaccgtcagcaaaaatattatgaggggtggggggctatgaacgaaaatatgtgcaacattctgaacacataccgagggtattagaaaaccggttgcttagcagaaagcactcgcagttgtaggcattgacgacggtgtgcagcacgtgagcgaagaggaagacgagccgttgtggttgaacatggagcaatcgcgcgaagcgcttccaaaaactttattaccaccttctcccggtacagggcatcgaaggtgaaggttacgaaaacctgttttcccgatcgttggtacatcgacaagcgggatggagtagactacgagcgacggtgcagtacagaggaagaggcaaagccctagattgatttcacgtgtattgcgtggaggcgacgactcgacttatatagagatatcaggacacttgatcaggacgcctgcacgatctccactctgcgtaaccgaaacgaataagtcgcatgcaacttatccggactccacgccatttcacgtactggaatattcaaagtgtttcaaaaaacaaatctaaatttcccacaacaaaacaaaaccgtaaaaggagaatgcatctacgcaagggtgatgacaccgcagatgaaccaattttgacaaaccattcaacgcgtacgtcgtgcacgcatgcacacgcaccgccatgctattgccatgccaggcgaggggagcgagcatgttccccctcttttctccacctcatatgtctcaagtggctaggagagcatactcccttataaggagatctctctctcctaaaataggtaagatgaacagggccggccctgactttttggtggctcagtgtggaaaaaaaaatgaaggctcccattcaccataaaaatacaagataatatttaaaaactcattgtcattaacgaatttcacactaacaagtttaaaataccaaaaagaaatatctctagatcatttaaaacaatttcttctaacagttcagatgcaaaatcagtgatgatagtgtcaataacaatctcatctaacagcatcttctcaatgcacaaagtagtctatcaggcttggtactatagtatacatattttggaggcccctaatttttggaggcccagtgcggtcgcactgcccgcactgccccagggccggccctggatgaactaaactccctatgcatgctatccccatgaggtgggcttttgtgattttctaaagaattaatctttgaataagctaagaccatctattaattccgactagagttcacccataatcggaaagctgaagttaagacacggggattttaccaacatgagttttgctgtcattctcgaaggtcaaattaagaatttccttttaaaaaatttcaaattaagaaacattaaacaaaaaaataaatgggtaaagcttttatatatgcattcctaacgatttaaaaaccaatgctagaaaataaataatagtggaaaaatctcaaactcagttccaaatttaagtttcaaaattcaaattgtgggcgtgactgctaagccaagaagcaaacggtgaaatatgctaaatgaagacaagataattcacagttaaatggtttgtgttaataagaactgtcaattgtatgacttgcaaaactagaatatccattagccgttcctcgccatagaagctttcgacctgcaaaactagagtaagcaagagagaaacgtgctaacagtttaaagaaaatcttcacttgggagatggatatctaatagactgcagaaagtcagtcttagcagaagaatacaaaaaactcccatgtctttctggtcaaagaaagtatagccatgtccagatcatttccttcaaaaaaaatcaactacacatttaaaaatgacgtacgaggattggaagaaagtctgcgcatggtcagtctccgttaagctgataccccacaactctacataatgcatgttatggtgaaggacctgattggcattgcgttgttgacgccttgaggcacctcctttcagtcactgctcctcagctagcaaacaaatggtaaaacagtcgttagagtaatccaaagatgaagacaaaccagtgtagtattgcttgtggaagtacttctacctcttgctgatggccattatggtggccatggcgacatatgccgcagggtttaacctgcatgagatatgatgactagatccataaaagtctttacagtgttggaacctcgacagttacaatctgtaagtttgggcagtcaaaatgtataagtaaacgcatcccatctgaaaagaaaggacagctacagaaagcagctagacacaccctggagtgtataccaaactttacatacatgtatatctcacgttcaccattagttggaaagctgaatttaagactatgggcatttcaccaaacaagagttttgctggcattttagaagttcaaattaagaaacacttcaattcgtctcctgcatatcttacacattagcatatatgctgaaatagagcactggaatgaagacaagatagttcacaattatggcctctgttaatgagaattgtggcttgcctcgcaattaaaaagaacatccagtagctgttgctagccaaagagactgtcaagtttcaacctgaaagtccctcaaaaaaaagtttcaatcagcaaaattagactaagcaagagaaacgtggaaacagtttaatcaaatcttgacatgggattgggatatatatgaactccataaagtcagtctttcagaagaaaacaaacactcgtcttttgggtcaataattacatagatgtccagatcacttggccatataaacaattcaagccgctcatagacagatttatgggaagctcaaacaaagaggaaacaaggtgagatcaaatcaacgtcaatgaatcaactaaactttaaaacgacgaggacgtctgcccaaggccagtctccatgaagctggtacaacacaactctatataatgtatgcatgttgaagcaccttcttggcattgagtcattgacaccttgaggcacctcctttctatcactgctccccagctagcaaatggcgaatggacactctacagaggatcaagagaaagtggaagaaaaaccactggagttactcttgcggaagtacctcttactgctggctattatggcagccacagtgacatatgccacaggtttcaatccacccgggggtgtctggcaggataccgaggccgggcacctcgccggtgactccattatccgggatacctactacccccggtaccttgttttcttctactgcaatgcggctgcgttcgttttgtccattatagtcatcatcctcatcttgagccttgcaatcgcacaagagaagaaaaacttttggatccccatgcttccactgcgggtggccatggtgctggatctgcttggccttgtgggggcctatgcagctgggaccagccgggccgtgctaaaacccaggaatgcttgggtgttggccgtcatttttgtctatatggtgatacaacttgtgctgacttcattgagcagctgcacaggtgatgctcttaactcttgcttgacagaaaccataaactgcctaatatggcagaggctaaatatgtaacccgtttccatttccttttaaagaaaagaaaccatagactgttcctaacataaccaggataatcacaaccaggtgatggcaaaaaggaggaagccaaggagcaactgcaaacagctgatggcaaagaggagaaaatcaataagctctcccaatcaggtcataagaaagaggaggaaaaagagcggcgccgcaagctcctactacttctcgctacatttgtgatgagcgtcacttacctggctgggttgagtgcacctggtggctactgggacagcagcaaggagggacacaatgcaggcgacctggtcatgcgagagcaccatgctatccgcctgaaggcattctttgtctttaatgctgctgcatttgtcatgtccctgctcatcattatgctgctcctagacaagcaactagtcatcccactactccaggaccaggatcaaagcatgacctcccgagtaaggacccgctttctcaaagcgtacatcattattgctcttgtcggtcttgtgggggcctacgccaccggcagcagcaggaatagtgacactaccatctatgttggctgtctggttttcgctgttcttgcatgcattctttttctcaaggtgattatatcccctcacccacaagggtcagcatcagattcaaatggaaggtatggatgcatgaacatgtttctgcttccaaatattattaatatctgtatttccatcttaaatttgcatgctaatgaatcgctaggccaagcaatggagtaaagaagaacgcaagcaatggtggagtacagaccaatacaagcaatgcagatattctggagaaggctcaatctcttgttgtcctgctttccactcttgtaacaaccgtcacataccaagcaggactgatcccaccaggtggtgtttggcaggagaattggaaggagcatgaggctggcaatccaatactcttatctattcaaccagaacgttacaaggtattcttttactgcaactcaatagcctttgcagtatccttggtcatcatcatcttggtccagtacaagcctatcctcaagcaccacatactagagcttgccatgataatggatctgtttggcctcattggtgcatactctgctgggagctgccgagatgtaaccacatccatttatgtcattgccttagctggagttgttctagtctatgtggttattcatgttatattcatcacacttgatgaggacatgggaaagaaagatggggacaaggacaagaaggatgagggaaagaggcgcaagaggttgctcctttttgctgttttgtgtacgacccttacttatcaagctgggttgaccccgccaggcgggttttggctgaaggacgatgagtttgggcaccatgcaggtgagcctgtcctatcttacaactatccacgccattataaggcattcttgtactgcaactcaatgagcttcatgtcatcgattgccgtcattatactcctcgtgaacccgaatctgtataagccagccatacgaagctatgctctctctgtttgcaccgcagtaggcatgtttgctctcatgtgtgcctacgctgcaggaagcactcagcacctgaaaacatccatctatatctttgggttggtggctttggtcctcttcattatgattgtagtcctaatatgttttgtcaaaaaggaaatgagccagctaactcacaagatgaggaagaaagagtcgtacagaagtcccctccagcacaagatgaggatgtcatagaacaagaaactcaaacattgaagccgagcgagacaatgtctgccgatgaaataaaagaagacgacagaacaacgaagtccgcggacatagaaaatgcgggtgaagccaaaaataatacatccaacgagactaatgagaaagaaaaacaggaaagagcagccacagagtctaacgagaaagaggatgaatcaaaaaaacatgccaaacgtaaatactttatgctgctaggagtcttggctgcaagtgtgacttaccaggctggcctcaacccacctgggggtgtgtggcaaggtaacagcaatgggcgtgcagcaggtaacccggttatgcatgacaacaaaaggtaccgttacctcatcttcttctacagcaactctgcttcctttgtggcatccgttgttgttatcatcctgttgctaaaggagaaactgctaagggaggactggttgtttaaggtgatgaacataacgattgtgttgaacttgctcggcctcctacttgcctacatggcgggttccagaatgaggttggagtcttctggatatttcatcgcattagttatagctgcactaggcattgctgcaatccacaagatttggtcacgcaatagagaatctaagtaaaaaggaaaaggaaaaggtcaacttcgcttgttgtttacaaagaagaaaagtcaagttagggagtttagatgttctatgtgtgttttgtaacactatccatccatgagttctttgtttactgggatgcattctttacattccaatgcattagctggctaaagcaagatgcaatcatgctactagtccattcatatctcctctggaacagcccaaaagttaaaccagtgttacaaatattgaggttaagtcctgtataattattaaattggtccttcataaagtgtttttagggcttcaattaactctgtattgtttgaaagcccttgcccaattttcagagtccaaaacaaatattcaaacgtatggaaacattttatgtgggtttcaaataatccagtctgcttttgtgatattttttggacttcactccttcctttttcttttgtgattcctcggaagttgcacatgcaacacagtggctggaatttttccttgcaaaaaataaaaagcaggggctggaattgctttggttggacaaaaaagactttgaggatgaaatggttaggtcttatgtgccattctgtgagcctcttccaccaaatataattctctattcaaaactatcaccattaatttatgcagagatttgttctcaaggatgcatgccattaaaattaaattgaaatgtcgaagggcaaagagggagaggctggcgactagcctgtgtgggagattttagatggctctactggctcaggtgaagggattaccatgatggtgagatatattatatgactctacaggcattaaaaaaaaatctactttgcgctcgattcagaggtagtacaatagtatggatgagggaacaaactaaaactatatgataatatggatgcacgagcggccagggcctagtggaaaacatgaagaactttgccgggcatccatgttgaacctcacaaatcacaaattttgctgttttatttgaagacagttgaatgtatcagttaaggtgggatggaacaaagcaaacaaatggtgctgaaatgcaatgcacatggagtagaataaaaaaagtcaacaacgtcatgtgtttaaatacggaggtatgagttatttttatccaaaaatgatctataagagatatctgcattgtcccaacatattctataagaaacaccattttgttacagggtcaaatgaaactgtaacagtatagtactacagtttgtggaattcgttagatagtaatcagcttaccatcagcatttgctgggctattttgtcacaatcaaaacgactcaatttcctcctgtaagggtatatatatacaaatgagtgagcagtagtataactaagcaggaggaaggaagcacacggattaggcgagtagctgacctcacctcacctgtgattgctgtagtgcatcgcagccagcccagccagggcggccagaggaaacagccggccggagcaggaggagcgggtgcccggccgcagcgcgtacgctgcccgcttacccgccatcggagcgcgaggggatgaatcgaagagggcaagggggaccttgttggcgatggttcctggtggacagctgctcccgccgccgccgcccgccggcatttgtggtggcgccaagatagggtgatgggggaaacggcggggcggcggcaagcgggaggggagcgagagacggagagagctcggtttgcgggcggcgcacctttgccaccggccggcggcggcggcggccgtcagtgggtgggtggtcgcaccgcctcccgttgcagatcgggctcacatgtcagcccaaaagtgagcgtaaattcggcccaaaagtacgggtcaatttggtgaattttttttatttttaattttttttattaaaagttttacaaaaataatttttcattttgaaaattgacagaagtggtcacctaccgccctctgggagggcgatttttaaaaatcgccatcccagagggcggcgaaagtgacgtggcagacggaacgaaatttgcaggcggcccccttgccgccctccgctagggcgattttgtactgtgcggggggccgcctgcaaatgggcggcggggggcctggaattttgcaggcggcccccttgccgccctgggggagggcgattttatactgtgctttatattttttataaatatcaatagttatcaaatttttttatattgaaaactatacaagattaaaatctccaagactggtaaaatacaattttattatttttagggcctatttggaatgttaccgtacaaatattttgttagtgccaaaatataagcaagttttggcactaccaaatatttggtaaggtaaaattgcatttgatcatatttggtttgctgccaaaatgtaaaattgtagtgaagaatgttctacataatctcaaatctagattacgtattaccaatgaataggcttcaatcgaaatcaaacacaagtactattcaaattaccaaaatattggtagggcatgtttttggtagcaatccaaataggcccttagtcttacgcatacaaaaaatcaccaccataattaaacattgtaatgataagatagataagaagtgccatcgatacacggtacaaatttgtcgatcccgacgaatcaagcatgcggtaacctatcggccccttctaggtcggtcagaatgcattgcattctcgtggtccttcaatcgttgatactctacttgtgtttctgactctgttatcttctggccatgatatgatggagtgacattgtcgatccatcgagtaaatccacccatccttggattgccctgtaaaaatagtaatgttattcagtttgggtagtaattttgtgcaaatcatagcggattttgtaaatggttagacatacaacgaaatcgttgtctacattggggcagacaaaatatctccttcgaaatgtttgttcagcaaaggatgtagccacctgccagcgatctctgcacccacactttggacgctcggaccatttatgtaaccctaatggattgttcctccagtctaagcttgcaatttccacccgacgttcgtactccatccaagcatgaatgaactgtatggtcggttcaggttgcgttatcggcccgccacttgaagtaactctgactgtgtcaatccattgtacgaaagtgtgttgtcgtgagcataagttgttctagcaccatatgaatgaaaagaactatgtagacgagacaaacacaagtagtactgcagtagtaatagcaaaagtagtactgctttacaagtttgtaagccaaaagaaacggtcacataaggactgaagaggtagaacactactgacgaggcctcttacccctgtccctcctaccttgcgccctaatgtgcccctgggagtacgtgagtcggtccgggggtacggcacggccaacccgtcctgcctgtacaggtgtgacctctggctgctcctgagtgtgcgcctctggagctcctccaagctgagaggagcctagtacatcgtggtggtgtgcaccgtgcaagtcgtcgtcgtagaactggctagtaggaccagtcctaccgacgtgagacgaagaggccccagtaccgaagatcccggctgcaaatcctgctggacaaggaccatcagtttcatacatgtatttaatagtattaataaaaagtaaagtaccgtgtgggcgaaggatcgacgctccgtgagaggaagagctggcgaacgtgcccgaagaggtggcgaacgcccctgcggagctcgcggaagcgccggtcgtgcctgcgaacgcgctcgaaggcagacgaggtccagcgacgaggaaacgtgcagttaaaacatggtgacatattcgtgcaaaagctgaaacaaaaatgaactaatgtctggctgaactgtaccgtgcgaaaccggtgctgtaggtcgcactgctccgaagctaggggcgctcgaaggcaaacgaggtcctgcgaggatggaacatcaagttacgacggggtgatgttttcgtacaaaaacataaacaaaacttaagaaacctctgggctgagcagtaccgtgcgaaacaggtgccgtaggtcgaggtcctgctccgacggtaggcgcgcgaggccgtggttgtaccggaccagctggaggtacgacgtccacggcgttgcgacaggagaagacgcgcatgaccgcacgcatcttctcctgcatccggtcgaaggtcaccctctgctcaacgtcagtcaagtgcaaacctctgttcaacctcacttggactgcggtgatatcggcactgatatcccgtgcggcatcagcctatgcaagatggaaataaaaaattcagtagttgtcctatattatgcaagataaatgaaataattgtaagaactaatacaaattcgacgtacccccacgaagtagtctcggtcacggtgcgtgggatacgcgtccgtgacagcggcaacatgcggctctggggcgtctggagtgaaggtcacacgcgcacgagtgcgaggaaggtaccagcgaaggtagtcacggtagttctcctccgtgtgtgggaagagctcgttgatcacctcctctgtagctaacacccagtcgtcaacgtactgctgtacacgtggagcccaaagtgcgcctgctagctgtccccgtcgagtcaacctgtgaagagaggtaaattatatggctcgatgaatgaagtatcataaaaatttagaaatgaacaatccgaactcacgagtggtcggcagggaggacggtcggctgcacgttgcccggaaacacctgcctaagtccgaactgtctcatcacatgctgcgggcagtgaggctcaacgaaaatgtcgaacaccatcggcaggatggtgagccagtaagcctggtcgcgtgtgcacaaggacgaaagtcctagcggtgctctcgcaacgacggcctcttctgtgtacggctcccagatgacgtcgctcggctggagacggtcaaactcgaacacgaagtccgggtaacctcgtctcacctggacgtgagcgtaacgacgctgcaataaacatgatcggaattagacatgttatgtgaagaaaaaaaagaagacgactgataaacttataacgcagcgaagttgcactaaccccacgtcgacaccggtaagtccccatcgtgggaccgtcctctggccactgcgcgctgcgtccaaccccgtagggtgcgctgtccaccactggtcgacctatggcaaacctctcggctgcccaaagctgaagcaacatagggcagccagcgatgatcgctcccgcgtcagtcttcgtgcacgcctcacagagggcacggtacgtggctgctagcacggcagaaccccagctccactgcggcacgtcctgtggctgagcatccgcgatggaccgtgcgtagtggaccagccggaagtccacagcgtgcccgtgggtgctagtgaacatcacccacccgaacaaccacaacaggtacgcctcaagggagcgtcggaccgagtaatcatcagcgtcagggtgcagaaggtccgcctacaattaagaatgaaatgttagtacaaaacactctgttgatcgcaaataagcatgtatgataataacaacttatttacttacagtgaactggagcaaccaagccttgctaggcccgactgtagagtacggaggaagggtgttggccggtcctaggtgtggaaggcgcatcacctgctcgaagcgcgcagtgatatcctccttccacccaacaacaccgtccacgggaccaactggtgctcccgccagcggtagcccgagcaggtacgacacgtcctgcagtgtcggagccatctccccacagggaaggtggaacgtgtgcgtctcaggtctccagcggtctaccagagcggcaaggagtgaccggtctgcatcccaccgcttcgctgggtcacggtcgtcccttctcatcccaaccgttctgcaagtagtcaatagcccgcaacatacccgcatgacgatcatgtataaggcaaacgttgggcctcatacgcaccactgcaatgtgcactctctctaggaaccagtaccagctttcagtgttctcactctctataaatgcaaaagccataggtagaacctggttgttcccatcacacccaattgctgtcaatatctgacctcggtatttacctgtcataaaagttccatctatgcatagaacaggtcgacaatgcacaaaagcattgatgcaagcacccaatgagaaaaaggctctttgcagcacactctttgttcgatcatcaaccgatgtaaatgtatgtaggtcatagtaagtattattattcctctgggcaatggtggctaacaaacgaggcaaattatcataagaagcttcgaatgtgccatacctcatctcaataatcttttgtttggctctccaggcctttgcatagcttatggtgtacttgaatttgttctcgatgtgcctaataattgattttggttcaaagccaatgttaccaacaacactgctgtacatctcacttgccacaaaagcttaagtgatgtttcggtgatacttctccaccccttgtaagtagcacttgtgctcggtcacaatgctaactttccaataatcattccatttacccttatatgcatggacacgccacggacaatcttccttcatgcacctcacttcatacacataatttgttgacttgaccaccctaaactctctctgcaaggaaactgtccaatgcttcaccgcctccttcatctcatccttatgagcataccttgcaccctcaattacctcgttctccttatactcctagggtacatgatcaccctctgatataacaagtccagagaagtcctcatttgcccaatcagtggccattacatcaccttcctcatcggatgatgcgtcgtcgtccgcttcctcattatccgaatcttccctctccatttcatcaacaattataccgactctctcctcctcatccgccatgcccatggcctgctcctcccttggttgattttcctcattttgcatcgatggtccaacaacatcccttgcattgataggaccctctacatcttcggtttgcattgaaacatttatatctttctcttgtaccgacacaaatataacgaggggccatgaccgttcaaaagccatttccacataccgtctccaagcagcagtgctgtccatcggcattagttcccaaaaataaccttctgttgcacgactcactacaactgatactgacattgtgtagacttcttggtctattctaaatcctctcaacaaccaactataaattgactgaaatgttttctccgcaggcctatcgatgcccttagatgtcattacaaaatctgacagatcaacaccatctggaccaaatctaatatttccttcaccgtaaactatctgaaatgtgaccttatttgacattgtgcctgatgaaaacaataactgcgttaacctcgcatttctgtactacgccctaagttacattctctacaatattgtcacgccctgaagttttccccctttttgcttgctttaaaaatttggctaaataaatcgtccgaagaaattatcttaattaacctagagctaattccctaattaataaatgcaaataataatcggaatcggcatgtggaatttttcttggattctacatgtcacaatatattaacaggatttttagtggaattttcagagccttggaaataattttaaccaattaaaaatcaccaaagtgcaatttttaatcccaggaaaaatcctttcttctttttccttttcttttccctcctttttctctattgggccgtcggcccagtccactccacccgtcgcccgcgctcggcctccccttgtgggccggcccgttctccttcctcctctctccgggacgctgacaggtggggcccacctgtcaggtcgtccccttcctccagccacccgcctccgacggcagccgccgccgaatccgccacgtcgccgcctcctccgctcttcccgcgcccacgccgcgccgctcccgcgtctcccccccccacgtcgccgcctcgcccccgcgtctcccgccctcgcgcgcctcgcaaatgtgcgggattcggatttgaatccccctctctctctctcttcctccccactcccccacatcgccggccaaatcggccacctccccggccacgtccgccccctcccgcacctataaatcgctccccgcgtcttcctctctcgtttttcgcactcgccgcgctctcccgtgccgtctaccgccctcgcgccgtcgcacccgagctccgccgcttgccgccgccttcggccgcgagccgccgccgctagagtcgccgccgcgccaaaccgccgccgccgttagcttcgccgctgcaagagctttcccggccgccgcctcgcgtcgccggaatcccaccggagcacctctcccctcgcgagccggtgagtttttcccctcccctccatctccggccggcaattcaagccgccgtggtcgtcgtctcctctcctaacgcctctccatcttctcctagggtgtcgccgccgcccgtccgtgcctccgcgtcgccggtcatcgccgctcgtctcttcccacgccggtcgccgccatcgcctcggtgaggaatcccctttcctccttcctttcctctcccccgtgagcgccgccgccctccgcgcgtccgccgtcgtcttcggctgccgccgccgccttcgcgccggctgccgccgtctccccgcgccgccggtcaccgccggcggtcgtgcgccgtcgtcgcctcgccatggccggccggcttgagccgtgccaagccagcggccacgcccctctcccgccctgtgccgctgcccggtggggcccaccagccggtggaccacccctccctctccccttgtgccgctgccagtggggcccgcttgccagccgccccctctccctctcttagtgccgctgaccagtggggcccgcctgtcggcgccaccccctccccttgctgacgtcagccctgggtattattgcgcaataaattaattaaggacttttctttattagtaaaaacacactttatcttctaaaattcataagtaattcatccgagctccgtttaagtccattcaagtctcagtaaatcaagaaaaatgcaaagaatccattaaaaatggttttgtttcctgtttcagtagtcttatagcatgttttgcttgtgtgctttgtttgtcgcgtaggtttcggccgtttcgtcgatccacggtttctcgaagacgttgctgaggtctcgtcagtgcgagagcaaggcaagtcatgcaatacgtttgatcatattgtacccaatttacaaatatcccgcatttctattaaatgttgcattcttttacaatatcatgtgggatgggtcctattactcagccatttattgtttaccatatgccattgataacctgggtatcaaaatgattagatgttggtttaggaaatgcttagccatgcttagctcaactagtacacaaaaagggattacattattacatagactttgactatgagcatagctttggattggtgccaccgcaatggtgttagttaattaaaatacattgaatggtgggttgtgggtgcatggttttgctggtcgcacccatggcaattaaggaccggttcacgggaaaccctgggagacttaccgtgcttaccacaagcgggagtgggtaactgcttgatctgaagtatagctcgaccctttcctaggcaccggtggcgagggtgggcgtgatggagttgggtcggccggggtgtccggttgtccagctgccggattcaccgcggcgcaagaggggaccgcccactgccttttgaggggtgggggtgaaaccttagcgtggtgtggatggttaggggagggttatgtggagggtcttgtcacgatttccccctttgcagtatcatggtgatacttcggggcatggcgacatgtgtggaatcgtgtcttgtgggtacagttgtacacctctggccagagtaaaactattcgaatagccgtgcccgcggttatgggcgatcaaccagattcaccgtgattagtctcatccctagtttagcttaatgaactggtgtagttcaggtggttggctgggcctgttgcaacgtggtgtagcgttggacagtgtttggttaatattgattaattactacaactgtcttactgctttcaactactgcttttaaatgctagctttatgcaaaagaacctctagcttcctttggttatatcctgcatcatacctcctcttccggtatgacttgctgagtacagtgggtagtactcagtcttgctctcttttcccccacaccagagctgaagatcttcctagttggagctgttttgtcaaagttggtttcgtcgctgccgtcaaggattgcctgtggagtggagtcgcccgctgctgaagtcaagcttcccggtttagctcgcttttatttcttttccgctgcatttgtaatcttttctatttttgtaagacgtggatctgtatgtcaacaattgtcgtttgtgtaccctggctggtcctggacagggatttaatgcacattcagcttagaaattctggtttgagaatttctgggcgtgacaagttggtatcagagccaggtttgaccgtaggacaagccaactggaaacctaagagccctctgaacccctttttcatctgcatatgcctttttgcacttggattttgttttggaaaaatttggagttttgcctctttggtttgcgggaaaaatcttggtcgttctttcggatcagatttttttttaaaaaaaaaattagctcagtctagggctttagaaaaattttagttggagtttattcgacagtcagtcgggaatttattgggggttatgcattaggtcgtgtctatattcgatgggggcaatgttatgcgcatcattttccatgcaactagtctatgcattaatttattgtttagttgcattagtgtctttatttgagttcatgaaaaatgttctatgcataaaaatcatcctgctcggttatttatttgagtcttcttttgctttgtttaatttggatttgagcatgagttggttcctatcccttgtctactttagatgtcagtcctatccctcgtttgcaagcgccgcctcgagcttcagagtcgccgcccttagctttatcgccttcttagtctgtttgcttgctagttttcgtgtttaggtttgttgcttgtgggttagtcggcggtcgatatcatgtgtcagtggtatgactgcctcaattaggagttgcgtgcctctttttcagtgttttaatcaagattaagataattgcacttaaattcataagcaagattagtttctgagcccctgtttttcttccttttctcatatttctacctatccccttcagatggagacaaggaatggttcacgcgactcgaacaacgccagtggcagcgaagagccgatcaatggagcacgtgccaacggtgcatctgacaacagtccgtccccaccgcccgagaacccaacaattgctcaggtgttggacaatcagactcagatgatgacaatgatgatgcaacagatgcagcaacagtaccatcaggtgttgcagcaggtgcagcagcaagcacagctgcagcagcagaacctgcagtttggttctccacctcctcagtccaaactgctagaatttcttcgtgtcaagccgcccaccttctcaagcaccaccaacccaatcgaggcccacgactggcttcatgccattgagaagaagctgaatcttttgcaatgcaacgagcaggagaaggttgcttttgctacacaccagctacaaggtcccgcttctatttggtgggacaactacatggtgacccgtccaactggggcagaggttacttggacagagtttcgtcatagtttcaataaagcacaggttcccgagggaattgtgggacaaaagaagagagagttccgttccctgcaacaaggaaccagaacagttatagagtatttgcatgagttcaaccgcctcgcgcgctacgcccctgaggacgtgcgtaccgatgccgagaggcaggagaagtttttgtctggtcttgatgatgaattgactaaccagttgatctctagagattatgaggactttgagaagctggtggataaggctatccgtcaggaggagcactgtaacaaaataaaccgtaagaggaaggcagcccagttcaggactccccaggggaagagtcagaagcctcgtttcacgatgggacatcacggtggaccttccaccatgattatccggcagcaccgtccctaccacccgggtaacttcaacaagaaccaccatagtgacagtcacaacaatagtgagcagcacagcctcaaccctactccgagttcactaaagattccagctcaatcagttcagccagctctgccagaacagcccaagaggtggggagaaaaacccgaactctgcttcaattgtaacaaacccggacacacggttggaaagtgcccgaagccaagacgtgccggacccaagttcgttcaggcccgtgttaatcatgcatctgcagaggaggcgcagtcagcaccagaggttatattgggcacattccccgtcaactcgacaccggcagtaatattgtttgattctggtgcaacccattcctttatttccaagcgttttgctggtgcacatgggttatctttagtgaagcttaagataccaatgcgagttcatactcctggaggtggcatgaccacaactcactactgcccatctgtgacagttgaaattcaagggttgatttttccagccaacctcattcttctcgaatccaaggacctagatgtcatacttggaatggattggttggcaaggcacagaggagtgattgattgcgccagccgcaccatcaagttgaccaatgcaaaaggagaggtggtaatcttccagtctccagtgccgcagaagccagggattagtttaaaccaggctgctggtgaagaacaagaggtagcagtggagaaaaccactaagaagctggaggatattcccatagtcagagagtatccagaggtttttccggatgatctgacaacaatgccaccaaaaagggatatcgagttccggattgacttggtacctggaactgcaccgatccacaagaggccttacagaatgggagccaacgagttggcggaagtcaagaagcaagttgatgaacagttacagaagggatacatccgcccgagcacgtcgccttggggtgctccggttatctttgtggaaaagaaagacaaaaccaagaggatgtgcgtggactaccgcgcactcaatgaggtcactattaagaacaagtaccctttgccaaggattgatgatctgtttgatcagttgaaaggagctactgtgttctctaagatagacctgcgatcaggctatcaccagttgaggatccgcgaagaggatattccaaagacagcattcatcactcggtacgggttgttcgaatgcacagttatgtctttcggactcactaatgcacctgccttcttcatgaatttgatgaacaaggtgtttatggaatttctagacaagtttgtcgtggttttcatcgatgacatacttatctactccaagtccgaggaagaacatgagcagcatcttcggctggtacttgaaaagttaaaagagcaccagctatatgccaagttcagcaagtgcgacttctggcttaaggaagttcagtttctcggtcacatcgtgaatgctcaaggagtagctgtggatccagcaaatgtggagtcagttaccaaatggaccccaccaaggacagtcactcaggttcggagtttcttaggacttgcgggttattaccgccggttcattgagaacttctctaaaattgctaagccaatgacacagctattgaagaaggaagaaaagtttatctggtctgctgaatgcaataggagttttgaagaactcaaacgacggttggtgtctgcaccagtcttaatcctgcctgatcagacgaaagatttccaggtctattgtgatgcatctcgccaggggctaggatgtgtgttgatgcaggatggcaaagtggtttcttatgcttcacggcagttgcgtcctcatgaaggcaactacccgacgcacgatctggaattggccgcagtcgttcatgctttaaagatttggcggcactatctcatcggtaaccgttgtgaggtatatacagatcacaaaagtctaaagtacatcttcacccaacctgatctgaatctccgacaacgaagatggttggagctaatcaaagattatgatatgggaatacactatcatcccggcaaggctaatgtggtagcagatgccttgagcaggaagagttactgcaacgtcgcatgggtagaggaactatgctgtgaggttcaacatgatttggaacatttgaaccttggtatagttgagcacggattcgtggctgccctagaggcacagcccacactggtggagcaggttcgcatagctcaagcaagtgatcctgaaatagcagagctcaaaaagaacatgagggtcggaaaagcccgaggttttgttgaggatgaacaaggaacaatctggatgggagaaagattgtgtgtacccgaaaacaaggaattaaaagacctgatactaaccgaggctcatcaaactcaatattccattcatcccggtagtactaagatgtaccaagacctcaaagagaagttttggtgggtcagcatgagaagggaaatagctgaattcgtagcactctgtgacgtctgtcaacgagtaaaggcagaacaccaaaggccagcaggtttgctacagccacttcagattccagaatggaagtgggaagaaatcggaatggatttcatcaccggtttgcccaggacgtcatcggggcatgattctatttgggtagtcgttgaccgactcaccaaagtggctcatttcattccggtgcacactacctactcagggaagaaattagcagaactctatctggcaagaattatgtgtttacatggtgtacctaagaagattgtgtctgatcgaggaagccaattcacttcaaagttctggcagaaattacaagaagaattgggaacccgattgaatttcagcactgcttaccatccacaaacagatggccagaccgagcgagtcaatcaaatactagaggatatgttgagagcctgtgcgcttgactttggtggggcatgggacaaaagcttgccgtatgctgagttctcgtacaacaacagttaccaagctagtctgcagatggcaccgtttgaagcactgtatggacggaggtgtcgtactccgctcttctgggatcagacaggggaacgccagttgtttggtacagaagttttaaatgaggcagaagagaaagtcagagctgttagggaaagattgagaatcgcgcagtctcggcagaaaagctatgcagacaaccgccgaagggagctcgctttcgaaacaggggattatgtgtatctccgtgtcactccgctcagtggagtgcatcgcttccaaaccaaaggaaagttggcaccacgctttgtgggaccatatcggattttggaacgtagaggtgaagttgcttaccagctcgagcttccctccaacatgcttggcatccataatgtgttccacgtctcccagttgaagaaatgtttgagagttcctgaggaacaggcaagtccggatcaaatcgaaatccaggaagacttgacgtatgtggagaagccaactcgtatcctcgaaaccagcgagagaaagaccagaaacaaagtaataagattctgcaaggttcagtggagccaccactcagaggaagaggccacttgggaaagagaagatgagttgaaggccacccacccgcacc

SEQ ID NO: 64 - DNA, 2850 bp, Oryza sativa
gcctcccctcccgcccctgcacagagaaagagaggagagatagagaagaaatggaagagatagaggagaagtggaggagagggagccagccttatctcctcctgtgggccccgcaagtgtatgattcggatatatatatatatatatatatatatatatatatatatatatatatatatatatatatatatagtggcagaagtcatctcaaacaggctaggacttcaagccgtttgaggtgagtaaacctcacctctgacgggccgtccagctgcgacccgtcacaggtaactagtcacctgtgacggtcatcagtgaccatttcgtttatccgtcacaggtatcccgtcagagatatgagaatctggtgtagtgaatgatagttttcctatcccttctttctatacagttaaggccaaaagctcaaacctcgtgcttccacgtcatcatcaaattatgaaccgttgaatgaatgcattagattgcttctcagacgttggatgaaatgcaacatagaacccaacccattagtcaccaggtgagtctcttcgcctcctcagtatcaaatgtagcacatatgaacacattggcccctctctatacacatttacatgtatccaacccgtcaatccgtataaaagagctttacggctgaacgctccttcagttgacatgtgctacctaaattatctacaaattttagatagggctgctaaaaagaatttctccaagaaatctatttgtttcttctgtttcttcttaagattgtacttcctatctaacaaattgatgttaaccaagtcctgcagcaacgcacggggtatcctctagtttttttaatcactgtttccctgttcagtcacgatattggattttggccccccacgtaaaacattattttattgatacctgtgttgctcgcgcgtgaaaaactgtgctttattctctttccttatttctcttatttctctctcttccacctaggaattaaatgacgtggcatattttggagcctgccgagtcatccatcctattgtaactgctcttaggatttaaatcttgatattattgaatgtagatttagtggacttcaacaaaataattagtgggatcagatatacgctactggtttcactctatttgaaagtgggttaagggacacacttaggtgtgtgagcgtggcgtgcctgtgtggtgatgtgtgcgatgatgataataataataataataataataataataataataataataataataataataataataataataataataataataatagcacatgtgaatgcatgcatggtggtggtgtgcgtgtgcgtcatctgtgtataaaaaatatataataataataataataatacttatatagcacgtgataaaaaacaatctatctgttttaaaatataataatctagatttatatcactgattagtactctgaatcttaatcttgacagactcaagatatatatatggttttaatttatttaaatttgtattataatgttgttatattttagaacagagagagtataatatactatacattcttgaaatgaccttcacaatcccatcatctcttgaagcttttaccacgaaacttgattgacatggtatgtttcatggaaatacatccaacctgtggaactaggtgaagattgaagagcgaaaaatttcgtagtgttcgtaacctgaaactgagtacccccgtatgccacatgtcggaagacaccccttactcacgcagcgatcacaaggagggaacaatagtgaggagaaagtacgtgcggtcaaccgtcaccgccgatgtaatgccgtaattattgtgtacacgatgtaaactattttggatgtattgattatccatataaatcaattgatgtatggcatatgttaattacgcacgattattagaggtttcaacaagtttaaatcatgcatgtatatgctagttatatgtgatacttataatttttaaaagttttaaatcacacaggtggcaatttcatatgtatgttaattagagtttttaacatttaatttactagcattcatatgctaattataattgactagaggatttttaaaagttttaaatcacgcaagtggcaatttcatatgttaattagagtttttaacatttaatttactatcattcatatgctaattataattgactggagaatttttaaaagtattaaatttaatatatttttaaaactatcattcatatattagagtttttcacaatttaatttactatatttcatatgctacttatatatgactattcgaatttttaaaaggtttaaatcatgcatgtggcatttacatatgttaattagagtttttagcatttaatttaatataattcctacactaagtatatatgatgattacaatttttattaattttaaatcatgcagtatgtacatacatatcttaattagagtttttaccaatataataatatcattcatatatatgctaagtatatatatatattggaatttttattaattataagtcatatatttgcttattacgatttatccacttaatttattacagacaaaaataatttttcgaagtaattgtcattaatctttgtactttaaataatgttaatgcattaacttctattttataaacacatacgtaagcgaaaatcatatgcagtgctataatctttagtcccggttcttaaccctaaccgggtttaaaaagaatttcgaaatagcgggaaaagatatttacttccggttggtaataccaaccgggactaaagatcatctttagtcccggttgttctcaacaaccgggagtaaatatct

SEQ ID NO: 65 - DNA, 558 bp, Oryza sativa
actaaagatattttggaaagggactcaaatactaaatattttcatttggtagcaaatggtaagcataggaaaacaaggatttataagctacaggattgtgattgggtaatttatggtgatgcgaatttaaaggcgcatatcaccacttattataaaggtctttttggctgtcttgaagtttcttctttaacgttagatgaaagccaaataactgatattccacaagtttctcaattagaaaataatgctttagtacaagatttattttttgagaaggaaattaaagatacgatttttcaaatggaacataataaagctctgagtccggatgaattcctagctgagttttatcaggttttttggaattttattaagtccgatttggttgatttatttaatgattttcatagtggtagtttacctctttagtctcttaactttggttactgcccaagtgcaaagaggccttgaaaattcaaacatataggcctatttgtttacttaatgtcttaatgttagtttgaaaatttttactacagttgctacaaatagaatttc

SEQ ID NO: 66 - DNA, 621 bp, Oryza sativa
ctgaagtcattaaccatcttcagatactgaagaacacaagaacaccgttcaattagtctgatggcaaaacaaatatatttgcccaaactgctagctattattcaaaattgccgagattaatatgcttttatatatactattagaatgcacaaaagtaatttttgtggggaatattagtaagacacaaacaaagataattagcattaattagtataccgtttagtggcggcgtagacggagtagagtgggaaggaagggatggcctccgtggagccggagccgatgttgacgacggcgcccctcccccgcgccaccatccccggcagcaccgccgccgtcacctccgtcaccgcccacaggttcacccgtatcatcctcacccacgcctccgccttcgcctcgtgcaggtacaccgcgcacggccgcgccacgcccgcgttgttcaccaccaccccgacgtccagccccgccaccgcctcccgcagccgccgcaccgcctcgtccccctccgcggtggacgccagggccaggtcgaacaccacgctcctggtctccacgccttcgtcgcccagcttggagatggcctccgagacgtcgcggagcttggccgggtcgcggccg

SEQ ID NO: 67 - DNA, 6251 bp, Oryza sativa
aaaaaaaaaaaatcaagaaaccggagattgctcctcctatcctatcttttttaactgcagcttgtggttcaggttggaaacatggaagtggtcgttgaactcggagaaatcaagaacgaactttcccgcttgctcttgtccaggaaacaatccactctttcccgctcgcaccgcctccaatcaatcaatcaatcaatcaatcagtcaatccatcgagattaaaggcgccacgaactcagcgggaaatggcaagaaacgagggcataaactagaaaccaacccccaatcaatgagaaaaaagaaaatcaggagaaaaaaacaaacatcagcagcaggcagggcgggcgtttgcggaggccaatcagaatcagagagcgattggagggggggagcctgggtgaggttttgtgtggaagcaacggatgggcggtggtcggcttcgggcacggaagactttgatttgagccgccggcgaagaggaagaggagaggaggtgaagaactgaaaaatgaaaatgaaaaaatgagaatgaaaatgttttgaggactcaacacaacagtcaacacaacgcgaggcgtacggtgtgtgtgtgtgtgggtcttctctcctctgctgactttcaaaaccgctccgctgcccgttagcgtttgcttttagcactggtacagttttactatttcgacttttttttaaaaaaaaattacacttttgttcctctatgactacaacctctccactaccaccgagaaaaaaaaaaactctacctcactttacctggcaagcacgaatggctggttcagtttgttatcatttctaaccttttcaaatttcaatattttaagggtaacaaactaaacacggttcaattttattgagttttgacattttccgaaactttctactctcaaatcattaccgaaatagagtctaacatcacaattctcaccttatcttatatgagatacacttgatagtacatagtacattaataaaggtgtgtagttttaactatgagttcctgtattcaatcccgtacacggacatctctacccctctaagcctctcttttttttcaccttacatactgtactaggtaatacctcattttctgtgctttatatgaaaatttgtccgagttagcttaacaactctatcatttcacttatgcttgaatttataatttaatatttaatatttaattttgtggtttttttactgtggcttatcttatagcattttcttttgaatagttaacgacatgtctataatatttttacttataaattattttttattgctaataagcgaaacgatggacacgtaaggctgataagacgtggagaaatgaactaaaaaataatagtttagacacctttttatacacatattcttagctatctaaaagtcatcgttgaaaatttaactacgatgaaaaaaaatcttaaattaaatatacaattatgttttaaaatttaaatttcggctgtggctagcaagacaacaagcagcagacaatgaaaagcgccggccaaagggaggaagagtgcaagacatgaaaaaaatactattgggtttttttatgaatcatttagattttattagatattcataagaatctttcaaaattttatagaaatttgtgaaaaatattatgtgtttcaaaagagatttgtgtttagatgagtatgctgggatctgtttatccctgcacgcgaaatgaaatgacccattagcgtatgattaattaagtattacctatagaaaagaaaacttgaaaaaaataaagaattccctatagatttttttaaaaacaactttcctatagttttttttaaaaaaatacatcgtttagcagtttgagaagcgtgcacaagaaaaatgagagaataaaagttgagaaaatgtagtatcgaacaaagccttactagtcgaataaggtcctattcaaaggcaggaaaaaaaattcgggacttcatttgaacacaggaattccacgtgtatcaattctaccggatctaaaaaaacacgtggcactcaaatgagggtgttatatgggaattgaagtgtttcaagtgaagttattgggtttcaatcaggccaaattacgagttgtcaaaagattttctttttaggacaaaagaaattgtgcacttgttaatccctgtctagaacgcaggaaaaatccctctttcctgtggaaaacataattattttatatgaaatcaatgtgttctagacaatgaccagttcttgagcatgcttcaattatcaggagcagtagccagtaggattggagtgccatgttgactttttttttaaaaaaatgggattactgttttttgtccttttttttaacagggataagatcactttgactaattatgcccatcttcagatatgttgactaataagttgggtccatattaaggtacagcactgacagcagctcttccttcttgaatgccttcatgtcactgtgggttcttctgggactaatcattatattcttctctataaagttcatgtgaaatcaagcttttaaaaaataattaataatcctattagattaaacaggtaatcaagtgccaaatgcacccaacagtatgcagcacgagaaagctggaagctgtcataaaaaagcgtgacacatcgacacgatgattatccaagctagaggcaagctataatcataattccacaggacaaaactaaattccaaattagcagaatgagtagtgtcttttttaaataaaaaaaaatctcccaagaagtactttgtcggttgcagctgtgtggtcatgactggactgggtaaagaagaggcagcttgacagcaaataattttcagctaagaaagtttgacagggagcatttgtgtcaacgtcaatggacacagcacacggacagttcgaagaatatgacaataattaatagcttctctctagatgaactgtgctaaaagatggagtattccttggaacaaccaatatgacctctagaagaagtacaggttttacaggtgtgctagccacaagggctgttaaacaatcaactctccagatgcagataaggtttagcaacttgatagatatacacataagattatgacgtgatttttccccgtaaaggaagtgttggaaaaaatttcaaaactaaggagtgtactggttccagtttcaatttttcctggaagttgcagaaattcttgcaaaaaccgaaaaggaggttaggttactccatatcaactgaagccatgtttagatcaaaagtaaagctgcaaagcttttttgagcgcaagctaacacggcagatgacatattactccagtatttgccccaaggaacaattcagggtaatcgttcacccgcaaactcaagtgtcacattaagaagcgaagtaaaaaaaaaaagcacaaacctagagtaggagcagaaacagaggtgattagctatctgaagtctggacagttaccttttgcagcacaagtgcaaggaacaggagtcttttgtgaagatgtccaggtttgactctatgaattcttccagactgcttgatattgccatattggaacctttcagcaagcacagcgcgaatcgaaaacaacagtgaaagaaaagagagtgattcctcaagactaatttcattatttgtactaaaaattacagaagttggatgcaggtaataaggcgcatcagaactagataacataacaacatcaacatatcaacaatgctaatatgcagtttattcatttcattgaccatagcaccaatcttactaatactgtacattttggttccaatcaactagaggggattttccacagataacaaaaccaaaactatggaaagatcaaatgcagattaagtagcattgtagcactacagagagggaaaattacaaccaggataagtatcacaactggtgcaatgcaaactcaactatggtacaagggcaaagccatcatggaaacagagtaaaaatcctacatgtattccctcaggacaagttgttttccatctcatgctagctgctggtctcctctgaatcagcaagcacaaactctgtgtacaggttcttcaatgccatcaccactgtcattataaggggacctaatattgcaccctgcagagttacatcagatggtcagcccaatgtgagtaaagaaaatatcaattctcagatgctcggtggaatggcactctagtacattggtgtgctccatgttccaaggactagaatgattccataagaattttctggacagtaaacaaacagatgttgtacagagtacaagtgtacaacacacacagactatacagaaaatcattcaacataatacattagtgtccattttttgtagcctagaagaaacgcaatcttttcagattttagctactagattatttaaaagacttccgatatagaagttacttttaaaaaatcaaacaaatccatatttcaagcttgtaatagttattacttaattaatcgtgcgttaattacagaacttcactgataagatacgtggctgatcagccaaaaccctcctcaacagggccttaaaatgtataacatcataggcatgaaggccagatagagtataacttttttttttggagtacaaaaatgattggagttacacccataaatagggttgaaaaggtatagatttttggagcaagaaaaaagcagcatgtatgaataggggatataggtaaaatagatatgcttttggtgcccacagtaggagattctttagtatcaaatgcaaaacgtaaagcatttattctagattatgtcttctgattatccacaccatatgtaaaatcatacaattgaactaacaaaagttcatcttcaaagcacctaaatgttgtctgaacgaaaatggtgaaaaacatttaacacaacaaaagtgaatagatttggtataaaaagtcagtacctccagagcattggggaacaatgccatgccaccaattatgctaaggccagtgagatatccattgtacccgggtatatcctcctgaatgactgtagttccataatccatgattatgagatgaaccactgtcaccacaatagcgagcacatatctcccttccatgagcagctgtcctgcggcaaatatcgaggacaaccatggtgggagtattggcagaagtgcactgatgattgcaaacacagttgatgtgtacacaaaatgcaccttgaagagcttgaacaacagccatgtcaggcatccctggaaaatggcaatcttggcagtggctaacaagacactactaatggcatggtcgatgacctcgacgcatcgatcctttacttgttttgacaatggcaaaagatcaatgacctgctctgtagccccacctccctctacagtgatgaggtagtacagcacccacaagaaaaccatcaactgtgacacaaaattgagcacctcagctgcaccagagacaatgtggagagtaatggataacatcagattggcactaccaccgagcaccgatgtgctgctagacagcagactttttgcgatctcagccccctgcaatgccaatcccttggccttcaccaccaaatcctcccttgtgattaacagctccctaaagaatgagtccagctccctgtaaatgtccatccactccctgttcttcacatgcttcgcaataacctgtagcttcatcgagtacgggtgtggtccggatgtgatgagctccttgccctttgcaccagatgggtcaactgattggctgatcaagaaatgccggaatccgctagtgaaatcggtaaggttgtactgcactgctaactgatctatctgctcccacacggtatcgtagagcttcgcggaatactgatcaaccaagccggggatgtcattgtcgtcaagccacttcttgaggccaatcttttcagagtagttgccattctcgacatgggacttgagggacatgacagcgtccttgccctcgagcccaatcttgtaggagaagaagacgctgccggataggaacccgagtatcatcccgagcatgaggccgacggcgacgagcgtcttgaggtggcggaggatgccgccggtaaggaagaggcagcgggaggagggtgttcgtccggcgattcgggaggaggcggcgcgggataggaaggaggagggcttgggggatgcggcgaaaaacgcgagggagagggcgaggaggaccaacgcggtggcggtgccgaggcggtcgagcaggaggagg

SEQ ID NO: 68 - DNA, 5995 bp, Oryza sativa
agcgccgtggcgagccccgcgtgcgccatcgcaatgtacagcgccagccgcgcgtcgggctccagcgacaagcccccgatatcgtcttccgccggagacgccttccccttcccctggggctttttggtcgtcgtcggctcctcctgcttcggcagccgcagcgacgcggagcggaacatctccgaccaggggaggtccatcacctccccgtccttgcacgcgcctccgttgggctcacccttagccacgagcgccatgtcaccggcgccggaatgcctgcgccgccgacttcgccgccgccgccgcggagggcaagctccgcctccgggtggtggtggaaatggaatgggagggaggaggggatttggggggtgattagcgcgggtggggtaaccatgatgggagagattaaggaaagattaattaaattaagcgggggattaattaggattaagatgtcgcgttttggaaagggaggggaaggagacgggttaacgccttaacggtggctaaccgggtacgcgctccgaggctgacgtatggggccccaaggggatggtgacacgtggcaactccctttctcgtcgtcggcaatggggagcgttgctctgacagctgtgtctgtttgggcaggagaatacgaggtggactgttgatgaataggctaggaggttttgcttaaactgattataaaccataagagtaaaaataatgaaaaaaaatactgttcgtaatttaaaagttaataaaaaaataataaataaaaaacttttaaaaccaactctagaattagcttttaaagtttaaattttttttatggtttattcccttcattccaattcccaaatatttatggagtttttcaaggaaactaaaataaataaaattgagatgtctaagtgattccaacgatattaaaacatatatgtcataattttccagagattgttatattttgagacaaattttaaatgctagaaattactataatttttgataaatagagtaacaccctaaaattaaatccagtatattttatagagacctatctcgcacttgttataattttatttgttgtcaaaaagggttagaatctaatatttaagtatattagcatatgcaacccagaagacaccacattcatttctcgggaagactagttcgcaaacgctctcaaactaggcatctcacgaatgggttttcaaccgtgtcacaacaaacacacgggttaggattaaggtagggttttagggatgggggtagtgattagggagaagggtggtgttggggagagaaaagaggggatcgggtttagaggaatttaacctgaaaaacagcagatcggtgatgggcggtggaaagggtgggcgcagttgatcaacgaggctatatatgcattaaatctgctgattaataaactgtctagttgacaaaactaattaaagtgtcactaattaagatttagactatgcatcaacgggtgatcaacgagagtcacgtggaatcggatcttatagctagagggcagttccaactctgctaattaaacactccttgtcaattatatgtttttagtctcattaaggagaggatggcaaatcactgtcacgcatatgcacgtttctttcttccctatctgtccgagaccggcaaatgctgtcatgcatatgggtccggtttacagttgcattattttgccaatatacagctggacgcatctacgaagtcttcaattgattttggggagaaaaatacttgagaagccttttttttccgtttacacgtggaacacacaaacaccactacacacataataccacactcgcacactgtaaatacgttcactaacacatgcttaaaaagacgaaaacaataatacatccttgatcggtctcactaaactcgtgttcaaaacctatatacttgtgtgtgcgtaagtcaccaccacaacactagtgcttttgtaaaagatggtattttaaattcagagagcatgcatttttatgtattaaactacgtatgccacaatacaacatgcattttttatgcaagcctcaatgggatgcattttgtaggcagcgatttataaacaaagatatctatatatttaaaaataatattgacataagattcagtctgctaatttcacatcacatatactatggtcagacaatgcatgtgtaatactacttctcatatgtaggtcccacttgctcttgctctcaggctcacatgacagtgagcagcactttgctatatggcctgtggaggatctcaatccactattttgaccgattgttgcctataaatactacggtactggtctgtgatctaggatgaagagctgcaaatttctacactaagcaaagaaaagaagaagaagaaaataagctaaaataatttttatactagttaagtttgaaatttgacattgtcagccgcaattcaaacgagagcatgctccaaattaaacactttcaacaatcaatatttccagaaaaacaaaaccatcaatataatttcttttttaaagaaatgtttacacatggtctggtgcattggaaatggaaattgtacggcatgattgccaggtgcgatgcacatcctcccaaacaaaaataatgtactcctactagctaggatgaacataatcttctgagaattttttacttaaggactaaacaacatctaatctttatcctccttattttagagatggtatgccactattgtaccacactaacatgattccagacttccagcatatacaattcatatcagttgcaccaactttctggagctttgctaagaaagctggcccctaacgaactttgtcgaaaacaatctgcatcgtgctgctgctagtctttggatgcatggatgtgtttaatttatgggttaatttgatccatgccattgcaagtttatcgatttagaaaaactaccactactattcacgatatcggttgggtatcactgatattttacaaaattaaaaccgtaccattgtcatcacattttccatccctttcgtctttttccttcttctccccatcgaggggttaactgcaaggaggccgaccaaagagctctagcgaagcgagcggcgccgaagcccgggagcgagagaggtcaatgccagagagggatgacgtggtgaggacagcgtcagggacgacaaagcagcaagtgacaaggacagcagccggtgcccatgaagaacatggaggcggagcagcaagtgacgccagcggcgaccaccatcacctctccattcacggtgaggagtaggaggtgaagatagtagtggcgcctagttttaataggaatataagcataaaacaaatgattgaaaaatttaaaaattgttacaaaattgaccatttaagtagaccgcaggagaaaaaacacaggaattgaatgaaataaaaagacacaagagatacttttcaataggtttggaggtcttcctaaatttcctctaaaatttatgtagtctataggattgtggataaattttaaagggaatggtaggatttaattcttgatttcttggttttaaaggtttttctagccatttttcctacggaattggaatcctctaaaatttgaaccttcttttacaaattatataaattaaggcggcttactgtttacatgattaatttgagtgggtatggaaaagtgaccacgcatgataatacattaatattgtagaacaatgcttgctagggcactgtttacagtcggtcaatcccaaaataagtcaccctttatatataaatctaaacacaaactgtgtcaagatttatgtacagagttgattctttttgacaagggtgtactatgcatgcacagtgatagtgagtgtacagattgatctaaaattctgaaccattagatttttatccgtcgatagatacaagaacctaatgtccatgtcaaaatcccatggtttccttgcattagtacatatactccatccattcatattataagtagttttttctagtagtcaatctttttttatcaagtgtataaaagaatttaacaacatgtgtaacaccaaataagttttaattgaatataacattaaatatattttgataatatgtttgttttgtgttaaaaatattactatatttttctattagcttttaaatttgactaagataaaagttaaaaaaagaggttagagattataatacaggtagtatcaataaaggtagtagagtaataaatacagagtataatacttcctgatgaaatttatagagatagatgggccgattaatctgtgggccctaattcttggtactattgcgaacataggagaagggtgcatatggaaaagtgaccacacatttttaacaattatatatgtaaagaggaaaacaacattacaattttgtactggcaaaagagaaattacctctacaacggtagaattaattttgacttgcaggtgatggtattctttttcccctcaaatctaatcgtagtctgtggtggtggatccaacacttatcttaagcctggcaaaccttatgtaagtacttgcaaatctacatttactatagaagcacaccaatttaatcgattatagtcttatataagagaaaaaacaatgcttaaaatatatcgattaaatgatgatattatattgttgatgcgctagattacattgagttatttaagtattactccctctataccataatataaggcgcggttaaagttgacatggtcctcaaaactaatctttaacttataatttctcatatactataaagtttgtagaaaaaaaattataaccatttgaaagtaaatttaaatctcaatctaataatataatttttaacaaataaaactcatttcatattatgctaacggtttgtaatgcgtgcacgacttatattatgggatggagggagaatatactctacttagtgttcacctagaagccagacgttcactagacggacccatggtctagagtctagacagtctagagattagtctagacgatatatcatactatatactatcaacatcagtggcggatgcagaaagaaatagcagtgtggtctgagcaaactagatagagttacagtctcaccttcaatctatatatgctaaaaaattttagtggggtcttcgtgggggctctcatagtcttcacgtcagtagtgggggctcgagaccccgccgcccctgtgctggatccgcccctgatcaacatgacatgtagatacacttaacttgtttcatataatattggagaacatgtggtgttgtgaaaggtgtagccactcgcatagagccatgggttggagagaggaggaagcaaggtccacggtgacaactagcagaggagaggtgacatgacttcatggcagcgcgatgtttagagcagagaagaggggtttggaatggtgtcaaaaacccaaggcacatggacctagggtggaacacaaagttttagttactaccacacaaaaaatgtattggttgcctagaccatagtctaaacgatagttttatagtctacatttatctcgtttttgtttaattgtgtggtctagatagtctaggatcatctttaattatctagacggtcaaacggtctaattcacggattaggtcctaaactagacgataactcatcgtctagcttttagacgcggtctaaaccgtctagactacggtatttggttagacggtagacactactacagcatatggctgagaagattggtgcctaactgtgataattaaacactaatactctactactggtacatataatggagcccttgattcaccattatcataaatgcttatggcaactataactttttctagaattttctaaaactttctttagaacaaaccagatttttttttcaaaacatatagttataagatccaaaatatgaaatagaaggcttgagaaaaaaaaatctttttcagattctcgcaaaccgtttctatt

SEQ ID NO: 69 - DNA, 9958 bp, Oryza sativa
cctgacaatctgggcatattacccttatatttggatcctgcagttaattttctatgagataaacctcagggtctttagggctcaatatagacagatgattgtgctgatattaaggtaatgatttgatttcatggtgcaagtcttttagcctcctatatggtgtaagctccattattctacgaatcatattgtaacctctacattgggtcaatattaggtctataagtcaaggcagtaatcacaaattatattgtacatctagcaaacaaatatttatttggcttgattgaggatttcagtatttttaagaactttactagaccctaattactacattttaaaatcagttcaggtcctatgtataacaagctaacatttttcttgtgctatacccatttctatatctgctactattatttaatatgtaatggaacattgatttcataggttagcattgtttgcagggtgtttcagtaacactgaaaccatggttgcttgagaggattaaagccacagatacttctaagttctaacctgcatagtaccatcctctgttgatctgtgtagtccataccgattaactgtacatatgtgctattccaaagaatccaatccttagtatctctagctatactgtgttattctcttttctgctttgatcataaagtattgtttcaatttattggtgtgtgacgaagtgacatgcacttcaaacaattttagatgagacatgtcatatgttccaatagggcacactgccacactggggtgtaattttttcttgacaagcattattcctactttctttctttttttttttgcagcgctgcactgtattggaattttctaatgacccatccttccagattgaatttttgctttacaaatacacttgtatagttttcattatatgctgacttcaaaatatgattttattacttcttttaattcatgaaatattatgtttgccccttatccaaagccacggagatatttcaacacagtttcttagacgagtatttgtcctacctgccatatattcattgtgtagcaatatatggatgacatccaaacatgccctgtattctgtaggggatacttcaaaattctgtgccattatgcaaaggaggtaccactcatctactaatctgttgtaagtacatgatgtgatgtactgttgtttttattgagctaaagcactaaattgttctctgtactgcagtgctatagatgagaaaagattcaattagttcatgacgaagatatctatgagaaaatgttgtcccaaatcccctaatgattgctgttttttctaacctagcccacatcatgtaagatccattgtcctctgtcattgctacttttctgtaagtgtacatgattgtataaacaattatgtgagcaaacagatcatattcacatttgaatcttggtgatagtcataatgtgtattagtgtatgcatatgtgggtatgcttctgacataaagttcttttagacgaatgtttatatataattcttaaaagttacaattatagatactgtgttgttttgatcttaataacacagcttgaaacattcatacccaggcacgcaacttagtgcgtgattcttgctagttacttgtaaagtaccagcgaacagctccacgccgcgacgactacacaggatgtccagggatggacatggacgcaaggtggagcacgacagcaatcaacggaattttatcggtggaatcagacacttcaggcagtggttgaaaccgttcaatggctgcaatcaatagggagaagaccagatgtggtgccggggttgatggtggtagaagcgattggtgatccaatcggtaggttggacacttcgggcgggtagcctagattttccattgagctactctcacccagggagacgtgcggccgcacgcttggggttgattgaagctggaggcaatcggcattcttggtcggtggaatcgaacactccggatggggtggtccggacttttcgatgagctgcgttcgacaggtagatggttagacgtagcgcttgggtcgttcggcggctgggaagacggcatggtgatttgttggctgactcgcgaccatctaattccactacccgcataaaaattcactagtttatttttcatatgatatagtacaaaatttgaaagaaaaaataaactagaagtaagataagtgggtaaaagaatcccatttggcagccataggtctggccttagatggaagaacctgacaatggtgttttgcttccttgttgagggtaacgatggtgcgtaaaaacgtcgttgcctttctagaggcgttgttttaggagagcctcttccacagtttaagtattgctttgatggagtttgagattgaggatcactcgtggttgtggtttgggtttgcggcgatttgatatttgttgtcatgttgtattttttcttttgtctttttaatcatcattagagttattatatcatcttggtgtaattttctaaaatcaataaagtttccttttatcttacaataaacttcagaatctccggcccaacagggtctatgcttataactcagggagccatccaactgacagcaccacctttgatttccttgctaagataatccaaaattccaaatagtaatagaatataaatatacatactctccagggtctaagtgcaatgttctccatacttacaacagtgcaagattttgaatcccctgaacgcgagcggcaacaaccaaaattcaagtgaatggatcaacccatgtatacatgggtaccagtggtgtaccagacttaaccatgaaaccaatcagatcaatcagtgtagcataaaaaaagaatggcttggtccattggttaaacagtggctcagtttttctggtaaattttcccatttcttttgtccgtaacaacagatcatgtaatctttgctggagtaaaaatctaaaaaaagaatggctacggaagctgcattgttttctgttgctaaagggactgacaactgataactacaatgacagaccaaagtttcgaatgatctatcttgaagagtataggcaagataccaaacctcttgttcaagaactgcatttgaacagtaacgttttcatgactagaacaacttcctagctctgctgtcagttctccagtctgaatcttgcatggggagatgttcatcagggtatggtacactgccttgcctgcgaagttagaacctttcgcattatgtactgattcttgctcagcatcaggaacaagatgttgtcaaaaccaagagacaccagacgacgatttcgggctatacatgggtgcaccagaaaacgcagggtatgaaaaagggcccctacttggctggtaacaattccttctcgagtaggccaaacatcttcttgaggcgagaagatgcactggatagtacctcttgagcaatcttctttctgttcttgcagctctttaaccatgcgatcccaatagacacttggacattgcatgccttgggcttggatgagatctgctccaattggtatcgcatatgcagctgtaaaaaagttaagagggagtgctgctcagtcatgtgagaaggaaagtaacactttcagttgtaataagatgaccaaaaagatgatttttcacttgaaagtagagaccaattcaataaatctgagactgccttcttttctaatttcaggtgaaatgcatatttgtttaatgagatcttctgtatatggtaatgtattggttttccagaatctggatgaacctctttaccatagtcaccattagtaattggacgtgtaaataaaggtgttctttgatattatgaaatggcaatgaacaattctccacaaccaggatgacatttatcagttactgtagtactccctccatttcatattataagacgttttgggtgtaagtcaaacttcttcaagtttgatcaactttatcgaaaaggatagcaatatatacaacaccaaattagtttcattaagtccacccttgaatatatttttagagtatatttgttttgtgctggaatgctgctatatttttatgtaagcttggtcaaacttaaaaaaaaatgacataggaaaaagtcaaaacgactcataacatggaacggagagagtagttcaattgaagataccacagaaaaccaacaaggagcaaacgaatggtcaatactgcagtagttattggcgtagcgctgggtttcagctgacagtatagcttctcagatagtcagatgaaccaaaataggggaaactatgtacagttgtggaaaccacaccttaggtggaaacttggaaactatcagtattattttatgtaaaatctaaaaaaacaaaatatagagaagatggtattagacagccatataaaatttcaagagcaaactcgacttagtttgagataggaagttaacaaatggcgaagaagaaatgctattcctggttgtctttttcttcactactcacaaacaaagacggattttttcttgaaattttgcatggttgtctgaaatcatcttagctatgtgatatatattctttttatttttttaaatattttttttatctggtttccatggttaccacgtggatagtggattagtggtttccactatatatttacccaacaaaagagggaacttgtcttgttctgctcactagtttaatcaaaatttggttttagttactgacacccatattggaagtttatttagtacggactaaatcctatttttatgtaacctcgttttcataattctgagacccaaacagatctctaggagacacacaactctcttgtttacatgactacaatactaaattaagggcataggattgaaatgtacataataaaagaaatagtataagccatgaaattgtcacttacgttgaagtattcaccaactggaataccttcaagcgtcatcacttcttcaacaagccatccatttttatcaggcaaaggggatttctgttgggtgctcattacttccccttcatggcgtgccaatctcttgtcgaacttgtaatgaatttgcctctggtaagcatcagctctgacggactcccatggtgaaactgagtactccatacagccaattttctccatcacttgatgctccaaaggaccaccctcaaatatgctcatgagtgttgatacctaatgaaacatacaagttggctacaatgtaaacttatgtttttctttttcattctttttgcagcatagagattgattgcagataattctcaggatggaataagaatcttacatcaaaaggttttgtagatgaaaatacttctgacatttttgcatcctctattcctaagaaagaatcactttcattattctggaggtctttcatttctgattcttcttctaccagctgtactttttgttcaggggtcaaggaccttgccttccagagcgccattattgttctgtaaaccgtgcaaagggaaatttgaaaaacaagttaccaaaaatagtacttaataggtgagtaaatagataaaaaatcgggcctcattgcaagaagtttttcatgtaatgaacagacgtgcttgacaagacaagttcatgttcgtcacccaagaagcagaacttacttatgtgccacattgaacgatacaaaagactggaaatgaaacttgagtcggccttcattatcaagttgctttgctccatgccttgcatccattcctctgcccttgtgaagaataataagcagagatggacttcccattgaatatagtgttgcaggcatcacttggatgtcctcgatatcttcccaaagaaagaagaattttgttttgtggccaaaaagattagtgtagaacccaataattcttggagataaaaacaggcggccctgcaacagacacaagcgtcagctaccatgcaagttcacagacaaaaaaaaagatcttaatgtctaacttggttgtgcagtaatatggctatgtgacaaaatacaccagtctcgtaacagaaaggctactgtacactttggtgacctatcatcattaggctgaaacagtaatgggagatggattaaattgaatatattgtttaaataggggtacaagttgaattatttaaatttaaaagggatgcagaagctgaattatttttaatgcattcctttttacaacttagtaccgaatagtgggtgaaaagtgtgactaccttctgtagacttttatatttattattgaaaaagtaccaacagctgattgtttggttttacgatactctctccgtcccacaaaaaacctatctaggtggggatgggacaccacatagtccaaaatattcatagtcctaggtgatgtcccatccatacctaggttggttttttgtgggacggagggagtactgacttcactttttcagctgtcagcaaaggacagtgaaattttatgaaacaaatgaagccatccccccaataaagaagaaaactaaataaggataaaccaatacaagagtgttggacacctttgttagctctctgtgtcataattaaaagacagtttacctgtgtgagcattttgcgctttagatgacaggtaaaatcattgattagaaattcttctggtggcaaagaaaagatcttctggaatgctgagtttgtgtgtggagaccttacagcaatctgcatggtaaatttgcataagaaaagaggcaggccaagataggatgacacttcacctcactcaaaaatagagaagataagtgcattacctttttgccaacctctttctccattttgtctaggtagtccttcatgacttcagtaccccttgaattattcaagataattctcaaatgcaattttgactgacatgcttgagccagcttacccttgagaggaatccaaatgtcggaaagctcggatagattagatttcaagaaatttacttcagcatgaccaagagactcaacttcatcaaatggtccatcaaaatcgtagacatttattttcataacggatggaggatcttccatggcatcaaattcaaaaatttctgcaaattttgagaagatatgttgcaaaattatgaattgtaattttatatagcagcaattataacataagataataagccaaacttttaccattccaccgaggttccagagtgtgaaatttaattgaactagtcttcgtctttccattgcaggtaaatacaacatatggatcagagtaaccagatgatttggttgctgctaaattggtaccatcaatcagagcgacagtcagcaaccaaccattcccttgtgctttgactccatgatcacttcctatatactcccaaataccatgtaagcaaagtttagttcatatgtgcataaatcacgggagtatatatgtccagaacaagaatagaaggtttttctaaagaaaacagaaagtaacagtatgtccagactccacaataataattaataagcgaagattttgttgaggaaaacaaaaggcaacagtaacatttttccatatcagggaaagattatacaagcacctgtatagaacactaagtacatgtaacatgtgccgttgagtgccatgtactgtaggattatctactgaactttcattttcaatttccaccaaggaaaaataacagcagcagcaaaaggagaaatggacactacctctctgcctcttagcctggatgaatcgtgcaatcatatttaggacacgctgtccttgcagaacaagaactccacaaaccacgacttcaccaacagaatctggtaggtccaggccaggaaactcaagaccttgaattatactggggcttgcaaggatgatgtgtgaaaaaacataaatgaatgcaaccagtgaggatacaacagtaaaatttccaaatatacggaatgctagtttccaatcagattcttgctctggttgtactgaagacaaaactttatcagtagctgctgcatcttttgaatcaactggcctgatatttcgagccaggagttcagagaactgaatgtagttatccttcaacccttgtttagccccattttctatcatgcccttcatcattgtactctggataaaattcaagcgccaggagactacaagacgtgaggatttttcattatcaggtagttcaggccctggcattatgcatgttaaaacctccaccctaaaagaattcccaaatggaacatctggagtactaacatcagctaaagttgcatatatatctccatctgccttcagatatgacacatcctctgttgctttcacagccttgactagtgcagtaggagcttttgtgtagcttactaccctcttcaagacctcaccatcattttcaagtctccattgttggatttcaagaccagtagttccttgcatctccgctagtgattgcaagaaatctgaacttggtgagaaaagaagtccattcaagtcactgggtgcaacagcataaacttgatcaataagaactccacctgacaagttttcaggtatttcattcccttcatggcaagatccaaaggcttttagttgttcatcaaaggacatagttacaccagtttcataatcctggttatcaggaagttctgaactagttgatggtgtttcttcaagaatatctgaattaccatcgcccgtagtgagaggtggagctgaagctgaagcttctgcatcttttggtttcgctgagaaaaattgatacagacgattgacaaatgatgggacaccatttgatctatcctccttgatgatttctgtttcatcaccccctgatactgacgtgggtatttctataggaatatttggcaaagaagatcctttctgtaattcagttgatttgtcagaatatgacgcgaggtcatctgaaacgcaatgtgcaagtgtcgttgtctcttcagggtaatttagagagagagatattgtaagacgaatttctcctacagaagttgttgcctgttatcagtatataaattacttgcatgcataaataaaattggatataggcaaacaaaagtgggctttgttatggaaagagaaggactggagacttggatgaataaaaacaaatagaaaagcttgaacagcaaacaatagtgctagtatatcatccaggcgaaaacatatccatactagtacatcacaaccataactccaataaaaacggaattgtgtagatggcttaatttcttgtttgtcaataatgctattaattatttcaatggtttccaatgcgtataaaattattggaaacatacctacatgaaagtgttttcgtaccaaatatactaatggcttctttttgaataccaaatcttaacatctttgcctatatgagtggtttaagatttcgatgtttgattgcacacattaaacatcatctatttgagaagatggaatagtaaataaagacatggtaggagactattgccaagaaaaaagaacaataaggaaaaagaaagtgagaaactagtacagctactcatccaacactctataagtactccctccgttttatattacaagtcgcttcgactttatttcatagtcaaacatagtagtatttttcaacaaaaaaaaacaaacatattatcaaattatattcaatgttagatttaatgaaactaatttggtattttagatgttggcaagtttttctataaacttgatcgaaaattcaaactaaacaaagtttaactatgaaaacagtcaaagcgaaacggagggagtaacaaagctccacttcaaaggtaaaagcaacacattaccatcacgaggcaaaccatccaaaacagcacaagctggatgaatttgcaaaacagcagcataataccttttcatatcttgaaacaagggcaaattcaagaactcaagataacattagggggggggggggggggcatgaatttaccggaatccttgatcttggacttcttg

SEQ ID NO: 70 - DNA, 19426 bp, Oryza sativa
ctactactactctctctctcctccggctataggctgcgtgttccctctctctctcctcttatccttctcttctccgtttgcttcgctgctgctgctgctgttctacgcgcgcgacacggaagagagaaaagtggttttttattgggttcctaagccctttttgtttccagaggcttctggattgatcggttgatctctctcccttcccctctagggtttcctgggggtggatctgaggagcggcggcgctccttcgtcccggtgcgtgatctctctctctctcaatctccgttgaggcgttggtttccccgcttggattctgcgaggttggtagtgtttgcgtccgcgggggtttgcgctctggtttggatttggaccgagttcgagtacttcggagccctttcctctgttgggattcgttggctttggggtgttctgcatgcatcggtccttttacggaggatttggggggttttgttctgtttctggctggcttcgattttttactggctgagtgattgctgcttcgtgtgtactacggcgttgttcgtgtggttggatttgatatgggttaattttggtttggatttcgtccggggtcatgtaagtgagatttcgggttaagtttgtgacgacagctctgaagtttcttacaagatgttttttttaacagtaatcgacttttctacgattggctatttttttcccctttgtttcaatcagaaaataaatcttttcccctttaacaaatgggcgaagcatgtttttgaattgaatttgtgggactgtttttttattcgatgaactaaaaaaagttatggatcttaggattgtttttcttttttttattcttcgtatgttgtcactaaataaaaaaatttcagcttttttctattgtgaaatatattgtcaatatgttcttgctttttttttcgtactatggtctaagaaactggagttaaaatgaaagagaactcggtctttgactaattctacaattttttaatgggacatcttttctacatcttaaattccatcgttttcataaaattttctttcgtgcagctttttttttcttgcttgccatagctattaaaatctttagttccttttttttaatctttatccagacatagcttgcctagatgcaaaagttgtgtgttttgctatgcccgcctaaaataacatttattttgccatgtcatcaaacatttttctttctgccaatcctgcatgtccatgaaaacatttcttaataggcttccttaccctactttttactggagtactagtactcaagactgcaattttttcttcaccttttcgtttacctttataaggctttttttctcccctgatgctatgattttatcctgcaaattgacccttcttttggttttataaaaaagactaggatagctccgtctttctttgcttatatcgttatttcagcctcttctgttagatatatttcccccctatttcgagtgttcaactaatgcggcttgtcgttcgttgcttggagaaattgtgataaaatatactattttcataatgaaaccgataattgtcgttgactcgtaatgtagttattttggttcttgtgataattttctacatctctctttttcccttgcaaacttagtacctatgggaatgggaatatatgctagaagcaatgagtgaggtgctggaattatataatatgtgccaagagcaggagattccaaagactagttgctgatacttttgtagtgggatttcgattttttatgcttcggttggcaaatgggggcggagtccacagattaatgagtccgttgaaacctaaagtagatggcggtaatatgtcctaattaggaaatatatctacattatcctttagattatattattgatagctgatgcaagacgacgctgagtggaacatacttgttgctacctgttttgaacatttctcttggtttgaatgaaaactgaaaaggatggctacctagggtcctaggtcatagcaactgaaacagtaaaaaatataaaatctatgttctcatgtaggtggatgcccataaatgtatgaatattcatttatgaatactctacggttttccaatagtatgtgggaatatttttttatgtgctggtactaatgttttctaataactgtttgttgatactgtacaggtttatgtaaatctgatcgatccagaaagtttgtgaaaaaagagtgtggcacatacctaaagctggcttaaagtttgcccatagctaatatcatgggcgctctttgtgatttctgcggggagcagaggtctatggtttattgccgatcagatgcagcatccttgtgcttatcgtgtgaccgtaatgtgcattcagctaatgctctttctcggcgcccatacaaggacacttctgtgtgatagatgtgcttcacagcctgccatggtccgctgccttgtagaaaatgcctcgctttgccaaaattgtgattggaatgggcatagtgctgggtcttcagctgctggtcataagaggcagaccataaactgctactcagggtgcccatcatcttcagaactttcaaaaatctggacatttgtttcggatattcctaatgtagctcctgagccgaattgcgagcaagggataagcatatcgagcatcagcgccagtggtgtcagtaatcacgacaatgctgcaggggacaccagtttgttagatattgctagtgcaacccttatgagtgatcttggctctgctgtcaaaccaaagtctttgataggctcctcatctaaagctggcgtgaaccttcttccacttggtactgatcagatggctggatccgtggattcgacatcagtgaaggtgctataaggctttcacacattcctccatacatagatttactaattcgcctcaattaacctctgccgctgcatatactacccatatcccatggatgtaagataatcgactgttttcctccctacagttggccattatcatttgtttactctaccatatatgccatgattttctttttctgtgtgtactctattttgaatgcatattgtaagtgagttcacttaaatttctatacaagaaaaagaaataatctaactgttaatgatgcataagcataagcttgtcaatgattactttaccatatgtcatggattttttctgtgtactccgttttgaatggatattgcaagtgagttcagttaaatgtctataccaaaaaaaactgttaattgtgcataagcataagcttatcggggtagtggatggtgcatggaggttcaataggctagcagaagttgctgaaactgtatacatgcatgtgcaatgagatatgaacattatgatgtgtatggactacaatctggatccactcagcagatatgaatagatgaaacagggtaataacagaatatggagtatagaaaatgtctatattacagaaatagttataggactatcgagaggtttagacaggtggataactatggtgcttatgttcttatgtcaagtcttgtcttccaagtgttctgtgacctcatgcagatctacaaatgcatattctcacaacattaaaatttggtacaagtaatcttttaaaattattccttcacaatttctttggaaaatgttaagaacactgctttgtattatttggatgatgtagcatttcacattttagtctatctcgtattctaatttatcttactggaccatagattcccatgacaggttatttgtgtggagaactttaaagattctatacagagagaatttactttcgtctttcttcaaatcactttctctgtacagcatttgcaaattttcaggccgttttacttcaatcttccactacaccatgtttcttttttagagagcataagacacacacacacacacacacaaacacattcttccacatacattcacaccgtgtgtgcgtgtaagcaccctatgcacacacaaggcttcacccaggacatgctttctctcttaatccacacgtgtgcatgctccatgcttcttcaaaattagtttgtcactaatctgtgtttatggtctccttatgcaggtgccctatacggcagaccaagatatgttcagcaaagacagtatatatgaagatttctgtgtggacgatgttgatcttagtttcgaaaattatgaggaactatttggcacctcccatattcaaacagagcaactgtttgatgatgctgggatcgacagttactttgaatcgaaggaaataccttctggaaactctgatgaggtttgtagtttactcttaatggttcctttttaagaagtaagcttcaattccacagtaacattcatttgtaggttttctcgcaactcctgatcttctttgtttcaccaattcaacttgccctgcacatctttattgcttgcaggcttttctcttggttcgatttctcagatatatgttatttatttgacctggtttgagtcaaatttatctttcattaaagataaattattaggtgttaaatctctgtacaagaggagtcagcatttggattaataattaaattactctcgtctctcccaagtttatcatttcagtccatggtctcatccttctcttagatccctcccctttagttgttccttccctgctctccttggaactgatatattcgcagctcccatgttcaagaagcaaaagatggaagttcttaattagtgtttctggtctttgtgtttatgaaacaaacaaaactatgactgaaaatggtaatcagtatacattctcaaatgcagcagttcatttgtaatccatttgtttggaaattcatgttgtatttagttttgtctggggcttattggagttaactttcagcatttatattcattattatcttttcagcagcccaagctgatgcagccagtgaccagcaatgcagtatctgctgattcagggatgtcgatcccaggagccaaaggtgattccagtctttgtatacctgtgaggcaagctaggtccagtatctctctttcattttctggtttgactggtgagagcagtgctggagattaccaagattgtggggtatcaccagtgctccttatgggtgagcctccttggcatcctcctggccctgaggggtcatttgctggagctaccagagacgatgctatcacacgatacaaggagaagaagaagagaagaaagtaagtgcatttcttactaatttcgctactcatttgcttaaacatttatgctgtataaccacgtaagaattctataataaatttgtggctgcaaaagaactcaaagagaaattgtagcttgtaaacttttcggcacaacctctactttacacatttggtaaagagtgcttgtatcgttgagtttcatgaaagaagacacatggaagtagttttcatggaagttaaattttgagtttttggaaacatcagtttttgttaccctagttttacagtaggtagaagtaaaattaccttaactctgtatctttttacttacaccaaaaatgtttttggtaggtaactgcatcacataaaaacatgctgaagattttctgcttgaagataacttattgctaccttttcattcagagagctaataacttcttgtttcttgccttctcttctaatatgtcagtccactgatgctaacatgctatatttctagcataccaattgcctcctttttgacagctagctgattatcttttctcatggcttctcttgacagatttgacaagaaaatcaggtatgcatctcgcaaggctagggcagatgtgagaaaaagagtcaagggccggtttgttaaggctggtgaagcatacgactacgatccactctgtgaaacgaggagctactgaacacaataaaacattatccaagtgttaggttagcaagcatcaaccaatgcttgttgtggctggcaggaaggcactcatactacaaacaatgtggcaggcctgcctctaaaaacaacaaaaaaaacagagcaatcaaggggacaaaaaggacaaaaagatttgaatttgggaaatttttcagatgctaccccctcctttttcttctgtacagtggagggaatttgcatctttctgttgctttcgggaggagcgatttgagtcgctgcccaccttttgtgaattaatcttgatacagctgaacaaacttcacttgcatttttatctcctttctactaaccagagcatccacctacccttgctgtggtgtttttggtggtatgcttccagattggactattagcaagacaaggatggatgtagtcgtgaaatcttctgctgctctatttattgttatgtaaaatctgctgtaatccggagtttattctgcaactctgcatgtgtaaataccagatcagaataaactggtagatgtaaagttttctttattttctcaagtcgatgacattggaacccatgtaaccggccaccaacttttttgtttcactatgctcaaatattcgaaaacttcagactggcttaatgctattatttgtactaagcatatgcttgaatatgcggtcctttttgttacaagtaatattctttttgtggttgatttgaccttttacattgtacagatggtattggttcttttccatctctgaaagcagaatcttgttggggccagacaatcctggacatctgatttgctgtaaagctctctgaaaagctctggctggatcctttgctagatgccatcagatgtgtcagcttggtgccgcatatcacttggagaaagagcatctacaacagcatggctatttttgcctttctattcatccatttggccaacttgccaaaaagattcctctccatatctcctacacgatccaacagactgtccattccacactctccatttttacttgggccccacctgccaatgtcttggcactcttctccctttcatttcttttctttccccacctccccgtggcatggcagcaatagatgggcagcggcgtcggattgctaggggtgggggcggatggcggcagcggatggccgacggtggctgtgtggcggcgcggggaggcttaaaagagcggcggcgcggggaggctgaaaggggcggcagtggatggcggttgggcggcggtgccgggaggctgaagggcggcgcccgcgttaggaggcggggaggagccacgccggaatcctcttctcgaggaggtgcgatgccggcgtctcattgtcattgatcttgagcgcgggcgagccatcgacggcgagctcgggcggaggatgcgagcgagcgacaacacttctccttcccatggcagcggcaggcacgagcggagggagaaagggcgcagcggtgataggcggagggacttgggctcgtcaccgccatccaccgcagctcgggctccgtccccatccgccgccatcatccgctaccgccgccgccactcgggttcgtcgccgccatccgggctcgtcgccgccactcgggcttgtcgccgccatcctctgtcgcttgggctccgtccccattcgtcgcagctgttgccggcggtagctgcagccggctcgagcagagcaggtagtacggggcgagagaaaagcatctccaacgtggggcccacgaatggcaaggcaatttgggctggccaaaattggccattgagggaggagttttgccagtcatttggcttagcccttctagtagagaggctgttggagtgagatttttttttgctaaaatggctaaattttaacttggaaagtctattagagagtctgttggagatgctctgaaatttgggggataagagagagatcgaggtagaaacaggttctaaacacccttgaaatttcaaggaaaaggaatcaaatcatatttgaataagttgatggtcttattgtggctatctagatttgatttgttgtattaatattctattatatgataggttggtctattttggaacgaaggaagcacactttttacgttggcagagaagttgtggatgccaacgtaagttcatttaaattgaagtcgggggctactgtcagagttatggataaggcatatcttatatcctacgatttaccgaatatatcggattagcatacctcatatcctacgatatgtttccgtatgcgataaggaaacacacaagatattatggaaaatatcctcacgggctgaagattatcagagtcctactcggagaggatatggattattctatatcatgcggggttcgttgtctccgagttctacttggagactaaggtaacttatgatatgaagggcacaccccctgaggtgctcagatcattgaatcataacgccaacacaccaactaaagtttacgaagccgaaggactcaagccgaagccattgggagatctcgtcgatcaatcttgacaaggatctcatcggtatcatcggattcatctgttctcattgtactttgtgattttccatatcaatcttatataaactggattagagctattatctcacgaggggtctgaaccagtataactcttgtcttctgtttgctttgatatcgtatcgtgtaaattctcgtaccaacgtaccccaataccttatttatctggtctacgtgtatccccgtcaacaccggtgacgacctaaagctcatcactatcatcggcgtcgtcttcttcaagctcgtcacctcactgacagcattcatacacacataccactgccggtgtccccagacttctgatgagtatttgtaaatgacgtcgtcgtgcatctgccaatgatgatctcaagtttggtgccaccgcaacaagcttcatccatacacccgccgacgtgttttggtggctaccgtcgccaatggcatgtttgtctccactacaatcacaatctttacctccaccgatgtggcctttaagattgctatctttacatcaacatcatcacatctacatcatacattggagaacataaagcgaagaccaacgatgacgaccatcgtaccttaatcggaggtgtctcgtgagtttaactcgcaagagtatttaaccgggtgtcttccgagaccccgggaaccaggagagcacaatcgccaagttagatccaccatgtcgatgggctgtggtgcgtatttgttcaagtattttgtatttttgtaattcttaagaattataataaagtgcactttccatcgtctattttattttttgtacttagtacactggcacgcccgcacattttattttattttatttccctgggcagagagacgaaaaattaattttctctccaaacacacgtggtttctctctcctcttcaatcgaaaatatcattttaatgggtgcgatgtcccgtggcaaatattcaatttctgagagtgtcttccccaaagtggcttcgcgtggtatcctatagctaaaattacaaagtcacgacgttgtgtaggctgtagcaaaaattgccaattttcttctgtagtattggagaatattaaggtggtgattagatccggagactaaactttagcacatatcacatcggatatttgagtaattatacaaataagagctaattcacgtgacaattttttttaagcctaggcgcgcagaaaggccgagcgctcgcgcgtggcacgtcagaacactgtttgtagtacgcgaggtgtaaatgttttgaaaaagtccttatattgtttgcaattagatatagacccctcacgaacaaatagtactccctctattacatgatataagtagacccctcacgaacaaatagtactccctctattacatgatataagtagacccctcacgaacaaatagtactccctctattccataatataaggacattcccaacccaatgactagaatggtgtccataacattaaataagttgccacctatgaaaaaaaataatgtgacaagtgaataaatgaggaaagaaaaggaaaccatgtcttgcatgagacatggtttctacacaacatccaagacatcatgtgagataagtagcattaaattaaagtatggaatagtggtgtttacattggaagagtagtgtcttgtactagtttcttgatgatgtggagtttatggaaaccatgtctagtgttatgggttgggactgccttaaggcacaactactatttttagatgttccataatataaagcatacatgcatgcatacaattaattaggacatattctccattaaattattactttttaaaatcctccacccttaagatctctaattctattggatgcatgcattatatttattagggtgatccaaactagaagatgataataattgtttcttggtctttgggttaagggtagttgtgacttagggtgtgtttggatgggaggatttgggtggataggagatggcggcccatttttgtggctgtttggttgatgggcggaagtgggatacgacggccccaagaggaatattcctgttagatgctggatggggggggggtccggacgatttgcccggatgcagccgcccgggcgcccgggcgagcagggcgacgggtcgcttcaccccctcaccgagcgttagcagcggccacgcgagtgaatcgacggttgacgcaaaggagaggtcggcgaggtccgcggcggcggcgtgaaatgcgaacgccgcggggtgggaagggaggtcggcggcggcgtgaggtgaacgcggcactggcggcgggaggcgaggtcggcggcggcgcgagatgtgaacgcggcggcggcgcaagatgcgagagccgcggcgccgggaggcgacggtgagatgcgagctcggcggcggcaggatgcgagggcttatttttttcctttttgtcctttttcttttttatttttttctctatgtggatttgtagtgtgtgtatatatatgtatatatatatatatatatatatatgaatttgtgatttgttagggaatttgttatttgtagtatatatgaatttgttgggggtatactcaccctctctaagtgagaggtgaccacacctgctcatccaccctacttcttccaaccaaacaaaaaattagatcaccaaaaccaccttcattcctccaaccaaacaagaaattaaatcgtcatatccatccaaccaaacaaaaaactggatcgccatatccaacaaaatatggaccaccatatcccattcacgcttgaccatgaacaaacacacccttatattttggaatggatggagtatttaaaaagaaaaatcgcgaacagggagtgtgttgtaaaatgtggaagaggagggtttttttttcgcagaataacatccactaaaccccctaaaccctccgcctccccctcgcgccgtccccgtcgcctccgccaccgcctccgccgccgccgctgccgtgtaccgccgccgttcaaattattcccctcttccgctccactctcccgactctctctctctctctctctctctctctctccacacagagcacgcatccgccacccccacacgggagcggagagctcgccgccggcgatcgccgcaggaatccgagggtttcttcctgcgtccgcggtagatggttctgctcgaacgatcgccgttggtggtgccggaggcagccgccgctgccgcctccagcccgctccggaggccgtcgcctagggttcggagggaggtgccaccccctcccctcgatcccatcctcccctaccttcaggtaattgccaaatcagtatccatatctgcacctgctccttcgatttaggtcctatttaggggtgtaccagcgtgggattccgccgtagctgtgtggaatagtgcttggtttcgcctgaagctatgcgcgcgtcggaatcgtactgggattctgtcccttcctctgagttatgtagttaattgggcgtgtaattttgattttgacacttcgcctgtgtgcagttgaacttggacgaacggaaatgtgagaatgggggcgtatgttccccaaaaaaaaaaaaagaaaagaaaaagaattaaacgatatgaccaccactgtttgagtgtctggcaacgatagaagtgcatattgaggagacattgtgagtaatgtccagtgctgggacttggggaaggatttagttctggagctgatttgttttgtgcagctaggctgatttttcttgtgaaggattaccttgtttatgtggagacgtttctcttattcccttatcagttcttgaactgtcgagtaatgtaatgtgcccactttatttgctcctcctgtactaatgttttgctttccgatattttggtctaaactttgcatatataacttatttttatgttgttcctggtactatcatatctattttgtaaggtaaatctaatctttcatgcacatgctggtattcatgcataatttatctatgtatcagtgtgatttgtttgtcctggtcagggccagtcctggtgtatgcatttgcttatgccagtttctgacttggtattcaggtctatcaacaaggctatggatgagctcaggagaggcccaaaatttgaagcagcagcccttgattggctcaagatttgtgtaatggaatgcattgataagtatggtgacgattaccagtactccacagacccccgactcctcaagatctggatcctctatgtaattgattggctttgaagtttcaattcttaccttatccatttttctatccccttttgctcatcccccccccacttcgttctatgttaggcggatgcattatgtttttgttgaagtgaactttttgggcagcaataacctgatgtcaaatttgccatgttgatgtgatcgcaaaccatttctgtggtaccagaaaagccgagccacttgatcatttgaagaagacacatacaatatttttaaaacacttggagaagattgtagaagaagctgatgccgatgcccaggtatgataactgtgtggtggaatggacatttgtcgagtccttgaatatttgtcaaatgattcacatattgcgtattcaattgcattttagtaatcaggagattgtggctgtgttgtagatttgtaatattttatatatggtcagttggtcacaaggctgacagacttgcggcagtaagaactgctttgatattgtttcttacatgataatttttctgttgtggagcatttgcttttccaaaaaaggttggcaagcaataggataattgtcttcacatttctgtgctggtgaactgtgatacattcttttaccaagtctaatttacataatttattcatttatttgcatgcttgcctgttgtgaactgaatatttatttggggctaatcacaatgatatctactttgtacttgccgatctttactagctcgtacatctgtaacatctatttcaactaaatacaggatggtttatttttcatggaaagagtttctgttctgtcattcctacaactctatttttacaaaaatagcatgattctagttttttagagtggctttttgttatatgtttagagatatattttatttagtttaatcatagttgggaatgaatttcaggatgtactttccactgattcttgtggtgcatgtgttccattttgagtttgtctcggaaatatattagaattgggagtgcatctgcacagctttagcatagtggtgaagtcagaacataaatatagggggctatcagcataacagtaccataccaaacaatcttcttatatggtttaattcataaataaatagagaaaaatcaagcaaattgcaaaagcaaagaataaaatgaaatatcgggctgaagccacatgatgtgccattgaaagctacgcccctgcccttgcttgagtggactgatcattactagataaagaaacatgagacatgcaatttctatatgtttttgaagaacaatatctatataaccccgttaagcttgtgaagtaagtaatctatgcaaatacttttttttttgtttctattacttgtcattactggccattattgtagccagcaagcatattatggtcgcttaatgttattcttctttgtggataattcaccatactaactcccatctctttttggttactgtctgctagccgaaaccatccaaaatgcaaaagaaagaacctattttgctggatccatggtctgagtctactatgaataatttattggagaacattaatgttgacctgaagaagttcgctgtaagttgcatttactctatatgattcgctagtgtttagcttagctctcatcttggacggttgcccaaatccttgacagggctatcatcagagcaacaaggtctatcatggaaaggtgccattaacttcgcctcagaatgttttaagaaacaaagtcactgaattaggtataaactataatttcttgcttgtcggtcttttaccaaaactataatcatttttgttgtttggctccttcatgatcaatgctctgttagtcacaatgaatacataatgctccttgaaaaaaaatagaggaaggaatatacccttttttatttataaaaaaggccatttatattgatgatataataaaatttagttacaaatccctctgaattttttacattttggtcctttttaaaaacttattttacaaatagatccctggaaaaacttaatccaggaacggccctttttggtgcgccagagaggctggtgctgtcctccaacatggcaacgccagccaccctggcgccctcaccgtgctgccgtggcactagggctattgtggtagtgttgactgggcggatgggagtgctagccactctggcgccggccctcagaccacagcgccagcggtattggcgcacccctcctgggggccgcttaaccctcgcgggccccacctcctttctccttcagttagccatttgtgccagcacttctagccgagccgagcccgagttcttctccctctctctctccccctcacctttccacctcagatccacttaatttgaactcttttttcgtgggattttttgtggaaatcgaagagaaaggtagactcctccattccccccctttttttcgttttaatcggttgaatttgtagatcggagggtaaccctagaaccactttttttcccccaaatttgagattttttacatttgttgttgggatttgcttgttgtagtgctacatgtgtagatgaattgaacgaggagtttgctgcatgcaagaaggaagctggaaacacttatacttacatctggaatgaatgaatagtcaatcttgtcaagttgaacatctgggatgccctttttcccatacactgtgtgtgcccaaggttttacctaaaaaggggcaaggaagggaaatgtatagttagatgttagtgggtagtgtagttggtatagcagtactcaagtatgcctgtactagatagttgacatttgcttctataaagtagtagagcagctgcagctcaaattagttcagcagcaccaagtgtttgtgctctctgttctctcatcttcttccgcctctgatgtgtgagctgtgtgcgtgagtgtgagtttgagggactgtatttttctattagacatattgctagacatgataattctagggcaaatgatttagcacagcaagcatctggctacaatgtgaagaggggaatatttttgatattagaagagccgatgcttgattttaaatctttgagcgaaattggcaaaatcgcagaccaggggcggtctgaccggcgttgcacggccgatctgaccggcgttgcacggccggtctgaccggccactaggggcggtctgaccggccactaggggcggtctgaccggccaccccgggcggtctgaccggccttgcatggccggtctgaccgattatggatagaaggctggggggcacgccacaattgattcaaaggccgaattaattgtaaattcggacatttgtgcccaggaaacagaagaagattggagaattcctttgattagatatttgaaagttcctacacttaaggttgatcggaagattcggcggcaagcgttcaaatatacattgtttgatgaagatttatatcgccgtaatatggatggagttctattgaagtgcttagataatgatcaatcaaaagtggctatgggagaggtgcatcaaggaatttgtggaactcatcaatcggcccataagatgaattggttgcttaggagagcgggttctattggtagaggatgattgaagattgtttcaaatattataggggatgcgaagcttgtcaacggttcggcaatgttcaattggcgcccactgccgcgttgaaccctattatcaaaccatggccgttccaaggttgggctttggatttcattggtcaaatttatccttcgtcatcaaaggggcataggttcgtgctagttgcaacggattacttcaccaagtgggtcaaagccgtgccactcaagaatatgactcatacggaggtaattgactttattttgaagcatattatctatagattcggtattccgcaaacattaactacggatcaaggagcttctttcatgtctaaggaagtgaagagttttgccgaatcttatgatatcaaattgttgagttcttctccttactacgctcaggctaatgaacaagccgagtcgagtaataagacgttgttgaagctagtcaaaaagaagattgaggaacacccaaagaagtggcatgaggtgctttctgaagcattgtgggtgcataggatatctaaatatggtgccactaaagtcactcattttgagttggtttatggtcaagaagccgttttgccggttgaggtgaatcttggctctcttcggtatatcaagtaagatgatttgtcaagtgaagattataagacgttgatgggagacaatcttgatgaagtcatcgacaagcgtttgaagactttggaagagatagagaaagagaagaagagggtggccaaggcgtacaataaaagggtgaaagtaaagttgtttcaagttggagatttggtttggaagacaattttgcctttgggtactcgatccagggagttcggtaagtggtctcctagttgggagggttcttatcgagtatgcggcattgttcgagggaacgcatattttttggagacacttcaaggagagcgttttcagcgagcaatcaacgggaaatacttgaagaaatacttcccgagcatttggcaagatgcttaggaggtactatggccggtaattggattatcgccctaagaccaaaaacatgttctatgcttttagattcacgttgttcatcaaaaaggcaggggggcatgtgtttacacccaaatttggcacctagggataaaatagggaaaattgtcaaagtttggaagactgccggttttcctctgtgagggctctattagggccggtcagaccgccgtgtataggccagttgccgccgacagtgggccggtctgaccggcagagtccgagtccgggattgtttcgtcgggtcttgaagtttccttactcgggaaggcatgtttcgggtttcctttggattctatcccgagttggacgtggaggagggcctgtaaagggtaagaccaacccctatataaggacatggccggttcattgtaaaaaatcaatctacaatcaatcaatcgaatcgtttttcttattgcttttagttttcttttagtttgtccatctttgtcgatttgcgctgtaaatcgtccgccgccgctgcgagagtgcgactactctttgtaggtttgtcctgaaaaccttccgttttgcccacgaaacgggtaggtatctagaatcggctccgctagccggtttagttatcaaaacccatcttggtttagcttttgctagattgaggtggttggcgactttaggtgctgcgatcgtgcttgtcaacttatcacaaaaagttgccaacacatgtaacaggagctgtttgctgccattttgtcctttacaggtactggaacgtggagctgtggaaaaacctcttctgcacactgttcaacgcgacctccaacagcagcgaagcggctgtgctccggagcctccggatgtctttccaggagtacctgtacaccaacgggcagctcgtcggcaagctgaaccagcaactggccaaatagaagacctccctgtgcctatcctgaccgagacatatgcatctcgtttcacctgcatctttattcccgattcccttgtgttgcctgtgtaagtggtataaatacctttcgtaacttcgtagcacttcctcgtgcgtgcgtgtgcagcagtaattaacgtgccacatgtccacttgaaagctgaaacatctattggcccggatggaaattgcgtacagtatctccacctagcaggggagcgtatcctatgcacacaggccctcgcgtgtacaccgtgtacaccaactaaaaattatcacaaaaaattctaggaaaattcatacatgtactttcaatagtattacatctacgtgcaaagtcgcatcttcaaattcattctacatagagaataacaaaaaagataaaattctgacaaaattgtaaccttaaaactgtcagattttttgtttttttttgttacggctaaaatataatgaatttgacgttaagattttaaccctaggtgtaatacaactgaaagtatgtgtatgattttttctagaatttttggtgacattttttagttggtgtgcacgtgtgtacacgtgagggcctgtgtgcataggatatgttgccacctagcagctactaagatgttatgtgggtagatgaattggggtgctcgatgggagggcgaggcctgcagcctcgctgctccggagcttgggtgaggacgaacagaagaggaggggagacaagagataggttaacttctttcttgattcattccaaatgactgcggtgcctctccttaaatagagtcggctcctaacaaacctcctaacaaccttatctaataaagcctaacaaattgactgaatgtgctgagttctgcccataacatgttaatgagtgaattctgaagtaatgtctgtgttccttcattgtacaatactggtaatatagtgagcatgtcagtaagttttctgcatgtcagtaagttttcttgctgccccctttctatgcttctgtttttaggttggatgttttcttattgtcttctttgggtgatatatgtggtcttcatatttcttatcagattatttaggtttagtccatgatagcatatcttgtttatgctatcagaaggttttgcctcaatttccttcctgtccaacaaatcatattttatttgttaattcgtcgtgcactaattctgtacgcagaatggcactacacacatttgcattgatgatattctttgtcgacaatcttatattggccat

SEQ ID NO: 71 - DNA, 665 bp, Oryza sativa
ttgacatagcgcaagatgcgcttgaccaaggccaagtgagcgtcacgcggagagtgcatgtgtaggcacacttgctggacggcgtaggcgaggtcgggccgggtgagagtgaggtactgaaagccccggcgaggcttcggtactccgttggatcacggagaggttctccatcagaagccgagagcttggccttgggtatccaccggggtggccgtgggatggcactcggccatgccagcccgctggagaaggtcgacggcgtactgtcgctgagacagatgaaggccgttgggggtgcgctggacggagataatcggcgtcgctgtaggctgtgagcgtcgatgccgtggtagcatggagaaagagcccttgatccagtgaccccttgacatagcgcaagatgcgcttgaccaaggccaagtgagcgtcacgcggagagtgcatgtgtaggcacacttgctggacggcgtaggcgaggtcgggccgggtgagagtgaggtactgcaaagccccggcgaggcttcggtactccgttggatcacggagaggttctccatcagaagccgagagcttggccttgggtatccaccggggtggccgtgggatggcactcggccatgccagcccgctggagaaggtcgacggcgtactgtcgctgagacaga

SEQ ID NO: 72 - DNA, 26744 bp, Oryza sativa
ctcattgacggaacagagggtacacctcatggcgctagaaccagcgagggacccctgactagcggcactagggttgctcctaatgtggatacactactacagaatcgattttccggatgagaccgcctccaaactgcaggcgggacatatataactaatcccgcatgcaaattcgctccctcagaagcggttcaagggccggatgtgaaaatctattatcgcaagtggtctcttaagaggaccgcatgcgaaagtatatttttgcatgcagacaacgtggagagcaagaggcccccatacgtcagtgtactattttttcccacaccctattttctcctcctctccacctcatcactcattttcttctcttgtcctccaaaacagcatctcttccccttccacttccactcttctccatcactcctttctcactccatcacctcatctcttccccttcccgccatccctctcttatcttctcaacctccagcagctgagacgatggcctcgcgggcgggtggctgacgcggaggcggaggcaactgaggcgaagacagtgacctcgcaggcaggacacaccggcgctctgagatgatggcctcggggccgagcggcaccaacacatggatcctcaagagcaacaccggtgcgtggatccggtgggcggtggcctaggggcggatccgtcgcctccaccctaaggagcagcgatggtgctcagatctgccgcccctgtcctcgggagtggcggcgacaggcttaggcagtaggagcgagcggcaacaccggtagtatctgctatgactatgagcaagggttttggcagaatagggagatagggtttcagctgaatttgttttttttttgggggagggggttagttttttttttgccaaaattattttctcatgcggtcgacataggtgactacatgggaaaatcctatttttgcatgcagttgggctacctgcatgaaaaatgttgattttcgtacacacttgggtgcaggcgggccgcccagcctcatggaaaagaccagttttggctgtgtgggaaaatgattttggtactaatggtaaacacttatggtaaggttaggatgccaggtaccatttgatatcgcgtaacatggttcacatggttgctagtttgtgtcatgtgggtacacaactgctgtaaggtgttgaactaatcaataagccatgctcacgatcataagcgacttggtgaaatgataaaagtgtagtgttggtgatttgataaatgattttgcgaaattggtatgatgggaaattggtgataactttgcccggtgtgggctgagaataaaatcgttacttgcagtaatgaagggcataaggttgatattattatgatgcttatgttactactactattgtttacatatttctttacaaactccattgtaatatattattatatactattgtgaattaaaatttgctttttttgaaatttagtccacaatcatagcctactttgaactcagcttacagtacacataggattcccaaggtttcggtaggacttgccaatacatttgtattgatccacctcttgttattgttttttctagacattgatgtaggaaataagatgtttagtgatgagtattttgcatcaggtatcggaggtttggaggaagatatctagggtgattcctagtcggttacctatggtgggttggcagatgggcataccgaagaacttatatatttttctactcatattccactgtgtttttatcatccatttgtccagttggccaaatctatgttatatggctttgcacttgctaagttatatgaaacatattatctatttgtatgtgtattatgtatggatgtgaagacaaggttgtgggttgtgtactagccactgatcttgggactagtacggtgtacgctttggttatttgggaatttcatccttgggtaccgtcatgtggggatacccggtttgagtacggtatcctgaaaccacccgcgaccgtccacgatttcgatcgcgcacagattgataaacagaacagctttcgatacatatacccaagtttttacagaaattattacataaaagttaactaagacaggtttaggggccgacaggccaaacacactccctacaaacagaagacccatacacaaaataggataaaaacaccacaggcaatgcctgagagcagatcgacctagaacaagaactcgtcagcaccatagaattcttccccttcctgtgcctcctcagggaagaactgatcgtctgaaccacattttatgcaagaggtgagtaccgaggtacccagcaagccacacatccataaaaatacaaatagaatatatgcaaggcgtacaaagaatatagttcatcaaggaggtttcataacaagcctattataaatagtttttccctactttgtaaaacatttcatttgcaaacagttgtaaaccatcatttagtagcaatattaatcaccattcatcctcatcttcatcatattccatattttaatttaaaatctactcataccatgataaataggaatcacccaatgacatagcttcttaaccggaagcacggcacattcgaatgatttaagactcatctctgcagagactgtccagctttacccacatgatgtcaacagcttgcaaggctgaggacaacatagccgttcgagagtcccacttactactagttactgcccagtgggatattgatccgtcctaatagtcgggcacttgctgggcctaagcaaggctagacggtcactgctttcacgggttccaccgttgtggatcatgtcaacctggccgaagccccttccacatgtccaccccaaaccagctcatagagccaccctacagtctttcatatagtgggacaatgtactaggctaagtctgattactcagtcctgtggatgggcgcaaattacatcactttccatggcataagagggtagtccttatatccgggggaaagccaccaaaactagcacaggcccgtgcatacttcaagtgtaaatttacactttccacaaaataattataacaatatgcatggcctcacacaccacaacatccatcttcacccggaattaatcttccatatcactctaggcgagtgactcatatcaaataacacattttatatcacccgacacaccaccacgtgacgacgggtaaaccatgtatatgagtatagatatttggtggtcttatccactgggatattattgtgaagtatacaaatctacacctagattatcaaagggcgtgatatagcaatccatggatttggccaataataacaatgtaataatgggtaataactaaacttacaagtttattcaaaaataaattatacgcaaaataattttataaatactcaatgcagaaaataactaagtggttctttactaggttttaatatgatcaaagattgaaactgtggcttgccttgtggaacgtggccttctgaagcttcagcttagccttctaggtccacttcagttcctgcgagtccagtgggatcttcaacgcgatctatcgtacgcacatgaagaaacgaccaaataagcctataataaaaatactacaaataaacgataaaataaatattatgaatcggagcctgagcaaaagaaaatgataaatcgagagttaagttgatttgaatggaaaaagatttatcctatggttatgattcatggtctgtgtagtagtgattgcaatttgatattaacgctatagataacagaggtgacaactgaaattgatttggtgttttagagctcgaacaggagcaaaacatcttaatagaactgtttggacaggttttattgtggttaggcactatttaggtggatttgatggggttggttgggttcaaccactaggaaacagtgttggccggcactgttcatcttcttcccgtggcttttcacgtgagtaacagagaaggaaggaaaagctccagagctccagtggggaaacggcgacgaagacgatatcatgacgtgttccacaggctgacacccccacaggatgtggacgctgggctggaagacaacgaagctagccggaacgcgagttccagatctggagctatggtgacaccgagcatggaagtggcatagctccggtggcgaacgcgggcgagtgagcgtgtcaaaacgggttcccggatgagaaggttccatttttgtggttagttgatatagatgaggcgccggaaaaactgaccacggtggtagccatggtggtggacaggagcacgatgggagctcgacacaagcaaggaaagaaggggaaaaaggttggggaagttctcatcgatgagaggtgttcctgcggtgccgtggtgcggtggcagaagatcgacgccggcgaaacggctgcacagccggacttggctctggcaggagaagttttgggatgaaaacgagattagctcttgatgtctacagaggggcagcctttagctcattcactttgaaggagggaaggactggaggaggagggaaaacaaaggagggatggctacgagcagctgcgtggctgttttggaaccgcacagcggcgttcgcacgcgtatacgcgagccagcatgagacggctcagacgggcgtgtgctgcgcatggcggaatgcggagcggagtaggcaggagtgaggcggcatgcggctagcgcgtgcgaacacaagaagggcgcaggacggcgcgggcggcggctgcctcggctcggccaacagcagtcgtggaccagcacagcccaaacagagagatgggtaaaggaggtgaatgaaaagaaaaggcgatgggctgggttaaggtagactttaacccagggagagatagtgttcaagaaatttttgaatagatctttggtaggatatttttgaataggaaatcgatgagactggggattttagaatatttgcacgatgactccggtataacttaaaataaacacgagctcttctgatgattttgagaattttgtttgggatatctcgaatttggtttggagaggaaacttaacgaagttatgcggaaggtggaatctcagagggaacaaaagaagtatatggattgggaggctccaattcgaaagaacgaagaacaatgactttaaatattttcgcaaaaattttaccctgaaaaatctagtatgttacacgtcaatgcccacgatcacgggtgaatgtgagatgattctcctagtgtagatttgtttgtctatgatttgcggaagtgatttgtgggattgaaagtgttactagaatcgaccatgatggctgatgcatggatgaccattacatggtatgaactggtcttgtgtggatcgggatgtccaatggcaacatagatcaagcttcccgaatggatgcagtttgtgcttgaggctatggatagctttgggggctgaagagatagagatttttttttaaacgatcgcggcaagagtcttgccgaatatattagaagggggaaaaacacaagtttacattaggtgtttacagataaaatacgatgaactacttgaacagaaggcggtgatagaatagggatcaaggtggttcaaaaactacgttacattctcggcagtcttctatgacaaggtgcgcagtcctctgtgcgttgggctcttctcccctgaatatctttgcgtttctttggagccaaacgtgccaccaggtttttattaaggcgccaatccttgccttgacttcttttttggtccccccccccccccacagcaagatttctcatccattccgcaatagtggagtgattgtgaccatgatagaaaccgctcgcagtagctacttggctccaagtttcctggatgaactcacattgtctgaataggtgatcggcatcttcgaaagcgctcctgcataacgggcaaatccaactacactcccagtgttttatgagtaaattgtctgccgttagcactttgtgatgaagtatgagccatcctaagaatatctgcttgggaagcgcttgggttttccaattgattagatatatcatgtcttgctgcgatcctaggaactgagcacgacaggcgctgcgggccgtataggtcgcaaaactggatctcttccagatgatctcatcttcctccccttgatcgagctcaacctcggtcaataagcttcctagttggaccagttcgtgaatttcctcgaccatggtgatttgcctgaaggattgaatccaattgccatttgtgcgttcagtggagacgttcctgcttttcctctttgctagcttgaagagagccggggtgacgtcctttgggcaacgccccttaagccagttatctttccaaaaaaaggtcttagttccatcacccaaatggatttcagtgcaggcttggaagagatgaatatccctctcattgcatggcaattccattttgtcccagggcctggattggtctttccactttatctagagccatcttagtcttagggcagaggagaatctctcgaggtcgaggatccccaatacccccatgtccttcggtctacagactatctgccaattgaccaggcttgctcgtggtttaacattctcgggttcatctcctttccatagaaatgctctatgcatcttgtcgattctcttgattacccattttggggatagagatatgagatcggctgatgcttcatggatgtagaaagtgaaaagaaactaataagggagctgagaagagagttgcctcatgacaaccactatgagtaggtgtgatgggtagaggactagtatagagacttcaccaataactttaatcaactaaactttgccttgtctgcttgagttattgcaaagcaattcgtggataggatcaaggcgagagccactttccaatcacttgttaaataatccacacttggtgtttttggaaaatgatttgaaaagtttatgaaacaaacctagcccactttgaagcctggatactcatatttcttatggcttgctgagtactctcatccctatgaagagtgaagtaaagttgaagattaaggtttctttcctagtcccaagccgttgcttatgcattgagtctaattaaatattgttgcagattctctacttgcaggttacattatcggagttttccccaaggtgtgcctcctgtaaggtgtaatttatctaggttatatttagttgcaacgatgcatctccgttagccatgggtaccagcattgtgtcacaggactagtactggcaatgaggttccgcggaagtcggttcacgataatatcttgtggcgcaccctctctggtgtcactacaagtggtgctagtgcatggtgtgacaatctaaacgatggaatagcaaactactgaaagatgaggtgggtaaagttaaatattcgcacttctccaaaactaaccattacctacatatttgaatactagaacttctaatcaaaacttagagcacgactagagaaggtggatcaaaactactaatcacagtgatcggaagcccaagagcattgaccagaacttctggtctaatctctcggctaaacagagaacattggccggaacctctggttataagtactggaacatctggcccgcattaagaactaataccattttgccatgtgagtatagtgcatggtgtatctcacttaagatcaagcatattttgagcgcttggaaaacaatttagtccttcaacatgaacccctcttaatagtacaatcttccaagtactcaatttcaaaataaaatggaatttaaatcatcttgagtcctttttaccgcttgctttaattttgtaggggctccacgacttaagacattcatcgtcaggactagcacatgtactttagctcaattgaaccaataataccttaattgtcatgttattaatcatccaaaacccactagggcctagatgcactttcaaggggtggctgttgctagggcatgtgttgcccatgaagttgactgaggggaaagaaatattcctttatcccaaaatattgtcatagaataaatactagctcaacatagttgctaaattatatatactctcgtctggttgaaaataattgtcattttggacaaggatatacagtctccaagaaataactttgaccactatacatatggtctccaagtaatattctagaagttatccataatcaaaatttataaagttcaaaaacattcttgtccaaaccgaaaattattttcagcctggaaggagtattaaacatacaggtccaacactagaccaacaaacaataatcccacaattctaccttgatggctcgatcgaatagatgtggagacaaggatgcttaagaacaaagatgtagtagatagagaaaacaaaccatagaaaatggccatatataagcacatagcatttgtgtataacagatgaaaaatgttatctaaagatatggatataattattggcaaagatagacatagaggaaattaggagaacacaagcatagaaaaagtagaaaaacagagaaattataaacctagtagtacattagtacatcatttgtttgatagtacaactagtatgtagaattactgggctgaaaatgcatctcactgaacaacattgatggatggatggagtcccacacagaccccacgcgcctgatgcaaaccattaccaagtacttgagactcaggatcctcagaagcaacacgatggttggcaacctggctcaacttcgatagcatagcatggattgaaatgtagcctagaacaaatattgccatcgcgatgacatatccagatgtgtcccaatccctactagagccagtaccataggctaccaggagtccaatcatgtcgagaacaactgtcgtgttcattgccttcaacaaccactcattgacattcagttttagcgactctggcaacaacaagatgataacaatgatagacgccatgaaggaaatggagttactgtagaagaaggcgtgataccgtagcttttgcttgtcatgcaagactgggtcacccgcagcatgcccagcatcatcattgctctgccacacgccacccggtgggtgcaagccggcctggtaggtgacactcgctgctagaatccccagtagcatcaagttcttgcgcttggtgtactgtttacgcttgatgtcattcgtattaggtacttccgcttcatttgttctcctgttctgcgtgccctgagatttctggtgcaccacgaatgctacaagaagtaagaccagaaaaatgaatagcaaaacgaagatatatatggatgtccgcatatgttgtgagcttccggcagcataggcacccatgagaccaaacatgccagccaccatgcaaacagagagcgcatagctatgaatggctggcctatacaaatttggattgaccaagagtatgataagggcgatggatgacatgaagcttgttgtgttgcagtagaagaaggctttgtaacggcgtgggtggttgctaaagaggactgggtgacctgcatgataaccatgttgtttatcatcatcttgccagcagccgcttggcggggttagcccagcttgataggtgatggttgcacataagatcgcaaaaaggagcaacctcttgcgcctcttttccagcagtgcattgtcttcacctagcatactgccatcattgtgatctagtgtgaagaacacgatatggatcaccacatacaccagcactgcaccagctatggccatgacatttatggaggtgcttgcatcccggcagctaccagctgcatatgcacccatgagcccaaataagtctaaaatcatggctgcctccagtgcatggcgcttaagcagagacttgctctgcaccaggatgatggcgagtaaggatgccacgaaggcagttgagttgaaatagaaaaatgtcttataccgcttagcattaattgttaggagaattgggtcaccagccttgtggccatccttgtcaacctgccaataaccacccggcgggtcaagcactgcttggtaagttatggttgctgccagagtggcgagcaatagaacaagagagcgagccttctctagagcttggttcagtagcttctccctagtaattgaaaccaaagaaaagtaaatggatgattgtctaataacaaaacataaaattaaatgtgtgagtaagcttttttacatgttttgggaaggtagggaaaggtaccgtcgtttacgagtatgcctaggaaacactataccattcctttaacggaatattatacgttgacgtcagtatgatacagtatgtaatagacctgatagctatgatatcagacttgatataacctggtactaatgttatacggtacaaaatacctaataccatacacaatacatgtaggtaccagtgtattacgtatgtcaatatagatttaccatccaacactattgatacggtagcactaaggagggaggtattaggaaaggtcatcatggattaacattaaaaatgatcgtacgtactttttcaagaacagtagatcaaataaacactaaataattttgtttcacactgagacttaaagagaattatcaaactctaagatctgtaaaatgaaatattctcgtgagacgacgacatatacctgtcatcattagcctgggctaattctcgggccggttgcctgagatgatatcgccgttctttcaccgaagaatacatcccagcaagcttctccgacatgccggtgttgctaagtgcgcgcgcggcgcacgcgacgacggccagatggatggcaatgtaggcgaggacagcgccgatcagagctactacgtaggcggtggtgtgcgccgccctggagctcccggcggcgtaggctccgacgagccccgccagcgagacgaggacgcacccgtacagctcccaggcgcgcaccgtgccgtcgcgcagcttccggtcgaggagcagcacgatgacgagcagcacgcgacgaacgcggtggtgttgcagaggaggaacaccgtcagcctcgccgggtgcctgtcgcccatgaccgcgtcgccggcgcggtggccggcggcggcgtccgagtccgaccagaagcctcccggcgtgctcaggccggcgacgtacgtgaggctcgtggcgaacgtggcgagcagcaggagcaccttgcgcgacttctccttcacgacgtgctcgtcgccgtcgtgctcgccggcgggcagcgaggcgagcaccacctgcagcgcgacgtagacgacgacgagggagacgagcacgacggtgaacgtggtggtggtcctgtcccggcacgtccccgcggcgtaggcgcccatgaggctgacgaggtcgagcaccatgaccgcgcgcagcggcatcacggtgacccgcacgttccgcttctcgtggagcacggcgaagaggaggatgaggacgatgacgacgagcgacgacacgaacgcggtggcgttgcagtagaagtagaggaggtagcggccgttgtagtggtccctgatgacggggtcgccggcgaggtggacgccgtccttcgcgtccgaccacacgccgcccggcgggctgaacccggcgccgtacgccaccgtcgccaccagcgtggccagcagcaggaggtacttccgcagcgtgtactcccatggctgctcctccgcaacattcccgggcggcggcggcggcggcggcggcggcattggcgaaatcttagtgaactcaagaggaaagattgatatggcttgtacacttgtacactttgagctggactcatgcacccacctccaaatatatagacaggagagagtaggggtgctctgctagtgcgcggctgaccgtgtgggaaaaaaaattttacgcggcagtgccgcacgacgcttctcgtgcaacaccgtatgaattggtgatgctgtatcctactgctgcccatgcgagacttttctttgagccgctaatttagctatattggctcggctcaaagaaaaatctcgtgcggatagcagcaggacacacgtcgctagttcgtagggtgttacatgagaagcatcacgcggcactgccgcatagaatttttcttttatcgggtgcgggtgtgggcacgctggcagtctgcaagggagtggactctcgagggaacatctccttgttatttgcatgtcatctaatagttgtagaaaacttaaaaaaaatttaactagatagatttatatgtggtactccctccatttcatattacaaatcgtttgactatttttctagtcaaaccttgttaaatttaacattgaatatatttagataatatgtttgttttatgttgaaaatactactatatttttctataatcttggtcaaatttaaaaaagtttaactagaaaaaaaaagtaaaacgacttataatatgaaacggatggagtatatcactccaaaaacatataaaatttaacttctacaagttgtaaaaaaacaagttaaactatggctagttaacgtatattcacagtcaaattggtttttcattgcagcttgtatatttgtggagtgatttatcacatattagtctatctggttgaatctttttatattttttcataaccatttaaatgacaatagatacaatgaaggagtgtcgtccctttgagagtcagaattgtagcccttatgcatatacgtataaattgatacaaatatataaagaaagttgccacgcgatcgcgcaagcagagtagagagtggtacactaagtccctgactctgtcaagagagacttgactctgtcggtcgtcgtcgaccagctgtctaacacttcaaaagcaagatatataatcgcatcatgatcaaagtaattagatatatcctctattcgtaaactatggttatgtcgatccaattaattgcaaatcttgaaaagaataatataaactccaaggtcagatcattaactatacgtgtgccacaaggacacgcgcgttcattccctccgtgactttcagagtcttggaggtttcatacttccgtacgtagaggtggacttaatataactatcgaaaaacaatactcgacgtttgaattttttttttcttaatttatattcattgagggcgatttgactattttttttgaaaatttatgtcactttttttatttccttgaataacaacatagtagttgtttttcatcagtactccctctttccaagataaaaaagttaagcaacaaactattctaacctggaaaaattgaaaaaatgctgaactacatgatagaacttacaattccagtacaggtaaaaaatattcaaactcaaccatgtagcgccaaaattccagtttaaaagaagtaacatatattacatattgcataactctgcaatttagggcttaagaatgtacaaaattttaggcgcttgaaatctagcagttcccttaattatatttatactctaataagtttgcagtactatgaagtagttttttaaagataagtttgcacatatttaagttttcaaattaaatatctaagaagtcattaccaatatgatatatagaatcttgtccaaaacaacaagtggttttttacccgatgacccgatagagcgccgtttctccgagtaatgatggatgtatgccacttgagcggtgtgagctcagtaattaaccagttgtacactaataacatacttaatatagaagtggagcttccgcccctgattagcgtttgcttaactatgtttctctttttgtaggtgtacgaaacgtaggaaaaggtagtaaacaggctaactgatcgaaaacagccgcggagattacactccggacaaaatccgtttgccgccggcccaccaccaagacagcatgtgcatgccctgtccgtccagtacgagtggatcaacaggtcagggcacttgatgatgatactatggtggtagatgagactgaaaacatatctcctaaggtgccatccttttcctttgttttggttaatttttcactttggaacatatatttaggataaaagatacacatggataagaaaaacgtaagatttttctcatgcatagaaaattacacggaaggtacagaaatgacctcttccaataaaggaaagaaaaaatacaggcacgccgaagaaaaatacaggcatcaaaagaaacatatagaaagaattttttccgagaggtttggatcccatactaattataaattaattctcaaaaatcactatgatttgagaccgtcccaagaaattttgaagaaattggaattttataagattttggaatggctattcctttacaccaaatggacatttatgaaaaaaaattgtagtattttaacgagtaatacttacgtatgtactaagaaatctttactaaactcttactaacaaaatctcaaccattggatttagtgggttgttataaaaatgaagtttcaaccacatttgacatatcaatttaatatgatgtttgcaaacacgttttttacatgtatcctttttctatttgaaccctataaaattcctctaaaactccttgttctaaattggatcccttagatttttagtcgttaaagcacttgtcgtgcggagcagttaccatgcaaagtagatgtacttcaaaccaatgtgtcataaaattttacaaacttttttcgtaactatttacatgtgttttgatgagaaatgatgggatgacttctaaaagtctcacgggataaaaatcactttccatgcatctggtgcgtgccaagactcaactagggatgatagagaaaaataaatacggataccattagcaaatacttctcagatagtccgaatataaatatttcttaggtagtctgtatacaaatacagatataatatcagagttttcgacggatacgactatccaatgaataatactattcggatatccgctaaagacataaaacatacttattttgtttctaactctagaccttcagcatacctatttagattttactagagctttataaattataccagtccacactattaatattatttaaacttttaaatattttataaatttgtatgataatatcagttagaaatgtacttatacaaacgatgttgtacatgttgaacttaattagcattgcttattcttcgatcaaactttttatataaaacgagctaattatgtgtgatgctatttgtttttgtcacaagtttaggtcgttcttgtgttccgagaaatatttatttctgtactcttgtttaatcatattagatccttatttatattcgatacgatttgtatttatttctatatccgagctattcatatttgttttctattaaaaaaacaaaaaagaatatgttacgagtataatccgtcctccattccgtattcattcctaggacctttgactaccgaaagtatgtagccgttgtgcattcgagttcaatgtttgcaatataacattcgttaggttcgccaggtttagatcgccaggtttagatgagtaagagcatctccaataggctatctaaattaggttctccaaacactcatatatccaactcttcatctgatttatcaaattaaactcgttgcttactctgacaacatctctatctaccctctctattctaagtctatgatagtgcgattcatatgtcagtctctccaccatcctcacaaccacacatccttcaatccttcatgcatcctgagttagcaaccatgctgggaagaggggagaaggcagcagcggtggcaagtggcgagaggaatggatagccaccgtcgttggtggcagatggcgagagcagaagaagacgacaatgcagcggcggcagcaccagctgcgatggtggtgagctcgcgctgtgggaaaggtggagctatgacagcctgtgatctcggccggcagcgaaaggagcagttacctcggctggcgacgctgtgacgactcaactgtggtgccacatcgtcatctcgctccgagccatccagccgaccaccgtcgtgtcattgtctcgcactcactactcccttgccaccgagccgccatcgcgccctcgctcttccctttccaacatcgtgttgtctcgccgtcgagctaccctatcgccctcgctgtggagctgcgtcgatcttgcgccctcgctcctcccttgtcgtcattgccttaaacgaagaagacccctgggccaccttgcgaaatgccgtgtcctcctaccgtctctcctccctcgccgagccaccctcgccccatctcctctggccgcgggtaaaggctggcttgatggagcactgccggatggctgcctggcaaggagagagagctagagagggggatagagtcatggggcccacggttggcgagtgatattgggtggccaaattatgtcagggattggagagatttggccagcgggttggagaggctgttggagcactttttttttatggagttgccaagttttagcttggaggtgcacttagagtctgttggagatgctctaagttgctacttgctagctgctggttacagcgacttcgtccaaactaactaaatttatgtggcatgtaaaagagctataaaaacgttatggttaattaatattaattattatgaccttaaaataaaaatttatttaatttttaaaagaattttaaattttcttttaacaaaacaagttgtttagaacaatagctcagccaagaagttgtttagaacgcagccacttggatcgtatgatggcgtgagcattattatcggctagtctatgtttagcaatataaaacagtgggatgaggatcctttatcataatgttactaccattaccattacagagactgatacgtggtattagccaaatttaccgcattttattcgggccaagagtacagtgttacttgtaactttgacccatccaattctgataggaataagtccactttgactcccttaaccagtggccgaatctgattcgtatctctgaaccacaataccagatatctccaccccccctcctctccccaaaaaaaactattaaaaccggtgcaatttgactcctcatcggttttcgctgatgtggtgctttgacttggtcaacttgtgttgacatggcaacctagtcaaaaatacaagtgatgcccacatgtaagtgactagggaaaaaataagaaaatatgaagtccacatgtcagccccttctctcctctctatctttgcaagactccacgctcgatcggcagctctctgtctgggtatggtgaacctcggcgtccctggcgagctctgcgggcgactgctagagctagggaagcagttgttgggtcgcaaccccttcgagctgaagaaggcgcgaccgagctgcttctggggcactgcgccgttgaaggcgtggctgagccaggcctcgacggccaccagatagggttgcaagtgagcttgtccgcgaacccgcttacaggcaaaattagtgggtaacccacgggtttgactcgcaggttacctattaatttgacatataaatgagtttgtagattgacccacttacatctctaaatgcggcaaaccggaccacgacacaaaaattcattagttatcatctatttgacctataggtaaattcgcgggtcggtccgcttgcatcccaaccaccagacggagcgccatggcttcgtgcgccatgctcttcctttgcctcctgcctcgggatggagccccacaccgacaattccgtgctctccatcatccttggctaggaccatggtggtggcctgccacgacaatcggcagggacagcaaggttccgaggtttgaggtccgagctcctccaaagcggcatagcaccagcacgacggtggggacaggaagcatcgccgccgagggcttcttcggtgagtttggcagtgcgattggcgatctttctccacccttcccaccgatggtgagccccttcctccacttcgccactgctgcatcaacgttacacctcctcctccaccaccacgccgccgttgtcggatcgaactgcgagcgccaccagaagctgcaacaggcgaggcgagcattctccaagccgtcttctccaccgctgccctgcattcccgcgctatcggccactccgccactagcgtcagggcagaaggggccagggtgggagagaaaggaaatccccaccatcgtcccgctacctccgccgccgctctccgtcatcgtgccagtaccctgctactgtcaggtcgagtagaagaaaggggggagagagggtgagagaggttagtagagagaggatgatgacatgcgtgccccactttatttttttaaatttatttgatgactgggatgccacgttagcgaaaccaccctccaaaacaattgagggatttaaagtgcaccggttttaattgttgaggaattgagatatccgtattacggtttagcgatacaaataatattcggtcactatttaataaagtctaagtgaacttactccattctgatatatatgtagaaatagggccttattctacaggaatgctaattggcgcgtatgccaaaagcccacgaaagcccacgtactatactgccaaaagcccacacatgtgtttctttcctgttttttttccttttttagcagccactttttttttctctattttcatctcaacttttaaaaactttcaactgaaatttgaaattttcaactcagatttgaaatctttcacctaagatttgaaaattttcaactcaaaatttgaaaactttcaactcgaaatttgaaattttcgaagtcaaattttgaaaactttcaacttttcatctcaaattttaaaaactttcaactgaaatttgaaactttcaactcagatttgaaaactttcaactcaaatttaaaaattttcaactcaaaatttgaaaactttcagctagaaatttaaaatttttaagtcaaattttgaaaactttcatcttctcatctcaacttttaaaaactttcaactgaaatttaaaactttcaactcaaatttaaaaactttcaactcaaatttcaaaactttcaactcaaaattgaaaactttcaactcaaaatacaaaaacttctaactcggatttgaaaattttcaaatcgatatttttgaaaaactttcaaatcgtattttgaaaatttacaagatcaattgtttttgttttttattgagaaattactatagcattttcactaatcaccatgattaatactaattgttaggattagtgacgtcgttgtcggtggaggcccgcgtgcgcgcgagctagcctcctcgcgcgtacgtgcgagctagccatgccccttattctagcttaccaaacattcgacgtgggccaaaatatatgggtcagcctgcctaccttttgacctattaatttcttagtgggccaaattcctgtggcctgtggtcctgtggatcacattttagcccattaagctgctctacaccagccaatttaacagcataagtgggccatttttggcaatatattacgatctaaggaataagtctacttgatctccctagtctccctcaaccgcaattctaagtttaacgtctccccatcttgaaaactggtgcaaatcgatacttagttttcgtgccatttggcgtctacatggcacttacgcgtcagttaaaaataaaaaataaaagtttaatgaactcacatgtcaatcagacaaaacaaatactaaaatatagtgccccacatatcagtctttatccttcacccatatctctctatctcccatcttgttcccactaagatgtccctgacgagctcgacgtggtgtccactgaagctccctcgccggactccgtcccgctgccgtcgccgtccaccaccggtcgccgccccacgctcccttgctgtcctccgcgaagaagaaaatgagaccggggagaaggggggagagagagccgtgtccccgtcaccgccggcgctgccgccctagagagtcgcgtttctgctgctggcttcttcttgcttggcatctgcgaagcacaggagtaatggcacgaggtcgacgacgctacgctgccgttccatggcaaggatgagccgcggaggtacgggaagatcatggcgtaagtggccaggttgaagaagtcttcttttctctcactcacaccgtcagctgctagctttgttagctaggagtagctagctgcttgtcctcttgctgtcgagaggaggaagaaagactcgaggtctcggcgccggagctaagctgctggtggttggttatcgtgttgacttgtgcagagcccagacggcaatgtcatcgactgcgtgccacctcacctgcagccggcgttcgaccactcgaagaagctccgaggacagaagcccgaagtgactgatcaatccattaattattcattcttttttgtttcgatttgcagtgatcgttcctatctcggtcgatgttttcttaataatgtttgtgactgtgtgtgtgcggctgcttgcaggttgagcccgagccagaggagaggcccaaggtcgacggcgcgtcggcggcgcagggggaggcggcggaggaggaggaggttgtgttccccgcaggcgtggacggacggcgacgagccggacgacgaagcgcgatgtgctgaggtccagctcctccctccgttttgggatgaagtagccccgtgccgccggcgtcgtccgctgtgactccactagcgagtcagtggcgtagctacgatttagagtaaggatggtccgtctacatgtaatatgaaaattaaatgggtggtccactgtacaattttattatatacatatactattgttttaatctcgatcaaattcttaggtggtccacggaccacagtaccacctagctagctacgccactactagcaacggccactagaggttagggatggcatgtgagtcccataatatttttaattttttcatgtgattgacatgtgagactcatagatttttttttttggtagggttgcaactgacatgtggatcctattgaatttttaatgccacgtaagcgccgtatagccgtcacgtgagatgaagactaagtcaaccatgacacgtaggcgccacatcagtgaaaaccactctcaaaactacagagtcattttataccggtttcgatagttggaggagttgtggtgtcgacgttgagggaggtgatttaatcaagagcaagaattgaggaatgtcaaatagacttattctgagtaataaggtatagtggactaaaatttcacccggctgtcaactactacctcctttggtctatttggaaataagttcactttgagtcccttaaatacatatctaaccttattcatattcctaaaccgcaattccatatatcttgagcctctaataaatgaaataggtgtaacttaattctctcaacagttatcagagtagttttctctggcgtggcatgttggcctagtccaaatagctgtcaattatgtggggcccacctgtcattggcccctctctttcttctcttttcctcacgatggcggcgagcatggcagcagggcagtggtgggatgcagcaaggcggcaacgggtggcaacagggtggtcctccaggcgcttgctcgtgatgagccctcgccaccgagtccactgccagagcacgctgcccatctaaagcagcaaggccatgatcgatgccgtcctggggctcgatgccctcgaaacaacgatgagaaacaatgacgcgacctcggagccaaacaaggatgacgcgaccatcgattgtcgctgcttctttgccagacggatgtaatcgcagtgggcagcggatgggcatctcaaagagcacgccccagtaggcgaggatcacgtcattgcataaggaggtggaccttgtcgccatcggcaacggtgcgcgtcttggtggagtgggcgttcgatctacactcctctgccgccgaggccacctcatgcttcacgagcaccagccggagcgggctcaactaagagaacccaaaggggatattgctctgtgacggccggtgtctgcccttccatggtggcagctcgagtggcaatgggtctgggctcgaggagggcgagatagccgacagtgtgaccaaattggcatacgacagcaacgggagcgagttgagcgagaagaacattggctgcgactatgaccacatgtggaggatagagggttccaccgctgccgccgctaaagggagatgcacctgcgggtgtgccggttgccgcaggtagctacccacttccaccaccagcctatgatgacactaggtgggagtgcgctgctggattgtctaccttgtgctgtcatcatgcgatgctagtggcttcctctccttcattgctatggcagcgtgttgctccagcggtagacgacatgacccagttgcggtggttgcctcgtcagctcactccatcatcaccaccgctcccctcatgggaggagggtgacgagtagagctacaccgctcgccgtcaaggtgtcaacgcttttgtgtgaaagaaaggagaggagagaggggatgataagagtggggactgacacatgggccccacactttttttcccttgtcaccccatgtctattttaatcttcacaacgactgggctgctatatggattcgcgcattgccatccacctacgaaatagctgagggagtcattttgaatggttttaatagttgaggggttgatatacccggttttgcgatcgaattatacaaattagatttcaacctataattaagggagtcaaattggactttttccagtctatttagtgcctgtttggcacggctctagctctaactccatctcttctagagttagagcctagccaaacagtttcagctccatataaaattgtagtggagctggctagagcgctatcacaaaatgaactagataggtggagctaggtttaggctgttccacaactctattttagactcaactcttgaagttaaatttagaagttggggctctaccaaatgatgtcttagatctgatcaacctaattttgattttctagcacaattcaggtatattgagcagcagtttttctaatttcggcaaatgatggaggggataaatttcgcccctttttttattttaggtcccacccccactcccaactccttttttttgcttgcttgtagtggatcaaagttcgagttcatttagtactacataatagatagattaagaacgactactgttgtgtatgaattcagtaaattcaggtttcatctgaggatggacgagaactcaggcaggtgtgaatccagtgcacatggcaggctcgcacgataaggaataatattttactatgctgttatctagctttaagagcaattaggtttctgtgtcactgtgatctacacgctgttactgttagggatcacagttatttcaaagtactcagcatgaaaacgacgacttcacaaacgatctcttttcttgtcagtcagaccgcatctcaaattgcacgagttctactattaacatctaccccaaaaatacgtttcttagtgagtctctttattaatctctctccagaactattttatggtcactcacacaattgctaccttttgttaagtagccctagtacttgttccagctgattcttcaccatatctatggagcttaattaaatagcagatgctgaataaaggtacgtgctaagattacatctaagatccaacttgcacttttattgtggtgtaatctaaaaaaagtctactctccccagtgttaaggactcaaggcaatgtactggcatatgcatcagatatgactagatccatcagattctttacaatgttcgaaccagtgacagttgcaacttgcaatctgtaacttgtgcagtcaaaatgcaacatctcagctggaaaggaaaggaaggccatgaggcaagcgacccagtcatgcgggaacaccattctatccgtctgaaggcattctttctcttaaatgctactgcatttgtcatgtccctgctcaccattatgctgcttctagacaagcggctcatcatcccattactccatgacaaggttccaagcacaactagaccagtgcggactatagtgctcaaagcatacatctctattgctcttgtcggtcttgcgggggcctatgccaccggaagcagccgagaaagtgacactaccatctatgtgggcagtctagtttttgccgttcttgcatgcattattgtcctcaagacaattatattccatcagtcagattcaagtgacaggtatggaatgcatgtatatttttctgcttccaaatattattgacatatgcaattccatcttaaatacacatgctcatgaatgactaggtcaagtaatgggacgagaagaagaaatggtgaagcacaggcaaacccaagcagtagaagagaacaaacaggcacaagccatggtggagccaagttgcccacaagcaatggtgtaccaccgaccacaagaaatgttggagtgcagacggacacgagcaatggtggagcagacacaaatacaagcaatgcggatattctggagaaggctcaatctcttgttgtactgctttccactcttgtagcaactgtcacataccaagcaggactagtcccaccaggtggtgtttggcaggacaactggaacggacatgaggctggcgatccaatactcctatccatgcaaccagaacgttacaaggtatttttttactgcaactcaatggcctttgcagcgtccttggtcatcatcatcttggtccagtataaacctatgctcaagcgccgcatactacagtttgccatgatactggatttgtttggcctaattggtgcatactctgctgggagctgcagagatgtaaccacatccatttatgtcattgccttggctggagctgtcctagtctatgtgattattcatgttctgttcgtcacacttgaagatgaggacataggaaagaagggtggggacaaggacaggaagcttgaggacaagaggcgcaagaggttgctcctttttgctgtgttgggtgcgaccctcacttatcaagctgggttgaccccaccaggcgggtttcgtctgaaggatgatgagtttgggcacaatgcaggcgaccctgtcatcttttacaactatccaagccgttataaggcgttcttctactgcaactcagtgagcttcatgtcatcgattgcactcattatactccttgtgaacccaatcctgtacagaccagccatacgaagctatgctctctcagtttgcacagcggtaggcatgtttgctctcatgtgtgcctatgctgccggaagcacccaacacctaaaaacatccatatatatcttcgggttggtagctttagtgctcttcattatgatcttagtcctaatatgtttctatcatagagatgtcaatacaggaagcatgtcaaccaacgaagaagatttagagacaggaagtggagttaagacccctgtgaaacaagaagccttcactgagacaaagtctgttgatgaaataaaagaagataacacagcagcaaagtcccctaaaacaaaggaagatgacagcacagtggaatcctctgaaataaaatatgagggtgaatccaaacaaaatacaaccaacaagtccattgaacagaatagaacagacacagactctctcaggacagaggaagactcaaaaaagaaacatgcaacacgcaaatacttgatgttgttagcagtcttggcggcaagtgttacttaccaggccggcctcaacccacctgggggtgtgtggcagggcaatagcaatggtcatgcagccggtgacccagttatgcatgacaacagaaggtaccgttacctcatcttcttttacagcaactctttttccttcatggcatccattgttgttatcatcctgttgctaccggagaaactgctaagggagaaccggtcgtttaaggtgatgcatttaaccatggtcatgaacttgctcggcctcctactagcctacatggctggctccagaatgaggtcagagtcttctggatatttcatggagtttgttatcactacactatgctttgctgcactccacaagattctatccagcgaaaaggagcaacaaaatgatcagccttctcaggtagaccaacaaggggatagtcaagtcagttagtttagatgttactgtgccttgtaactctatcaacacatgatttctttgtttactaggatgcattttgtactttccaatatattagctggataaagtcaggcacaatcacaatgtatgtgttcccaaaaaataaaccatgattataaatatcaaagttaagtcctgcttgcccaatttttaggagccaaaagagacttccaggttttcagaagtattgaaacatgtcaagtggctttcaaatagtacagtttgcttctacaatatttttgaactaaatttgatattttctgatctaaaaaacaatttcttaaagggctttgtggtacatttatttaaacaaagtatatgaatcttaaaataaaatcaatttttaatggctagcgttttatgcaggagtaaatacatttcacgtgcttatgaagtataaacaacgaagaaaaaatgtttttacccatctctccaatgaaatcttccatgttttcttgggcccaaacctagatgcaggtcaaccattactt

SEQ ID NO: 73 - DNA, 1960 bp, Oryza sativa
aatcgttgatggttacgaacagcagcgctcgtaggttaaactcctcctgtttgtcctcgtcccacacggggacaccttccttcttccacaactgtttaagatcttctaccagtggtcttaggtacacgtcgatgtcgttaccaggttgcttggggccttgaataataatcggcatcattatgtactcctcttcatgcatagccagggggggaggttgtagatacacatcgtaacgggccaagtgctatggccgctgctcatctctccaaaaggattcatgccatccgtactcaaaccaaaccgtatgtttcgtgcatcctttccaaattctttaaattttctgtcgatgtttcgccactgcgaaccatcggcggggtgtctcagcatcccgtcctgttgacgctcttcagcgtgccatcgcaacattctagcattccccttgttcctgaacaaacgccttagccgtggtattatagggaaataccacatcaccttagcaggaattctcttctttgttagctgcccgtcaacttctcctggatcgtcccgtctaatcttgtatcgtagtgctttgcaaacagggcatgcttctaggttctcatactcctcaccgcgatataggatacaatcgttcggacatgcgtgaatcttatgaacttccagtcctaacgggcagactatcttcttagcctcgtacgttgtctcgggcaatttgtttccccccggaagaatgttcttgacgagtttcaataaatcgccaaatgccttgtcactaaccccattttttgccttccattgcaacaactccagagtggtatccaactttttgtgcccctgctcgcaacctgggtacaacgaagttctgtggtcctccaacatcttgtccaatttatgggcctccttttcactttcgcagtcctccctggcgtcctgcaacatctgaccaagatcatccgcaacgtcgttaccatcagcagctatttcctcctcccccgtttgatttccttcaaatccaacatactgagcaaagtccggaatattgtcgtcttccacttcatcttcttccatttcaacaccttgctctccgtgggatgtccaacaattatagcttggcatgaaccccgactcaaacaagtggaaatgaatagtcctggatgcagaatactccttctgattcttacacttattgcatggacaacaaataaaacccctttgcctgttagcttcggccactctcaaaaaatagtgcacgccgtcaataaactctttggaccgccggtcagcgtacatccattgccgatccatctacatgagtcaaaaaaaccgtacacaaataattattcttacaataatgacagtcatacaataattataagatatctttattcatacaaaaatcataaaatattacaccaaataattcttaaaaactatttgtaaagttttaaactaattttaatgtgttttacttcttttaattttcattttagtttgttttctattatttaagattaactttcactagagttttccttctcaactattttataaaaccttgtttagcaaatgaactaaatttctatatattctttcttccccacacacattttctctctcatcaacttacaactaaattttggagacaaaaaaagtgtgcaaaacataggtgcaaatgtagtatgacaaaaaaaaacattggaggatgaagttgcaaaccttttaggcacctccgatttgtatgtaatcaccaaaataaattcaatagaaattttggcatgacctcccctcttttttgaagaaattttgaagcttgctcgggcagctggaggaggaagaagacatatatataggggtgggactttagtcccggttggtagcaccaaccggggctaaagatcaccgggatctttagtcccggttggtattaccaaccgggactaaagttacgatctttagtccc

SEQ ID NO: 74 - DNA, 5386 bp, Oryza sativa
ttagtcccggttggtaacacaaaccgggactaaagatcaaatatgcccgttacccttttgaaccgggactaaagatcatctttagccccggtttttattgcatccgggactattgtggaaatcggccgaccgacgaaagatggtttctccaccagtgtatatgactatctattgagtggaccaagctcaatctttgtggtcgcttggtgaggttgagcattgaacgcaacctggctcttagaaatccctcaacggagactacttatgacttatctattatctactttaccgctattacttgttttcgcctaattcatgctaatggttgtttaagcttgtatcaaagttgctttgtaggttcctctgcatgcttgctaagttgtggttcaactcgtttttgagtcaagagcttgctctttctaagtgtaattttcgctccttgcttggaacgaagacttcagtgaattggcccaaacttctaaactagactagaagttctagaacataaactagaagctccggtctttactagtccattgtgaaaatttgataaaattttcaagtatcacctattcaaccccctcccccctcccctctaggttctaggctacatcaaataacatttaggcctgatgtcaccatcgaatgtgcttgtgcccgtatcccttgaccttgtctccttttccagccaaccctccatccccttatctccctctatgtcgctaggtcagatcctctagccatgccgcgccaccctagctcctcgaccctggctgtcaagcaagcggtgtggcccctagccgcttcttccaccggaaggactttgtcatctcgattgccgccaccctcatgcaccatatcaagctcgtgctagcttctctagagcaggaggaacatcggcaagcacacacaacgaggccttagtgagcaggagctaggaagacgatgaggaagaagaggagggatttgagtattacatgaaagtttttatttttgaatgaaagttttgtgatgtctaggatgaaagttttagatttgtatagaatttttttttattttgagatgaaaattctaaatttgaatcaaatttttttgtgaattttgagatgaagagatcttggatcttcaattcaaaggtttgtgattttgaaatagaaagttttagatatatgaaaggatgttttacaattttgagatgaatgttttgatttgtttgagttagaagtttctgatttttgagataacacgcaatttgaaagcgttgaatacatggagattcctggattggagtccaactcgttggcacagccaggggcggaggtagtatatgttaggagggtgtccaagaacccggtcaagaaaactttttagctatacctcatctattttcaccatgtatgcaccccctcaatacaaacttaggcacccgtatcagcttaaactcaatctaaagtagagtaaattaagcaagtggcaccaccctctgtttcgctctagctccgcccctgggaacagccgagagatgccatgtgaaacagaaccagagagggagcacctgcgtgtgcgatttgcatccctagcccagctgcaccaaagcttaaccttatgcaatgcagttactcttgaaagtataggcatctctaaagcccccctctggtattgtaaactactagtgatggcaatcttcctcgcgaggccgggggtgggtgacaattcagccccaaagctcaacttgatgaaatactggggtatataagcaaaaatctaactagctaacccttacttatcctctcccaagaccccccacagccccatgcagccacacacaggtggaggtggcacactctctccggatcttgtctctctctgactctctcgccggcttcgttctctttctgcctatcaccggtcgcccactcccctccagcctcccgtcctctccactctcccctctccctccggcggcacgcaaggcgatgcacgggccggcgcacaggatgatggaatgatggatcatggaaatatttatgtaattgtgttcttactgaattttttaggatgctattcaaatattcatgccattttttatgatgtgtcaattatataaaatatttgtttttgctgaattgatgattgtcttgtattttttgtactgattgaatggagtggcaactcaatgctgggtcccggtcgagttgcgaagccctagaggggtcatggacgagacctgattcggccctgcatctccactcggggccagggcaatggagaagttgggggttggggacggggccgttccagcccaacccgccctgacccatcctgttgccatccctaagctacatgcactggtggagagatcgtttttagtcccggttcgtaaccccctatagtcccggtttttaaaccgggactacgaatccgggactaaagatccggttcaaatatctttagtcccggttagtgttagatgggagcggcagtcccggttagttttttttcatttattgctaattactacttaatctctaatttattttctcccaaattaggtgggatgcatatcctcaaatcaaagtaacatcccaaatacacaaatcaatcatatacaccatagattatacatcccaaatacacaaatcaattatatacaccacggattatacatcccaaatcaaagaaacatcccaaatacacaaatcatatacatcacaaattcttcatctcaatctatacatggatcacaaattcttataaaaagaaaaaagaaacaaagcaaagccgccggctggctcagccgctgccgcctcccctcctccccggccgccgtcgcgcaccgtgcggccctccgcgccgccgcgccgccctccggcgtccggcccgccctcctctggctgcataaactcatacccatcccacatgtagttgttgccgtgatctactcgcatgcagatttttctccctatccttcggcgcaactgcatggtggtgcagttaatctcagcgtgcataactgaaagagaagagaagagataaggaggactgctgcgcagactgaaagagaagagaagaggaagagataaggattagagatgaaggggtagaggagcttgtgtggacgggaatagaggataagtaatagggattatatagtgcgttttgatcaaccgggactaaagatcatcgataatacaaacggggattaaagatccgatctttactcccggttggagttaccaaccggtactaaagatccaggagggccctaacaacccctaatcagtatgtaaaccaggactaaagatgttatcaaccgggactaaagatcacgtagtcccgttctgcttataaaccgggactaaaaaccattattagtcctgtttttattgcaaccgggactattgtgatttttggttgaccggacaaagatggttcctcccctagtgatgcaactggccagtacacaattactttcatgcatatatataatctgtctcaagacaaacataaattcatactgatttagaaaattgcattcgtttgccagatcacagtacgcttttttttaattcctaataaggagtgaaatcacactacgctttttttaattcctaatgagtgaaacatggccacattttcagttgacctgtggtagcgtgaagcctattttttattgattgccaacgaacaaggctaaaccgctaaacatgctcagctagtctagcagaggaactgaacgacataataactgagaccagcaagtcatgagttatcccggtcctgtaaactgtacaagtgtccaactcaggccaactacttggtggtgaccaataaaacatatctccaccagattaagaaactttgttcagttaggatgattataatgaagcaaaatttatattttagttatatctatctgacagcagtgaaccatatgaatcttgaggttgagttgcaataatcttcatatgagcacagagaaaatgaagcctaagcaaattgtcatcactgatacacaggataaagacatgacacgagcacataatttggaagcatcaccagagactagaaccttctgtcaaagtggctaccacagaaacggcctctgaaaatgaaattattcatttcacaaacataatttttttttggttactgcgtgaatccagtgcacatggctgggtccccatgacaatgatatgctatgcattttacgtcgttttaagagaatcaactcgtgtaaaacaattgaggtagctgctgtcccaagtgacaaaaatgcagtgctagaagataactacaataacactattgaccatttctggggagattctgatagctataaccagtgttcacaatcgaactggcctctaaaaccgctcctgagtggtacttcctgtttttgagaaaaccgttgattacctataaaatttgaccaaattttgttaaaaactgaaaattcagtctgaactattttgaattcggttggtttacagaaccggttatgatcttcagccagctcaaaaccaccggtttccacgaaaatcgagcggttttcaaaaattgtctccaggactgaacttaacgagaagctaggtaacaactacttatccagaactgttatttagtgaaacaaaagataagctaactcatattgcttggagcaacgtgtccgagtaatttctctgcaaagaaacaactctttcttcactctctcttctacaccttactatgtaggagtaatacttagaaagggctaatttattgccttttccatgccagctaggcagctaccgtgggatatgcatgctgatagctgatatagacgagtaatactatttcattgtactccatatgaacaccaagctttttagtactatacccccccccccccccctcatggtatcctatttgattttgcaaatattgccgaataagaaaaggacacttttattttccaaggaaaagtgtacagagatatgcctctattatcaaggggaaaaggagctatccacacgacagttttaccaaccacatctagtgaatatatggtaagcggattccggcattgtcaaagaccaaaaagagtcatttgtaattataaaccaaaaataaagacatgtcccatcatgaactcaactgtgctgacctggctcactaataatgcaacattatagtacttgcagtttgcgcaactaagacattccgtttccatttctctaacatgaacagttgcaggattctatatattgtaacattacataacaaacaggatttaatatctgccatgatgcatgaatgcgtcaattccatttgcagggtctagcaatgtagctcctcacatcttattttattacctaaagattgcattatcaactttcatagtcaa

SEQ ID NO: 75 - DNA, 10308 bp, Oryza sativa
ttgcaggaatagggttgatctgcaccggcaagatcaacaacccacggagaggtgtatcgatcgctaaggcgcaacacaacgtctcgtacggttgtagtcggatcgtcaacgtttctcccaaatcgtagttatcacaactcaccgaaagatcgggccaacaacagccttgagtgtcgagaggaactaagggtccatcaagtggtatcagagctttcgttgcttggtgagtttttatcttcctataaccagaaaatagccatacaaaaaaattcgtatcatttacctagccatattgtgccatttcattgttcttttcagtttttgctttgttgaattttgtgttgcatcgtcacgtcgtgttgctggtcttagcgtctggttcgtttagagtttcgaattctggtcacgttttgtaccacagtcgtcgctgccaccgtgtctctgttgttgtcgggacctacgaaaacggaatcggctcgctgccacggttctatttttgtagttttcagaagtttctgtcggttagttttggagttcttgagttgcatctagagtttgccgatccttgtgtgcgtttgttttggccgtgcatgtgtcgtgcacgagaggaggaaggtgaattaccatatctgattttggaagtagtcaagtttgttttggaaagatatagtagattggattggttaaaaatcagtttcctttttatcccatacaccaaattcggctgccatccactccacctccttgccgagtcccacttgcccctttggccgagtccgactccctccctctcttccacggttccgagttgtgtcaaacaccttggcgaatttttgtttggtgtcggtttcgagatctgtttggaaaaacggaaccggcataaattcagcattccattttttttgtataattttaattttgggtttagacttttacatttgagtccctgtaaattttatatttatgtttgagtccctgtaatcttacattaaggtccttgagtcagtttttgttaaaaagaaaatcaagaaaaaagtgagaaaaaaaaggcagaaaggtgaaaaaaaagccgcacccaaaaaacagaaaaggaaaggaaagaaaaaaaaagaaaagaagaaagaagaaagaaagaaaagtgaaaatactgttatgtttgagctgaacttcatatatcagagttgtgcatgagttgttcctagtgctatcttgtggtatcgtttgtgtctaggctcgcgtctctagtacgttctagcctaggaccagcacggtacttgactttgaacaattattcaactttgcattatctgatttgagcatttgctattcctttgctacatatataagcctacccagagctccacatatttgattacagccgtaccgcaagtgtttgccaaggcatcgatacatccaacctttattggggtgcttggttgagtcggtgtatgtcaccattccacttgcattggtaagatcttgtaagagcttggttacaagcttgagtgtgtgcgatttttgagctgccactacctagtagttaataggaacgcgcatatttttgtgtatgtttcttgttttctactaacaatggcagggatacgcaagataattggggatagctgtgctcaacatcgacatcttcgtcgagacatgaggagggatcaacatgaccattatgaggtaagtgatgatgttctaggtaagatcaaatctgcactgccttatttcgagggaaactatgatcctcgtgcttacattaattgggagctagcggttggtagtgaatttcaaaagcatgtcttgtcggagaaacaaaaggttatgtgtgcctctagtgttttaattaaacatgcttctaatgattggaaacatctttgtaggcataacaaaataccacaatcttggaaagacctgaaacgatatttcagagatgtttatgttcccatgtattatgctgacattttgttcaacaaactgcaatgtttaaaacaagataccagaactgttacttcatactatcatgatatgcaagcttgtttattacgttgtggtttagatgaatgcgaagaagctaaagaattgaggtttttatgtgggcttaacaaagaaattcaggacatgcttgattgtcaaagatatacatctctttctcatttgttacaatttgcttgcaatgctgaaagtaaaatagaggagaatatgaaaaagaaacacgttatgtctttgcctccaattactaactatttgcaggaagtgtgtaatcacgaaaaggaggagagagacatgaaagagccaccaattccattgttcacactcaagttcgagacacctccatcatctaaagaggacatccaaggtaaagtaaatggtactgaaattaatcaaggtgagtgcattgttaacgaagtaaatttgtccacttttcatgcaaaagtagagcaaccgttagtggaaccaaatgctggaattcctttgtcacaagttgatttactcgctgttccttgtgataaagaagagttgtgtgataatgcttcacttatatccatgccacaactagtgaatgaacatgctattcctagtgtttctttgtgtgctgattttaagcatgctgttcacattgctaatgaagttgaggaacgtaaattgctatcttctttaaatactttgggctatgttcagtttgatgatttttgtgagctcgataatttgaaggagaaattatttgctaagtctgatttgccatgtccaactaatgctattttttatatctttggcaaatataatgatagaggaatatatttggtgcatagagttttcatttgttcggatttagagaaacatgttattggatgaaacaggttattttgaatggactatatgaagaacaccatatggaaaaaccgaggacggttttccgtgaagaaggggaggatgatgtgaccatggctactacggatacatccgttgctcacatcatggatgaacaacaagatatcaagttcgagtcctccaagtgccaaaatccaattcggccacctgctacactgctgacttcaaacggccgccgaagctccatccgacctccgttttcggcccgtgagtacttgatggaaaactctcggagtcctctttccaatgcatcaagcctcattgccaaattccatctcagtcggcagcaactgaagaaacaaggtgctgcgacacctgtaatgggcctatgggcttgtaacttcatttgggaccctggcccaggtggggcccatgtggggtgcgccccaagctggtggagcacgaccctaggcacccctaggtcgtcctcccacccctatatatagctaattaccccttcagggtttctggggttttgttaaattaaagtttagccattgctacttgcttgcagcgcgcgtgtcggctagaccgtccgtctgcttgttcttcggaaccccaacatatcatttgtattaaattcctatttgcaatatcagattgcttttatcttgttcttgcttgtttcttcgatttgcttgcaggaatagggttgatctgcaccggcaagatcaacaacccacggagaggtgtatcgatcgctaaggcgcaacacaacgtctcgtacggttgtagtcggatcgtcaacgtttctcccaaatcgtagttatcacaactcaccgaaagatcgggccaacaacagccttgagtgtcgagaggaactcagggtccatcaactgatttgtaagaaacttctgcattgtcacaggatattctgcaagaaatattgttctcttacaggctagcgaaaattactcatggttgcaagcaacagataagaaatcgtaacatatatagtaagattgtgacattcgtggggtagtaacaatcacgtaatcggcttaattaccgtgagcagttgttgggatatttcggcacaatcgatcgaatcgaccatacaatttacctcctgtaaagaaaacgcaaagaatgtgggagtagcactagcacaccaccgatgaacaatgctattacgaataggcgggtaggaattaatggatgtgattaggcgagtagctgacctgaggatggccggagtaaatccaaccgccggagcaggagggggacggggtgcccgcctgcgcgacaaggtgaggcggatcaaaaagcaggcgaaaattaacaaaatctgcggcgagatggggggaaactgcgggggcgaggccaaaggggatcggggagggcacgccacgaagctggaggggagcgagacgagaggtcgatttgcggggcggcggcgcaccatgccggttctcggtttagccgtccgcccgcccgccccacggccgtacagggatgatgacggtggatcgcaccaaaaatttcttattcttccctacgccctcgattcaattaaacatgtggccgaaaatttatctatattggtgaaatccggcgcattactgcggaaatctattatattattaaaggaacagaaaaaagagcctccacgttcactctcatggcctagaaattctcacattaatcggtgaaaaaaaaaacagagtccatatagaaatacaatttagaaatagctgagattgggaattaaaaaataaagaatattagaagagaagactagagtccatatagaaatacaatttagaaataggtgaaattgggaattaaaaaataaggaatactagaataggagactagagtccatgtagaaaagaaaaaggagcctccacgttcgctctcatggcctagaaattatcacattaatcggagaaaaagaaaaggcagagtccatctagaaatacaatttagaaatatctgaaattcggaattaaaaaataaggaatattagaagaaaagactagagtccatatagaaatacaatttagaaatagttgaaattcggaattaaaaaaaggaatattagaagagaagactagagtctatatagaaatataattaggaaataactgaattcggaattaaaaataaggaatattagaagtagagtatagagtccatatagaaatataattaggaaataactgaaattcggaattaaaaataaggaatattagaagtagagtatagagtccatatagaaatacaattaggaaataatataaacttggaattaaaaataaggaatattagaagtagagtatagagtccatatagaaatacaattaagaaaaaaaatagaaattcggaattaaaaaataaggaatattacaagtagagtatagagtccatatatgaatttaaaacttactaaaatttggaataaacataataaaatttaaaaatagagtttagagtctgtataaaaatacaatttacaaataactaaaattcaaaattaagaaaaacatgggaagaatagtttaaggacaacataggaatacaatttagaagtaactgaaattcaaaattaaaaaattaaataatattaaaagatgagtttagagtccacatagaaatacaattagaaataataaaaattcagaaataaaaataaataatattggaggaagagcatagagtctatataaaaatacaatttacagaaaatgcggaattaaaaaaatatattaaaagacgagtctagagtccatataggaatatatataatataaaaataactaaaatttgatattaaaaataattaataactaacaagtatataaaatataatatgaaaaatcagaaataaaaataaataatattggaagaaaatcatatagtctatatagaaatacaatttacagaaaattcagaattaaaaaaagaaatattaaaagacaagtctagaatccatataggaatatatataatttacaaataactaaaatttgatattaaaaataattaataactatcacgtatataaaatataatatgaatattacacattagtagttttgtaaagttattgcaaaatttaaaattatgttgtcattttaatatatttgaataatataatgagaaaacatatatgctattatatgagagaaaaaataatgatgctagccgcgcaatttgcacgggccaccatgctagtttagtatgataacaataaaaaataatatgtaagatagctagataacatcagattaagtaaattaatatggtttatgataatttaaatttaaatagtatgtagaatggcgattcaaacgtaaaaagtaaggtggtatgacttcatttaagaaaaaaagtagggagatagtttggaccgtagattaaggatatcataaaacgtaataaaaatatacattgaaacattatgtgaattatgttggatgataatttaatatgtttatatttgaaaagctcttaaattataaaacctataaagatatagcatgtttgcatgatgtttaaatgtgatgattgttagtggatgatgatgtggcatcttgttagtggatgataatgtgacatctttacatgttaagcttaaggagttagtgggggataattttatagtaagataggattcgatcctatatctatattttgagcggatgaagtacatactagtgatgccacatcaggtttattgttttgtgtacacgtacccgtaagagaagtgcatatacctttcccttcatacgggtgcaaagctagcatcaaaataattaggtgcactaccattgagaatctataaaatttcagtacaacactgtacattatagtgtttttaagtcagaaattaagaatttgagagtcgaatttttttgagaattaatattatttttatggaaaatcgcaaaagtagtggtcaaccggggaaaatcgcgaaagtaggtccctgtcgaacgggtgcagttcgatagggcgcctatcgaacggccagagcgcgactggcgaggagatcggaaggctgccgttcgacaggacctgtcgaacagcccccgttcgacaggcagggctgtcgaactgcccctgttcgacaggcagggctgtcgaactgcccctattcgataggatatccgtcgaactggcgcagttcgacagggtcgcgttctccatttatttgtaataagttatttttttaataatatgtaatttattttagtgtgtaagaaaggaaaatatttttgtaatgttatatgtatatgatttagggttttgataatgtttggtcagaaattgtagtatttatttgttggttaaaatatttgaattatttagtttcattatttgtatatttgaatgataatttgtcatgattcattcgaagggtatgctactgagtaattatccgaagaagtttatgaaatagtactgatagtactaagttaatcgtaaagtgtttctcaaatagtacggacagaacataaatgactaaaagtttaatacaaatagataagtcaaggacgatcagtgcccttcgcacgcttgctaggtcctcccttcttcctacgcctaatctgctcagtgggatatgtcaaattatcaggggggtgcctatctctagctgcctgctgtggtgtcacgtctggcccctgaccggcctttgtctcctgcgtcagctgtgtgacctgaggtgctgcgtgccagtaatccatccctacttccccctggggaggatcagtggaaaagaagtcctcaatgaatgctgtgcgaggggagtaagcaggcattccgtgatgcgtcgacgccgaactgtactcatcgtctgtttgcacaagagggagaaaccaaaaaatatggcgtagttagtaacgatacatataattagaaactaaagcgtgttattgtttaaaatgacttacatgtgtgctgtgtgtggccctgctctggcgcacgcggagtgatatgaagtccccatgctggtgtgttcaacacgttgtcccccgttggcatgtaagggaagtgtgccgacccagatgctccctgcgaggggtgaacataaggcggagtttggaatacctgcggacgtggtggtgctgtgctcgacgtgggtacccctgatccggctgaccccctggtgtactccggtgctggggtgtgctgaaaggaaggacgaccatgagatgtgtgggccgcttcgtacccgcgacgtgaagaggatagaccactccgatccacgctggaacgtcggggtagtggtggtgatggccgtcggcccgacgtctgcaccacatctgccgcgctccgacaggagacacgacgtagtagtgcggcagcacgtgcacggaagttgcgaaggatgctcgccacgtcgtcaggcctgacgactggaggtctcgcctctagtctttgcagcagggtgtcggactccacgtgaacgtgctcaacaaattccgcctgttccacaaataatcaaggcaattaaaattatttaaccagttgcacatttagtaagagtatttaacaagatgcacatttgttagaaataatgaaccagttgcacatcatttataaatactaaattagttccacatttatgtaagaaaaggaactagttgaaccaattgcacatttattagacatactgaactacttgctaactttttaaaaatattgaactagttactcaaattccacaaataaacacgtaccattgagttgtaagctgatctaggctgaggggcaaacgtgtcagtaatcgctgcctggtgggggacggtgctatctccttgtggaggaaaacacctccatcgtgtaacactgcggtaccttcatacgactcattgatatggtcgtccaatcatcgggtatgttagtttcgttgtcccacagtgttgtatattctccttccactacaagcgcaaggtattcctcgttttccacttccatctgatccactaccgccttattctcctccgctgcatcaacacgcataggcgaatccggttcttcatcgtctgagtcgttggcctcacgattagtaccacgaacaatgacctctccttgtgtattaccctctactacttcttcccctcgaccttgctcagtccgccaaacattttcagcttgtccaccttccaacggagtttcttccaccacggcatgacttgactcccccgatcgatcaacacatgttgtcttctgcaccactattgccagactatagcctttctcccttactttactaacaaacttcctccaactcccagttgacgcaacctccactactctccactgccatccatgttgacccctcactagccacacggcatttatgacaaatttatcgtgcactggatctaccccaaacatattatacaaccaccctaacacgtcgttcaaacccatatgctccggtgcattcagactagtatcatggaaggcatatacagtcaaatccaccccgctatcacatatttgtataggagcatcgccataatacagacgaatgggcatatcacctgacatcctgataaaacatgacaaatagtctcacgtttaatcatttaatcattcgataattaacctattacaacttatactacattgccgtgtactaatttacaactattagtaacaaacaactagtttaataatccaaataaaatataacacctttgtacctattttaacacacaacatatcaataatatgtactaactaagaactaatttaaccgtacaattacttaaatacctctaccaacatttagcaataacaaatatgtgctaatcatacatactaacatcgaacaatgcgaaacaattaacaactcttaaaccaattttttattaaactttcatatgcattgtacttagggattactaatgtataccttaacttcactgctggagggcgtcgccaaccctttcctcccggccggcgcttttgggcctcctctcgggcctgctatcccctcccctggctccctcgggggctcacggcgacgatgtggcgactctcggcggtggctggcgatgtggtcctcaaacaaatggaactcgcggcctgggtggacggggctttaaaccggcctgtcgaacgcccattgttcgacagggtcggtggagggacctgtcgaacgcccccggttcgacaggcctcgcggcgccgggttgtgggccctgtcgaactccctccgttcgacaggtgagcgtgtcgaacgccagccgttcgacagggctttgtcgactgcccgtcgttcgataggtgccctatcgaattgcacccgttcgacagggacctactttcgcgattttccccggttagccactacttttgcgattttccataaaaataatattaattctcaaaacaaattctttgagagtctatgtgcactccccccccccccctccccacataatatagcttcgccac

SEQ ID NO: 76 - DNA, 2421 bp, Oryza sativa
ttcatacctagaattttcttagcagcaccaagatccttcatatcgaactcactacttaactgtttcttcaatatagtgatttgttccttgctcttagcagcaatcaacatatcatcaacatataacagcaagtatataggtgatccattaacaaatttaatatacacacagctatcaaattcagacctcttaaagccatgtgacaacataaatgaatcaaaccttttataccattgacgaggagactgtttcagtttgtcaccatccggcgatgggcctccgctccactacggcagaagctggcctttattaagtgcaaatgaatttggatcacaactcaacaagtgtgagactgagagagggccagggaggcaagcatccttaatcgaaatcgcagcttacttagaccacccctatttggatccagggacttatttttggtccctatcatatcggatgtttgggacactaattagaagtattaaacataggctaatgataaaacctattccataaccctggactaatttgcgagacgaatctattgagcctaattaatccatgattagcctatgtgatgctatagtaaacatgtgctaattattgattaattaggcttaaaaaaatgtcccgcgaattagctcttatttatgcaattagttttgtaagtaatctattttcaaacatctgatgtgacatagtccctggatccaaacaccaccttagcacgtgcggtcaaaaatcgtctgctgattcagtatgttgactagggttaaatggccacatcagatgaaaccacctactatactactcaagtagtcgttttacacgggtttcaccacttttgaaatacctggttttactcgggtcatagttgagggagtcaaagtgtactttttcctacaaatgatagacacgataaatttgactcattgtcgattttatagagcttcttttttgtttatttggataaatttgacccatgttcgattttatagagctttttttttcgtttgtttgtttgagtgggcattggaccaaagttcaggttttcatactacataagatagattaagaacgactactgcttatgtataaaatttaattagttcaggtatcatctgaggatggatggggcctgggggagaactcaggcgggtgtgaatcctgtgtgcagtaatacaacaagcaataaaaatttacacctactggcaggctcgcacgacaaggaataaaattttactagctagtactatgctgttacctcgtttaagagcaattagatttctatgtcactgtgatctagtaataacacgttgttactgttagggatcacacatatttcagaatactccgtatgaaaacgacaacttcacaaacaactcctttcttatcagtcagacagttgaaaaggtagttcaggtaatcacgagttctaatattatactccctccatccctaaatgtttgacgtcgttgactttttcaatatgtttgaccgttcgtcttattcaaaaacttttgtgaaatatgtaaaactatgtgtatacataaaagtatatttaacaatgaaccaaatgataggaaaataattaataattattttttgaataagacaaatggtcaaacatgtttaaaaaagtcaacggtgtcaaatatttaggaacggaaggagtaatatatatccaaaaaataatttcttagtgagtctctttattaatttctatccagaactattttatagttacacaaatattctccggacaatttttctattttctattcttgctaccttttgttaaggtacttgttccagctaattcttcacatatctatcgagcttaattaaatttacatgacagatccagcttgcatgattatcgtgtaatctaaagaattctactctcgccaatgacaaggactcaaggcaatgtactgctatatgcatcggatatgatgactaggtccatctcaattctttacagtgttggaacctggactattacaaactgtaaactcgtggaatccaatgttgggtagcacatctcagctgtaaaaaaggacacagctacagaaagcaactacacgtggactgtatatcaaactctattcacatgcatggctcatgtttcaccattaattgtaaagctgaagtttaagacagtgggcattttatcaaacatgaattttgatggcattctcgaagttcaaattaagaaacacttccatatgtgtcctttctatcataaacattacaactagcatatatactgaaatagagcaccggaatggaaacatgatagttcacagttgggttaataggaattgtgtgacttgcctcgcagtaaaaaagagcagccagtagcggagtagccgttgctacaatagaagctttcaacctgcaaaacagtagcaagagaaa

SEQ ID NO: 77 - DNA, 1906 bp, Oryza sativa
atcttcttacccctcgacaagataaagatcaccatcaccgtacggacttatgtgctctacgcgtacatcaccattgctcttttaggccttgtgggggcctatgtggctggcagctgcagaaagcctgacactaccatctatgtactcagtctggttggtgctgttcttttatgcataggcgccctccaggcagtcctattttttctgccacaactttcaaacatatcctgcttgccaataattgcaaagttatcatgttcaccgggagggccatcagatagcaggtactgaacacaaacatttttctgctgcctatcctgttgccatctttagtttaatgttaactttgtttgaattaacagttccagaaagaatacaagcagtaagacagatattctggagaaggcccaatctcttgttgtactgcttgccactcttgtggcaactgttacttaccaagcagggctagtcccaccaggtggtgtctggcagaaaaaccaagatgggcacatggctggcgaaccaatactcttatccacacaagccaaacgttacaaggtgttcttttactgtaactcgacagcctttgcagcatcattggttgtcatagttttggtccggtataaacctttgctcaggcgccgcattctagagataactatgattttggatctgtttggtctcatgggtgcatatgctgctggaagctgccgggacataaccacatcagtttacatcattgccttggcaggcggtgttctagtctatgtggtgattcatgttgtgttcttcacgcttgaagacaatgacaaggagaaggaagttgggaacacgaattctgtacgaaatggttcagttgtgcgcacccaaaataattcagctgagggcaatcttgctgagaaagattcatgtattgacaaaaggcgcaagaggctgctccttttcgctgttttgggcgcgaccctcacttatcaagctgggttgaccccaccgggtgggttcagagttgtggatgatggttttgggcgccatgctggtgatccaatactcttttacaactttccacgccgttacaaggcatttctctattgtaactcggtaagcttcatgtcatctctttccctcatcatactcctcgtgaacccaaatctgtataggccagctatacaaagctatgctctttcggtttgcactgtagcaggcttgtttgctcttctgggagcctatgctgccggaagcactcaacatctgaaaacatccatttatgtctttgtgttggtagctgtggtgcttttcattatgatcatactcctggtgtgtttctatcaaagtgagagcaaagagaagcgagatgacatatccaaggagcccgttgagaaagacaaggacagagccaaataccatgccaagcgcaagtacttgatgttgctaggggtcctggctgcaagtgttacttactcccaggctggtctgaacccacctggcggtgtgtggcagggtaatagtgacgggcatggtgtgggtcactcggttatgcatgacaataagaggtatcgctacctcaccttcttctacagcaactcaacttcttttgtggcatctattgttgttatcatcctattgctaccgacggaactgctaaagaagaacaggtggctaagggtgatgaatattacaattgtgctggacttgctcggcctactgctagcctacgtggctgggtcgagcatgagatgggaaccttctggatatgtcattgcatttgttattggtgcactaggctgtgctgcaatccacaagtttttgtcatttgtcagaaggtctcagcaacaggggcaaggaaatgatcagccttctcggttaccagaaggcggcagtcaagcttagatgttgttggcatggtaac

SEQ ID NO: 78 - DNA, 5843 bp, Oryza sativa
actcttgttcgccctgatgactcctccctcgtaggctcaacgagccaggcaagccgccgcttctctcgataccaccgaaccagatctcctactttctcttatctggtggatcgtttatcttaaccctatatctcttctccacagagaattgtcagtcagttttgcatctcactcttccttctttactaagctctataaagacatgttactaaacatattttacatgtactctgtcgaagattcaaggtcgttaaatttaaaagttttttttgattttggctaaacgtttaaggctacgagtataaactttctaaatctgagcagaaagttttgggtttttagttttagttgaaatatttagatttcaattaagttttccagtttaattgaagttgaaagttttcatgttattttggctaaacatttgaggctatacccggaaactttccaaaatcagagtagaaagttttgagtttttagttttagttgaaagctttagatttcaattaaaagtttttatgttttagttgaaattttcaaattttgaattaaattgaaaagtgaagatttctctattgaaatatttgcaatttagatcttactttagttacatatattattatctatagaataatactcaaatgacaattagatcttactttagttgtatccagtgcttccttcatcagtgaggcctttgttctcttcagcctcccaattaaaacatcggcaaatatctctccttacactgtagcctttatgtgtacccagttccatgaagggttagcaaatataaacttgcaatactcctcagtaattctccttgaggtcactctcttaggatcaattttgataaagtttatcacatttcttaggcttcagttgtgtttagttccgcgccaaaattggaagtttgactaaaattgagggcctctttgaatcgcagggttgaaaaaaatggaggaataggaaaagcacaggattccgatgggaattgaagtgtaaaatagaggattgcaaaacacaggaaaaacacaggaatggtcgtttgattggagcgcaggaaaaacacaggaatcgggtgagagagataaactcgaagaaaattttccaagaggttggagctcttgctatattttctccaaaatacacatgcaatgtgccattccataggaatttcatagtatttggaaagcttcaatcctttgaatcaaatggccaaataggaaaattttctatatgatttgaatcatatgaaattcctatataaatcctttgattcaaagaggccctcaaagtttaaagaaaaaagttggaagtttatgtatatagaaaagttttgatgtgatgaaaaagttagaagtttaaagaaaaagttaggaactagaccgggccttcgtttgtagtatgtaagtactagttggcaactcatttttgcggttaggaactttggtactgtggatgcactattgcgcactgttcatggcagacagacggggaaggcatcgacgacgctgtttgcccgccgacaaaatccgtcaagatgcaggcgatgacccggcttggcgcaaggctttgctacacgcacatgcgtatcgtcgcttgattgaaaaggaaataattttgtgaagggcaattatatcagacgataagcggaaggcttgtaatgcaaacttgcaaagagaaaaaagaattaatgaaatgaaacatttatttatatggtttaaatttcgtaattatgcgatgtaacatcttaaaccatgtcattagtctgttgtatttgttaagaatttattcttgataagatgttatgagttcttgcaatatattgagaagaaaatgattatttttgttgccgaaaatattactagacagacaattatgaagaaatgatttatcacacaattgacacaaaaatgagtgcatcaaaattattgtgaaactgatgacataaatttgtactctttttcggtgctactatgaaaatcaccacacaaatttaagccttattgtaatattgcaaataatatgaaaaaaattaacacagaataatacaaatcccaatttataagatagctcacttctgaaatgcgaaatccatgcataataattaaagacaacacaaattgaatttcacaattcaaatctcactactgactagaccgtacataaatcactactagttgaaaccatacaaactcttcgggactaataaaaacagacgtaacatgcattagggataacatgtgggtcacttagcacctactgatagcgatagtaggcctcatcggcaatgcagtcacacaaggtgctcatagcctgcttgctatttgttgcatagtacatttgatcgaacgattcgttctgcagcggcacgggatagccgttgtacatagcattattttgacaggagttcacatccttactatccaacctgaaattgtgcagagcaaaagcagcacgtatgaaatgtgtgtggcaacaccctcctctggtaatacggtatttctttcattatttttcacattttttttgacgataccaaatgttctttcaacgatacctcgcaacgacgagtgtcaatggttaaatgtctcttctcatccttcgggtggcgacgctctatcatcaccaagttgatccatgtggtatcatacatgtgagtacggtgcaggaaatcccatcctactaggaaatctagagtccacaagtagataccttcctgtttaacgtgagagaatattttttttgctttacaagtcaagcttgaaatgtagtaacatatgccattcaaatattttagggaaaaaattgaactcaccaaacggtagccgtgggaaatcgtcggggtaatactgcactgcctcgttcagaatcctttggtcgtgaaccgatcctggtcatctagcaacgcagaaaataattctcccgtcatgatcacatatgactagaacatttttcatcgttatgtggtgctgattcttgtgttgcataaacctggctgaagaagtcacaactgaaacatgcatgccgtcaataacacccactgactggtaaaatggtttgaaccaacgttcgttaagaatcaaagggtgatattcactgaagttgggatccattggtttcaaaattttcctagccaggtcgttcatagacaccaaaacttggtggaagtaaatagacattgttgagttggagcggatccaccgattgtttgcatctctgcagggacgatttccagccatagtgtacaagaaaatcccaagtttttctagtgaacataccctggatgttccttcgaggccgtacgacgtgatcgggaggtcatgtaaactgtgtatccgttctgcaattagccggaaaattgcccaacattagcttcgatttgccatcgtttccaccatccaactgatttcggtttgaaccggtattctcttggtgctctctcgtttatctcaatgctagcggctagtatgtcactgatggtatcgtcctcgttgctgctaatgtgccctcctgtccagctcgatccaccagcgacggaactcatgcacggatatgtagaaaaaaatacttgcaatttgcacaaatggagtaataaaaccgcaattgttggacagcacctcgtagcaaatgttagcacgcataaattgataaacataatgacatgtttatttttaaaacaacacactgcacaattgacagtgaattggaagtacaaggtacaaactaatgcgtgccaccagatgaggaatctgctccgtttccacgagtagagatatattctaggcgagttgcggcgtcctggaggcaaacgaaacagtggcagtggaattcatcacggaaaagacgacaagtatcataccacactagccctccagtacggtgcccaacattttccaccaactccaagcaagcctcaagccctttagccttagcggcatctgcctcccttgtgcggctctgcatggactgctctcgcagggctgcaagcctccctatctgcagtcggtggtgctgatggagatggcatcggtggtctataagcggcactgtactgctccttgcggtgcggcgctggggcagcccccgtgacggccgagtggttgccgacaacggtgcgcccactgaacaccgcttggtgaaggtcaatgtgcttaagaggatcatttttgaaggcgctcgcacctttcttgacctgtcacagttatagacatgcacaagttacataacagatgatatgcactgatgcaagcaaagacacagacacaaggatgcaagaaagctgaatcaacgtatttcctaatttgtgtgtacactgttattcttaattagtaataaatacttcttttggctcatgtaatatagattatcagtgcaagtactcacgctgtgacatagcccaactgctgctgcaactactaccacacaatataaatgacaccatatggctagcatcacccttcctagatcttttcaatttcattcataaatatgaaacaacacaatattcagagtttcagacaacacaatattcagatctcttcaacaagattttcagataagagtttcagacaacacaatattcagagtttcagacacacatccatacctctactccccttgacagacacgacaacaatggctagtaccaagctaaggaaggaggaagaggagatcaggctctgctcccatgcatccacaggtttctgcggtctagggctatggtcgttaggaagtgttgttaggaaacgataggcaaacaaacaataaagaactatagatcaatcacagaagacacgagattttaacgtggaaaaccctcttaaagtaggagagaaaaaaccacaggcgccagccagcaaaaatatcttcactatttctggggtgaggttacaacgccgcacgacggcttacaagaggtatatatacgggcctccgctccactacggcagaagctggcctttattaagtgcaaatgaatttggatcacaactcaacaaactccaccttgagacaaatttcttcttgtagcatgaaacaatccttcaccctgaacacaacaaagacaaaaaaacactttcggcgccaaatagcctcttgggataaaccactataccaattaagcttgagcaaagctcaaacttagcaacaggaacaggctttgtcatcatatcagcaggattatcatgagtacttatcttgcatacctttagcttaccttacacgactacatcgcgaacataatggtacttgatatcaatgtgctttgtcctctcatgaaacatctgatctttagtgaggcatatagcactttgactgtcacaaaacaagttaatgcaagaatcaactccacaaagctcagcaaacaatcctttcagccaaactgattctttacatgcttcaacaatagccatgtattctgctttagtggtagactgggcaacaacagactgcaatgttgccttccaactcacagcacaactaccaatagtaaacacataacctgtgagtgaccttctcttatccaaatctgcagcaaaatctgaatccacatatccaacaagccccttatcagtcctcccaaacttcaagcaagcatcagctgtgcctctgaggtacttgaaaatccactgaacagctttccagtgttctttaccaggattagccatgtatctactaaccaaactcatagcatgagataaatctggacgggagcaaaccatggcatacatcaaagaaccaacagcactagaatatggaactctagacaggtattctacatcctcatcagtactagcacattgtaaagctgataatttaaaatgaggggctgcaggaat

SEQ ID NO: 79 - DNA, 2148 bp, Oryza sativa
tgttctggtcgtcttaggcatagcggtaggcgtggggccagagccccttgaagaacatggagtagctcgtaagcgggcagacgtgctcgaacttaaccacctgggacacggagctcggggaggcacctcgccgtgatgtccacggcgcagctcgactcgcgccccgtgctgaacccggcgtcgccgccgttggtcagctggaagctcaccagcatgttgaacccatcgatgagcgacaggtcggggtcgggagccgagcgtgtactctgtcagcgtggcgggcggctcgccggagacggagcaggacagcgcgccggcgcagttgcccatgatgcagcggacgtggccgccgcctgagctcggacagcccgtgcgcggctcgcttgctccgctgcccaccggcccgtccgctccccgcctccccgggaagaagagagagagaggagagggaagatgagaggagtgagggtgaggaagaagagagaagggagaggaaagaaggaaggagtgagaccgacatgtggacccatgtgagccccattatttttaaattatttttttgtgtaactgaaatgtgggtccacggtttttattattctttcgggatataattgccacgtaagcgccacgtcaatgccacgtgggatgaagatctaatcaaaccagccacgtaagcgtcacgtcaaccaaagtcaactaaaactgccttccaaaccgctgaaggacctcgtttgtactggttttgacagtttagggaccggttgtatctggttttggggtaggatgaaaatcggatttagtgtaaagttaagggacctcagatgaacttagtcccgaaccaaattgagaattttttttatttttaattttttttattaaaagttttacaaaaataattttccattttgaaaattgacggaagtagtcgcctaccgccctctgggagggcgatttttaaaaatcgccatcccagagggcggcgaaaatgacgtggcagacggccgttcgctctcgggcgacggccgtcaacgaaatttgcaggcggcctccttgccgccctccgctagggcgattttgtactgtgcggggggccgcctgcaaatgggcggcgagggggcatggaattttgcaggcggcccccttgccgccctgggggagggcgatttttgcctccccctataaagcccagtccaccctctctgaaatttcattatattcactaaaaatccaaaaaaaacgaaagagagagaggagagggcagcagaaggggagcggcgaagccctgctggttcgctcacttcatcacaggtttgctccaatacatcttttgcatttgtactaatatgttatgtttgattatatatgttgcgttttagttttagttccatatattttagcatatctgtagcacacagcacatatgtgtagatccagagcatagaatataattgtatgaattgagacatagacagtagtgttaattgtaagatgtagtttagtttgatctggagaatgtaacctacttttagaattttggagaacaatatttgtcacgcccagaaattctcaaaccagaatttctaagctgaatgtgcattaaatccctgtccaggaccagccagggtacacaaacgacaattgttgacatacagatccacgtcttacaaaaatagaaaagattacaaatgcagcggaaaagaaataaaagcgagctaaaccgggaagcttgacttcagcagcgggcgactccactccacaggcaatccttgacggcagcgacgaaaccaactttgacaaaacagctccaactaggaagatcttcagctctggtgtgggggaaaagagagcaagactgagtactacccactgtactcagcaagtcataccggaagaggaggtatgatgcaggatataaccaaaggaagctagaggttcttttgcataaagctagcatttaaaagcagtagttgaaagcagtaagacagttgtagtaattaatcaatattaaccaaacactgtccaacgctacaccacgttgcaacaggcccagccaaccacctgaactacaccagttcattaagctaaactagggatgagactaatcacggtgaatctggttgatcgcccataaccgcgggcacggctatt

SEQ ID NO: 80 - DNA, 2072 bp, Oryza sativa
acatttagaaattttatttcccacatttaactttacttgtaaattaatgaatatttaatataaattgtagaaataatttattaaataatttataaatcctgaaacgaaaatcagggtgtgtgttgatgcgaaaaacacacaccggcctgagatatgcttaactctagtgcaggtccaaatcttggtttcgagttcgagggtatgccagttggtttgatcctgcaacgaacaagaaataaagaaacacatttaaatccataaacgatagccgatcgggcagtcaccgatgacatatcaattgtaacttagccgatgtaacgtgaattagatcagcaatgaaatataaggtaaaaggaaggttagacctagtcgatcggctatagatatcaacagtatataatatatacctcaagatatatttaaacaagtgattgggatagatcggacagcttgccgagatagtataaatcacttatgtttaaaagtaacttgaatcagatattatatatgttcatagcatagccggtgttttagatctaacatgtattggctaatactccgataccactttatactaagataacaatataaacaaaatatattaaatagagatcaatcaagtgttaagatgacttaacagatcaataacaagcttaatatatttaattacagtgatatcttaatataaagggcatatttagcatatcaagtaaacataaaataaggtaagatcggctgaaaccccgatactaccctaatcggcaaccaattaacaggctagaaattataattctaaacacgacttaaacacgacttaatagatcaaacttaactgatacaacattaagtataaaaagaagaacaatatctagacaatcaagtcattggatgattcatagagtggtggatatgctatataatctaagtcaacattgagatctagcttaatcggccgccttccagtgatagatgttagccgatttgaggttagatagcaatattgatctagattatatagaatatatgataacttgacgattcacataaacaagatttgtggacatccctagtattataccatccagtgtccaacgcgaccaccacatactattggagaagtgggatctatacacgcataaatagccactcatcctcaatgtgtccattatcacagttgacaccttctactataataaccggaatgccgagtagtgactgcgagagataaccataagatagcttgccagtccactccgtcatatgctcgtcaaaccatatgaaggcggcgaccaaaaacataccccagtaactcgatccaaaagcgctatccccaagtatctcaagcgatcaaaacctgttactcatgcttagctagtccccaggaatgcgactagcctcacactttcatcgcaagccattagtaaacatagcaagtaccataatagggtttaagtgcagcaagatacatgacacataatagggtccgaggtcccaacatacaacacataaatatagcagcgaaagtctcaaatagagttcataagcaaaagataaaaccggtggtgccacaaccccactagggcaaaccaaccgggcaagagccaaactgcaagagatcactcatcgccctcgccgccctcggcagagcaatgaccacacaagaagcataactcataaccggtatcctcacctgaaacagcggcgccgggttaagtacaagattgtactcgcaagtcttacccaaaattaaatatacataagggagagagaagtatgcaagctttctagccaacagtgggtctctaggttcaacatttgcataaagctaattttattgagcaattaatgagtaaaataagtaaggacaagtaaatctagcatcatttttatttatggacagcaagtatataattctgagatgtataagcaaatgagcccaaacggcgctctcattatcaaccatggactaccaaagtccataccaacatggcacaacatggcaacaccaccatcaaatagaatcccatccataataatccatatttggtgctaacataactgactaacacatc

SEQ ID NO: 81 - DNA, 1805 bp, Oryza sativa
gaattttctacacatttgtgaagttagtacaatttcagcacatgttgaaaacagttttccattaagagtcctcgaacttcctgaatattacagagtggtcaaggctacagggttatgtgtcttggtctgttttttgggaaaaaaccctcagtttatctaattcaccgatgaggtccctggctcgagctcacgggaggcagccatggctgggctcagtctagagcttgccgacggcgaacggaggctcggatggggtcgagttcaacagagaaactgtagaggaggaccatgcgaacacgtaggtgtccgcgctgatgaacaagctacagctacagcggtggtctgtagctcgcgaaaaacaagctacagcggcggtggttcttggtatgtgcatgcgtgtcgagctacagctctgaatgggctatatgggtgcatgcatggggtgttcaggggtatgcagtgtctcaccgtgcagctgaaaggggtcggagaggtccaggaagcatcgacggcgttggagatgcccggcaacacaatgaacacgatgaggacccgagaacgactagatctggccataaaaaccccaaataaacgcttgaatgagctagaacattgcatgcagagtctttttggccaaggtaaaggatctggagctcaccggacagggaggaacaaagccaacgtgtctagacggggctgaggaaacaaggcgagcgttctccacgcctggagctcggcttgggctgattcttgacggtgttacatctgggaggaagatgaattagaatgagcagcaccaccctgtatctcggcctggaacgtcgggaacactggaagcttgggtgacgcgacgacaccggccgcgctccggggctccaaaaagagatgtgcgttcccagagattcactgcatgaaaatcgatgaaattttgaggggagttagggcatgcataggagagcagggaacgagggttggacggcgaagaagacgaccagaaacacggcggcgacgacgaagttctctcggccagcaaggaggaagaaggaagatgggggcgaaatgaggtgctctcaccttgcgtttatttctctggaagggagtgggaggagtggagaaagtggccagaagcttagaggagaagggagagtaaagagagaggtgtcacacttgtctctctcccttgcatggccaaaacgtggcatggctattcttctgcttgtcccctgagtatgagagggttgggccactgccatgtgggccagggactgctggtgggatccacatgtcaaagagagaggggttggagaggaagagacaagaagaaaagacaaaactaagatttattccctcttctcactcatgacctgctaattcgaattgcttaggaggggattcaaattttggcctctggtccagagatgggtcttggaacatgctttctaatccaattggtttcactaaaaaatgttgagttaaataattctagtgaaaaagtgaattcagttaatctgaaagttagtttgaatttttaggaggtctaaaaagagaggaaaaattccacaaaatttatatttgttggtgataaataaactagtatttgaataaattattaaacatgtacacttctgttcaagttattgttcaaatagaagtggtttcaattttaccgattagagttaattttgttatcgcatatgatcaaattgcaatatagtaaatatgcaatctaaaagacaacaaatgcacttctaaatacctggttatgagctagggctattacaagattagagtatcatgaagataga

SEQ ID NO: 82 - DNA, 2121 bp, Oryza sativa
tgcatctaaacgaactaagttactgaaataaaaactacagggaacaaaactagtggtagcagcattcgcagctgctgaaggccatctcatccctacagaagaaaatcaggcgatcaataattcaaaatcggttagttgatcaattcgtttgtatataatcatcacttgaacctagccctcatagttttaatgaagcaaataagtaatttaataattaattcacttgccttgcagttagaatataacattccagaaaggaaaatttcattgagttttgcccccaccaccagagcacgctcctgcattacttcctgtgtattaagaagcaaatgttgaataaattgtaaattattattagatcatcatagtacccatattcaattagacatccagaaatataaaatcaagtaatttgaatacctaatagttgcatattaacatcatcgtcctcaaccgtatcagttagaattgaatagggatcaccaaaacctaaaacatcagaattccaaagttcaacataaataagtttatggcccataatataagtagcaatgaacaaggtaggctccataccatctgctcgcatctaatcttgaaggcaaaccaatgcctccacagttccattagccagcctactcctatagtcactaatgattctagatccagtagaaaatgcagaatctgatgcaactgaagatgcagggacagcaagcaaatcaagcgccatgcgtgataatattggatatttgcatgagtttaccctccaccactggagtatgtcaaaatcatcatcagggaaatcattttcttgaggaatatcttcgagatagctagttaactcagtctttctttactcttgctttgatcatgaagatattgcctccagtcagcaaattggctgccaccaacattcactccactagttgatgcttcttgagaattgattgcgcttggaccaccaatttgtgaagaatattcaacaaaccaactgcggactatcctcttaattctagacagatatccatttggaccagttgccttatctccaaaacctgctttcagcctaaactcaaggaatttcaacttaaatctgggataaaaaataacaggaacacaaatctgcaggaactgcagatcccaatatttctgaaattttgtatccattttagaaaccatgctagcgacaagaacatcctcactgttggactcatttagaagcatcaccttcactttccaaaattcatgaaagtagcgagaaacagtgggatatgatgtcccggaaaccacaacagttgcatcatagaagatcttgagatgtttgcaaagaacttctgcattgtcccaatcaaaaaatagtggagcatcttgaaagtttggatcaaaccgatccaatgaatcaaaagccctcctgaataataaggatgaggaaagcatcaaataggtggaattccaacgagtggacacatcaagtgaaggacgcttctcttcaacaattccgacttgtgcaatgatttcttcaaatttttgctcacatgcttctgatgcttttatatactttacactttcccttatcctagatatggcaccactgatagtactcaatccatcttgaacaataagattaaggatgtgagctgcgcaccggaaatgaaatagctcccctttgcaaggcatggcaagcttacccaagagatttcctttcaattccacaaccatagaatcattaacagatgcattgtctactgtaatactgaacaacttactttctatctgccaatcctgaatacactttagaatttcattgaagagagctatactatcatgtgggtacgcacttgagtgaatcttatgatcctcttttgaatattccattcattgtcaatgaagtgacaagttatacacatgtaacctaggttttgattagatgaccacatgtcagccgccagtgaaacccgagaatttgttttcctcagtacctcaaacaaagctaacttttgttcttgataggcagccaagcaatcaccctttatagtaattctggaaagcaccctaaagtacgggttcaagcttgcacaaaatcttctaaaaccagggtgttcaacaaaactgaaaggaagttct

SEQ ID NO: 83 - DNA, 1412 bp, Oryza sativa
aatttctgctgaaactgagatgaaaattttcttatgaaactgaaccctaattttctgttgaaactgaactaaaaatctctacagaaactgaactaaacttctactagtaaagattcctgatgaaagtgaactaaaaacttctgctgaaactgaattatcttagctacatgaataaacaggggctaaatgaccaaatctccaaattcagaattagaattgcaggtgcacaaacctactaaaactaaccacagaatgtaagtttaatttgtttgggtggaagataaactacagaattatatatgcaatacatcaagagtaaagaactaaccagaacgatgagtcacaacatgaggtgttgattgagttgactcccttggctgagtttcaacatccagctcaattgggatagcagacggacttgatacgaaccttgccactggagacatagatctagctcttggagactctgcacttggggacatctgaccagcaacttgtgatctctccatgatgacttcattttgggaaataatttgtcgcactcctggagacctgactattggcaatgcaataggtgatcgtcttcgctttgctgttggaggattcgatgctgctaactttcgttttgtagccaataactgtgttgacgatgataggcctcccgaagagccctctgcaatgacctctttgatatgtcctccttgcggaacttcagctaatgatgtcgacatgggagaaaaccaaagtactgcatgtagaacaagatggacaaaattttaaataataaattaccaaaatacttgcataatatatgaacctcagcccatccactcggaaatcaaaaacttcatgacaaactagaatgtgccaaactgaagaccgattataaactaaaagatatgccaaactgtgcgctagtactccctccgtcccaaattataaggccaatatttttttacacggtcttcaatgacatactttgaccattaatttattttatgttatgttcccaacaaatatgaaattagcttcacataaaagtactttaaaagatgaatcttgtaatataacatgcataatacttaacatatatatggttagtacgattattagtcaaaagttaccgagtttgattttccttaaaaagatggcgccctataatttgggacggagggagtaatatttaggacttcacaaaactgaaccgtgcaagcatatatgactacaaaactgaattcattcttcacagactaatgcaatgagtaagaaccaaaaattaacataaccaatagtctcaactcctcaagataaaatcatgtaacatttgcagccaaaacactaatcaaaacacaagaaaaggcaaagactgatacgctctgttaagctagcagcttgaaatgagatacagatac

SEQ ID NO: 84 - DNA, 677 bp, Oryza sativa
attactatgtctgagaagaaccacaatttcagcagtttactttagttcattcaattaggtgaaaatccattccaccataagctactttccataaaaatgaaaaagggacagactttaaagtttctcgtatgagacaataatttgacatactttgtgtcacattttcttacacaggcaaattttaaggcgaaagcaacagtgatcatggcgactttcttctccctcactgctccggtgggcattgcactggggatcgcaatctcatccagctatagcaagcacagctcgaccgcacttgtcgtcgagggagtcttcaactctgctgcagcagggatactgatctacatgtccctggtcgatctcctcgctgcagatttcaacaatccgaagcttcaaacaaacacaaagcttcagctggcagtatacctcgccctcttcctcggcgctgggatgatgtctctgcttgccatatgggcatgagatcttcagagcaaccaagagctgcaaatttttgaatattgtctctgaaaaagacaccctgagcttagtttgtagctgacagggtttgatgttgtcatagcattactgcaaccagcttttgtagaatctccatcaaccagaattggagaaaaagatggcctgaatacgaccgaaagtttagagtttactgacatgag

SEQ ID NO: 85 - DNA, 1707 bp, Oryza sativa
ttgatgcaatattccttctgatgaaagaaagctactaaattcattgtttatatactcccctccattatcagttctaataaactggacccgagcattaaaatgatttttaatgtatgcatagaaatttagaaaacatttaagcacctcatccttatgtctcataagatataaccatgtcatgcgagagtagcaatcaataaagttaacaaaatacttcattccactcatagagaccacaggtgaagtccaaacatctgagtgaattagcataaatggtaacatactccggagtcctctactcacatatgatgttcttgtatgttttccatactcacatgcatcacatactaacttatgtttatccactctacttagttctgctgggaacatcttactcatagtttcaaaagatatgtgccccagtcgacaatgcaaaagtaataccttagcctcttcttcacttgtagaagccatcaatgcaagacatacatcttcacttgtcgcctttcgatccaaataccaaagtccatcacgcctgacgtcaatcccaagtttcttccctgtttccctctcctgaattaaacaattctcacgatcaagggagacccgacaattcatatgatcaacaagagaacttatcgaaaccaaattcactggaaaagaagggacatataacactgatgataaagtgattgaaggagtacactgtactgtaccctctcccttaactgggcatgatgtcccatcagcagtttgaattgtttcttttcgtgtaaatgggtatggtttatatgatgcaaattctccacacatacccgtgacatgtctagatgcacccgagtcaagtatccaatttgaatgagaactattgatagacataaatgtttggtttgagttacctgaagaagaatgaacaagattggcaacatcaacatttgtagatccagaacaacccttttcaagagtgaccacattagctctgtgatcacttttatattcatagcctctacctctattacctctacctgcataacctcttccacctcttgctccacccctatcaccaaatcttcctctcccataactaggcttgcgaggagcgcggcaatcacgtataaggtgccccatttcaccacaattgaagcactccctggtctctttactttgtgcaactacataggtggggcttggtgaagatggtgtggcactaggcaatactttcttcttaagctcctcctgtgccatagctgcaatagcctcatccaaggtagtaagggtggtttgatgaaacattgcatcccttcttccttcaaactccgaatttaagcccttcaagaactcaatgacccttctacgctcaatccattttctcatttttgctatacaatcagggtgctctaacccaagaggatcataatgatccaaatcagaccacaaatgcttcaattcagcaacatattctgcaatagaacgctccccctgtctcaaaacacttatcttctcctgtgcctccaccattaacatcacatttccttctcctgagtagagattagtaagagttttccacatctcacttgcactagagatggtctcaacagttgtagcaatagcagggataagtgaggttaacaaccatgctactactaacgagttggtagtcctccaagtcttccattcaacacttgatatgttctcaggctcctttac

SEQ ID NO: 86 - DNA, 722 bp, Oryza sativa
cagaagatattatgcccatgtcgtaagtgtttgaatcggttacatcaatataaaggacgtgtggaggatgacttacttatgtacgggatgtctaacacatacactcggtggatacatcatggagaaccattggtcattgtcactggaaatgttgagcatttgaatgaagatattggctgcaatgttgagcatttgaatgaagatgttagctgcaatgttgaatttgagacgaatgagcctccggatgacccaaagatgatcaaatgtaccgtatggtacaggatctgtacccagatcaaaatcatggaccaagaacaaagtcaaagtttgccaccatattagaagagatgaaacaggtgctacaccccggtggtccctatactaggttttcttttgtggtgaagttgctccacatcaagtcattttacagaatcagcaatgttgcattcagtgctttttttgaccttttaagttcagcatttccaaattgttctctccctgcatcctatgctgaagcgaagaattttattcgtgcattaggacttggatatgagtcaatacatgtgtgtccgaataactgtgttcttttccgaaaggagttggctaaaaaggatgcatgcccaatatgtggtgcttcaagatggaaggatgcagatagccgaaggaagattccagaaaaggttctaaggcatttcctttgattccaaggttgaaaaggatgt

SEQ ID NO: 87 - DNA, 670 bp, Oryza sativa
ttaaatgggcggcaatgtcgggttgggagaggggaaccggcattggacggtcaagccggcgagctggcgctccggctagcggccaaaacggcgacaggaggggacgccggcgagaggggaaaaggggaaaagagggagagaaaaggggagctcgccccttgcctctttgggaaaaaggaggaggggagcgggagcgtcgcggcagagggaggagggctctgcctccgtcccttggcggcttgcgcgcggggaggcggggccgaggtgatgacgacggccatgacggcggggcggtttggagcggcgcgacgacacgagcgacaggcgctgacgacggcggcgaccaggcggtcggccaccacggcacgcgcgcgcgggaaacaacgggcggcgcggcggatttgagcggcgcggctgatttgagcggcccggcttgggcacgcacgctggcttgcggggccgggcggctgcgcggctgcaggcgcggcagggcagcggggccgggcggcacggacggcgcagacggcgcggctctcgtgcacgcgcgcgcggcgcgcgggcggagcttaaggggaggcgctgggcgcgtttttcacgcacgcgcgcgcggcgcgcggtcggagcggagggggagggagagagaaagacccagcgcgcgggggagggaggg

SEQ ID NO: 88 - DNA, 958 bp, Oryza sativa
tggcaaggcctgagggctccattgcagaggcatatgtcgcaaatgagtgcttgactgcttgctcaaggtattttgctgatgttgacactaggcacaatcgtgagggtaggaacaaagagcgtgttcctatgagtagatgtggtttatctattttccagcatggagcaaatctgttgggggcaccaaggcttacatatgagtagaaggagtatgataggatggtttggtatgtcctcaacaatactaaggaggtcgagccatttatagagtatgtccttgaatagcgcacctgtttttatttgtgtatcatataaaattttagctcttacatgggagttgtgcacctgtttgtaggatttacatgaaggatttacaaactgctggcagtcatgatgttgaggggaaccttgctaaggaatttccaggatggtttaggaaacatgtgagtcattatttaagtattttcagttttgactctgtgataatatatcattatttaagtatttccagtatattgcaaatgaatatatctcatacatatctcatttactgaagtgagaatgcaaatgaaatttacatatgtacatgaataaaatgcagctgtgctatcatgcatcattgcttctactgttgaaaaccttgcttggcagaatgaagcacatgagaggaatagagcatcgtgtgcattttttgtttttttacaacaaatgattttattagcagcatgtttagttttgagattagatgactaaattaagtgcagctgcctcttctgccatgatgacattcctgatagctccctgtatataagtctgataggatgattgttgtgcgtattggtgatggagattcccagtccagcgtccttgttcatctgtggggtgttgtcaggctgtgtggctacatccacatagcattttgttcctgtcaaaagagctggtagggctatggtgctgtg

SEQ ID NO: 89 - DNA, 867 bp, Oryza sativa
ttcctccctctccgcatttctctccccaaaataccccccccccgccttaaaccctccgccgccgccgccgcggggcccggcttgtcgccgccatgcgccgcttcgtcggggccctccgcccgctccgcaccctaaccctcagccccatcccgacggcgctccgcgtcctctccaccgcctcggcctcctcttcctccggctccgccgccgcctcctcatcggactccgactccgccgccgccccggacgccgacttcgacagctcggagttcgcgctgccgccctcggggccgacgccgccgccgccgccgcagcaggcgcgcaacccggtctccgcgctccggaagctccggttcgacccctccctccgcgcgcgcgccgacgaggcgctgttcgggaaggagaggggtggggtggacgatgcggtggaggaggagcggtcgcgggaggttgcgctggccctgctcgaggccgcgctcgagccgcccgacgacgacttgggccctggcgaggtcagggaggaggaccagatgtcgctgtccgtcggcatcgtcggcgcccccaacgccggcaagtcctcgctcacaaacaccatggtacgtgtgttcacgcattgaaagaacaaaaatcttgtgacatggaaatggtttggtttagctcgttgtaacatttcttagaggagcattaggagtttgaagtgcagttgtgtgttttgacactttacagtgatcatagtataatcctatatttctttgtaggtttaacaaacaccatggtacgtattttcatgtcacagcattgaaaattttgtgacatggaaatggttattttgttgtagcattccttagagcaccctatatttgtttg

SEQ ID NO: 90 - DNA, 634 bp, Oryza sativa
aacgagcttttctcacctccctacgtgctatttgggagcaacgcggtgctgtagggcgatatgacaccgttcctcccagggtttcccaagtactacctcaagctcgaagggatctcctatggaattgttcgtcttgacatattcggcagcaatgccgctgccgccgaccaatatcatcagcaggcacaattttgtcgtggaccttaccttccagatgctcagttctatgccatgtcagtcgagtcggcaacatttccgctcatgctgccgagtcgcgcatacgagctgcttgaaaaggaatttgagcaagacaatcctcttcttatcaagtctcgcctccaacccatgaacacttgctacaaaggcagtgtcgacgatattgctgacaatgccactataacgctgcatttccatggtggcattgatttgcagttgtccaggaatgccacctttatggagatcacctccatgaatggcgaccaagaagagcgctatgtgtgccttatcgttcacaagactgtggatgggacagctgtactgggcttatcaccccaacttgaccacaacataaggatttgatctggagaacaagcagatctcaatttatcgcaagatatgttagtttgtcccctta

SEQ ID NO: 91 - DNA, 4394 bp, Oryza sativa
actcgaagtaccaggagggcatcagaaagggggtaatagctagttaatcatatatttaggatgtatgtacactatgtatactagaagtataggaatagattcttttctatattctttccacttagcttagagatttaatataggaatgagtagcttgagcttgtgtgtcattctaccctggaattatctttaccccttcttaggcacgactagtacaagtaacatataaatattagtttagttctctctattataatcttcccacgggataacaaatacgatacccttggaaaactctcaggtgaaatgctacaatggtatatccgtgcgcttgcggataatctctgtaaccataatataccttgactatttctggcgccactgctgggaattatatttctagtaatgtcgttaggaaataccaacaagcatttctggcgccgttgctggggaagatttataagaagagattcctaaaactaatatcttatatttacctctgtatagtcaatatcctttgcaggttaaccttgttgttttcaccctttgttgtgaaaatagggtagtgtataattgtttttgacctgccggaaaacttccaggaaaatccataagtcttcttctgaagcataaaactgcgggttgttcccccgcagaagactcttccgacaaagaagccaaacgtactagcgccaccaactttcaagaccatggctgacaagactcttcgcgagttcgctgctccctcctctaagaatgtggccactgggccgcagctcaatttgggagacatggactttgatctgaagtccagcctcattacgatggcgcaggctagcccattctgtcgcaagccgaacgaggatgctaatgcacacctgcaacaatttctggagatttgcagcacgtacactgtgaagggcgtcagtcctgatatcgtcaggctgaggctgttcccattttccctcctcgggaaagcgaagaagtgattctatgccaatcgtgctgtgataaactcttgggaaaaatgttcgacagcattcttgtcaaagttcttcccgatgggcaagattaatgcccttcgtgggtgaatttcgggcttctagcagatgcgggatgagtccattccggaagcatgggaacgtttgcaggaatacgtggccgtctgtcctcatcatggaatgtacgactggctgatcctgcaaaagttttacaatggactcactcccacgtcccgcaaccacctggatgcggcagctggaggagctttcttctctaagatggtcagaggagccatcgacctcatagagaagatagtctctaacatgggttggagcgaggaacggctccaatcccgtcagcgaggaatgcacactgccaaggagacggaaatactcgctgcaaaactcgacctcctaatgaaacgacttgacgaacacgacaagaagccccaatgcaccgtcaaggccttggactcgcacatcacgtgctaagtctgtggcaacacgggacattctgggaatgactgcccagagacccatgaagaggcgatgtacatgggtaacaacaacaacaacgggtaccacccgcaaggaggtcaggggtggaaccagccccgtccgtatttccaagaaggcaataaccaagctaactactgacgcacttaataaaaagatggttgctaatgacaagatcttagaaaatataaatgtgaaactagatggctttgcttccgcattccaaaaccagctaagtttcaatgaaatgattgaaacccagttggcacaattagctgctctagttcctacaaatgaatctgggaggattccggggcaacccgaaccctccatagaaaatgttaaggcgatcacgacgaggggaggtaagtccacttgcgatccgccataccctaacaatgcaggtactagcagcaacagcagggaaacaccgtctgacgcagcggctgaagaagaaattcagccagaaaagaccgtgccgcagcattactgcgacacgaggttgctgccattcccccagaggatgaggaagccgtcagtggacgagcagttcgctcgtttcattgaggtgatctagaagattcacatcaacgtccgttgttggacgctatgcaagtgccaacatatgcacgttatctcaaagacatcctcaacaacaagtgaccactaccgacgaccgaggtggtcaagctgacagaggaatgcagcaacgcgatcctccacaaactcccggagaagaagaaagattcggggtgtcccacaatcacttgctcaatctagacacaaaaattcgaccaggcactctgcgaccttggggcaagtgtaagcgtcatgcccaaggacgtcttcgacaaactcaactttacggtgttggcaccaacaccgatgcgccttcagctggctgactcgtcggtccgctacctagccgggatagcagaagacgtgccggtaaagatacgggattgctttatcccggtcgatttcgtggtgctggacatggacaccggtaaggagactccgctcatcctgggcgtccattcctgagtaccgcagaggcaaacattgatgtcggaacaagaagcatccgtttccacatcaatggaaaggaggagaagttcgagttccagccgaggacgaaacaatgctccatggtccggttaaagtacgggccagccccgtagaatattcagacggtcgaagtggagccacccaaaatggacagcctcatcgctttcatgaagaaatctctggagatacaaccttccaggatgaggtcccgttattggaagacaccggcctagaaggaagagaaaccggctcaaaagaagccgccgcccataccaaggacaaataaggtatggtggctgaaacagaagacgcccgctccatcacctccggagacgggtgaaaaatccatgaaatgaacgccggaggtacggtcttgcacgtcggacttgaaatgacgccgccctcgccaataggtaaattggtatgtatcctcatatttattttcaccaatttgatttctgcatcatcaaagcatgtttgaatttctcaaaatttgcatttaggtttgaattttgaggcaaatattcaaaatgaatttttcagagcaaaattttcaatcaaaatttagtttgccacgaccacactggccgttggaacccaacggttaaaagtggggccggttgggcccactaggggttcggccgaacggccaggcaacggtcggccgccacttttggcagaccaacggctagtgggacccacatgacagtttcgaccgttgttggtgccctatataagccaaccggtcgagagagaggaatccaccccatttcaactcattttcatttcctctccaactttgctctcaaaatccatttcaagttttgcaagcttgtctcaaaatcaaacactttagttgcatacacaagttgtttcgttgaagctaaccggtgggtagaacttcttgctatcctaacccccgccgagttagtccattcttatttgtgcagaacgaggcgatggttgtcccgtctgttcaagaagggatctggctcttcatcgggaacgaccaccgacatatcgatggaagacaccgacataccgacaagcctcttgaccgacaccaacctcaaccttatcggtgatcaggaattacaagcctaccatatgctgaaggaccggaagttcagccacactcgggcgtacgatccggaacttctgaggaaaacaggtatggatagtgattttcatgccatttggaatgctgtaatttggcagagatttgcagtagtagatgaaccaggttctcatttgcttaatatacaatttctgtgcactttgaaagaatcagaagatggcatatcctttcttttttccgtaaagagtatacgctttcatggaaaggattaagtacacttcttggttttcacgataactgtaaaaccgatcttcagaaaggaattcccgggttcaagaaaaacagattttgggaagacatttctggtgctccaacttgcagacgtcctaggacaaatgacatccataatcctacacttagacttatgcacaaatggattgctatgactttgtgtagacccccatttttataacaggaatcaatcgtgtaaatagtaccatttccctggatcaagtagtctggtacacacgaattcatagctaaaataccaagtgcacatacacgagtgtctaatacgaattattacatcataagcccgcaggcatagtcttaaatcatcggaccgagcggtccggaatacatccaaaagcagaaatagataaggcagcggaattcaggcagcggcatgccattgccacaggcaacaaccgtactaagacctactgagcgcc

SEQ ID NO: 92 - DNA, 3901 bp, Oryza sativa
taaaaataaaatatgagtaatattaatctagtgtaatttccgtataaatttgattccacaattcttaattttgcatatatgcattttactcaatatttgtgttatcttaactaatgaattcaccctagattaatattactcatattttatttttatgtaatttatttgagttttaattagggttaattcttattccatcgtatttaaatttaattgatccaaatatggtcgcgataatattttatttatttctatcccacctaatctttattttgtatttattttaccaatttgtttttaaggtttattcctaattaactattctttactcacgattaataatcttcgatatcaaattcagataaaatacactaataagatcggcatcatgtaattagtttaaaaagtttttgaaaatccgtatttttatagtcttgattctgtcggtcaaattttcacggtgttacactttgtttcctacaggtgatctttgacccattcaaggagatgaattgattatcatgtttgccatggttagaaaaattaaaatcgctcctgttaaatgtatgataaggcaatggttagtgtcgcgaccgagaaaattgcattttcccgaacgctagtgtattaatccccgtcccagcaaaagccggggtacaccatacaaacatgatataaaagacacatctgtattatatcgataatatttacattattacaaaggcacttaagcctgacaatcaaaaataaacagcagcggactatcgggcctactgctccatcttcacaggcgctcaactggggtataagccaggactcacacctaagacttcttctccaaagcttctcttactgaagaggggaaagattgagcaagaatgagtacaaccacagtactcagcaagtcacaccggcagatgcatgattaatgcaagggggtacaaggggataataataggggttaagttttgcagtaaacagcatttaaaagtcacttagttgcccaaagccattttataaagacgatcctagagttacacagtgttattaatcaaggccgtgaacccacacgaacctgccttaacccaaggcctacgatgattcagaccgaactagcaacccgaccctgggtcccagctcgtcccaagccaacccaggccaaccattccatattttagttgttaagcaaattttaggaattaaaacgctaacttgggtacattgctcggcttgcccataaccgagggcgcggctattcgaatagattatactctgatcagaggtgtacaactttacccacaagacacatcttcctcacgtgcaaccacgtgccacataccaccacggtatacaggcggaagacgtgacatagtttccaacccatcctagccatagagaagagtaccgacccaatcccacctacggccggaacctccgggacaggcaggcaggactgagcccccagcagcagggcaccaaccctgtaccatgacatctcgactaccgggccgcagctcgtgtagccttcatttgccctggagaatgtccatcgacccccgacttcatccacctccaatcgttacttttgtttataacttgactgagccacaaactaagccttacccactagacatgtgaaagtacggtagtgctttgcaacagaggcccgaagaccggtccttatatggccgaggtgctactatcaaaaccatgcaccccgagcccagcctaaaaccattttggggattttgaatagagggggcggtgtgaatccaattccacaataaaccaacaattccaaagtgtccaagtgatatgagaattccccaagtctaaagttataaaaccacctaatattgtctaattaaacagcgaagcatctacctaaaatcatactagtggtaccatgagtagagtatccactagttggggttttgtttaatctagggtggacaaggtaataataacaataacaacaataatacggtcataacaaaggtaaataggcatggcttagtaaacccgtgataacgcgggaatttaaataaagcgataatgcaataatttaaatcaaaataattttataaactgggattcaatatgttcaaggatgatgtgacttgccttgctcactttcccaaacgccggcttcaacttccacgaagagcggatcttccgaagctgcagcgtctacacgaccaacggaaaagaaaaggcttttacgctaataaattccacataacagcagaaacaaagcacaaaaatgggttcttgacttcttaaggaaaaattagagacttgaacggtccaattacgagttcaaatggccaagttatggccatttgaagttatatgttctttaaatggatatttgcgaatttcttcatttaaattttaatttaaaatcgaattattgcgtcagccgggagagagggcgcgcggaccgggtccacgggagtgggacccacgcggcagcctctcggtccacggtggaccgggtgcacgcggctggcgccgtgggtcccacgcgtcagccgcacccgcgggcgcgagcggctgacggccgggccccacctggcagccgcggggcgcgcccgaaggcggcctcgccggcacggccgacgggaggcggcgcgcccgcgccccgatggtcactgccggcgaccaccggcgcggcggagcggcgcccgagagagaggagagaagagggaagcgaagcggcggtcttcggctcaccccgggtcgacggcggcgacggaaacggcgaccgaagcggaggaaggcggcggcgcggttcgggtcgacgaggacggcggtgctccgcggtcggcgggcgaaacggaggagcggacgaggtcgacaggacgcggcgaagccaaaggaggtgacgccgagacgagaggaggtccggggcgacgacagcggcgaaccggagctcggcggcgacggcggagagagaggacgacggcgcgggctcgattccgaaggggagagtgagcggcgagccgcggaaacggaggagggaggcacggggaacgattaaatagcgtcgggagggggagagagcggccgggcgagggggaaacggccgcgaaagatgcggccgccattgatgccgacgaggtttaggggaaagattccgagcgaatccgagggagagagagagggaaaagtgggggaaaagggagagggaatcacggggaatgattccccccactttattgcgcgcggggacggcgggatgcggcggaatccgcggcggcggcggcggcgctagggcacgggcgggcggcgggagcggcgcgaggatagggatgacaggcgggccccacctgtcagcgagggtggcgggcgggcccgcccgtcagcggcgcgcgcgcggggagaggccgagtgggccgcggggagaggagagggagggggagggacatgggccgagccggcccaagaggggaaggggggaaaaagaagactttttaggatttttctttttataaaatcattttaactttgtttatttcttaataattattatttgtgctctgagaattccactaaaatttgagggctccttttagaccaaggagaatttaacaaaaaatctccgggccacatttgaatttttcttatacgtattttagtgtttgccaatttcttttcgaattttaattaattctattattccttttagaaaatgatttttatttcgggatgaatttatcaggacgtgacaaatccaccccccttacaagaatctcgtccccgagattcgaggaggctagcatgaagataggttgggcggtcttctcttcttgtctgacttcttccgtcgcgtcttctataacgaacttgcctagcaaaacttctccactctggactgcttggctcgatctcctgttga

SEQ ID NO: 93 - DNA, 618 bp, Oryza sativa
gagtaccacatagtactcaacaagtccattggtacctcccaaactgcagtcatggctcgcgtaagcattcggggtagaacacctttagaaagggatcgccaatacactggttatggttgggatagtaagtctgctatgcaaaactgtgcttatgttgctattacccaccttcgctgtgaattatctgagtggcaggaatgaagtcttgtgattttttctctggaagcttcactttctctattgccattctcacttacatatacatgggatgggccctcttcaatagatgggccagcacacaagacacacacacataactagtctatttacagcccaacactccccctcaagatgggtgatagatatctatcatacccatcttgtcacatgaacaattacactctttaacacctaagccctttgttaaacaatcagcaacttgtccaccagacgttacaaatcctaattccaacactccctcgtctagtttttccttgataaagaaacgatctatttccacatgctttgttctatcatattggactggattattagcaatgttaatagctgacttattatcacacaatagcttcatgggagtgttctccaaaattttca

SEQ ID NO: 94 - DNA, 864 bp, Oryza sativa
ccagggttcggcctggttcggccgaaccagtagctagcccaattagcccaattcttcatcagctggtagttatccttgtcccaaggcggttatgaccggttaaactgaagaaaccgtcactggacacatgtcacaaagagatgaagctaaggagaatatgctccttggatgcttggagcatatccactctcccaaggcaactcatgtcacactgttaacgaccaaatttggtaaatcaagtatcggaattggagataaaaccgaagcagaatcaaagggaattaacagtttcggaaatagagtacacatcggctggggtccgaatcggctacaatctacattggtagagtttaagtcggacagggtagccgatgaagtcgattccgacaatatggcgatagaaacattgtcggattgggttgatatgcttcatatcaattgccacgcacggattgagtcctaagaaggtaatttgtatctattaattaggatattttatataattttcttgtactttgagtcggtaagagtccaccttaaggacttgtttgtttcctaagttgtaatagagttaggagtcgtgtccgacaagggcatatcatgtattttgggtataaaagtagcccaaaaccagtgtaacaaagtaacaatcagttcaataacactttcgacgcatcgccaacctttcactttcgtttactttcgatgagttcttgctttcgagttgggctgcatcagtttgatctccgacgacaaggtaaaacttgttatggcggtttgtgttctcgggattagtggttctatcttcatgatactctaatcttgtaatagccctagctcataaccaggtatttagaagtgcat

SEQ ID NO: 95 - DNA, 1249 bp, Oryza sativa
ccgtttagtagtttgggaagcgtgctaacggaaaatgaggaagttgaagtttatagttggagtatagaacagggcctaattcttggacatattgctactgtgtaattggtactatttgattctgagagaaaattaacaatatgccaccctattggatgtccttataaagatgccactccatagagcataccccttaatctgtttagaggttttttgacagaaatgacacgcgaaatgacaaaagtacccctagctcctttttgcaatgttcgggtcagatttctccctcaaattacagcagcatcaaatacaaatcagttactaccacacagcataaattgcaaatcagttaccacctcgtttagcacacagaagtccaccatacaaataaattgtgcatttagcacacaatagtaaagcatttgcagcacacatcagtatagcatttgcagcccatacaccatagcacgatctgtgctccctcaaattgcagcgcacacaacagtaagcatttgcagcacataaacaaataaattgcagcaagcacacagcagcacagaggtctccagcagcacatataggcatagtattgcagcacatagcacatagcattccagcacatagcacatagcatattggtacatgaagcatcaaagagacccaaaagaaatacagttcacaagcctaacaaattcagtagttcagtagcttgacaaatacattacagtagttcacatttacaactaaaatacattaggttgacttcattttcttgggagtcattttttcttggatggtcctgcagaagtactagccatctctctcggctctctagccccttccactccagaagtactggtcactcccaaaagcattgcaagtcgcctatgcatgtatacccaaaagccaagttacacacacaattgatttgaagcatgcacagcaaggagaataattctaacttgtcatttgaccatcaacttacctccttgtaaccattccgggctttcttgcattattgtagcttcattggttgttctttgtggtgtggaaggttcaggtggaaggttctttttgttgtttttcctaggcttccttttcctgcatatatttatacatataggatgaagtaccacaaatttaaaaggatgtaaagtgaaaaaaacagaaatattaaaaccttttttttggaccattcagtgggcaattaaaggtagcttgcctatgacctttttcaccacattttttg

SEQ ID NO: 96 - DNA, 649 bp, Oryza sativa
ttctttgggttaagtatagtttagtaagcaggtagacttaccagctggctgttgtatgcgtctggcttagcatcatttgtagagactaaatagttaatagtggcaaagacgacaaatgtaaactatgccttttgtttaggccctggtctttttccttataattttggaacctttcctcattaactaaatcaaatggcaaccctgccatttcttaacaaaaaaagggaggagaactggttgtagtggagcctaatgttccatatttatatttttgctacaggttggaacaaaagtggctgcagtgtcccgcaagacaaatactacaactcatgaaattttgggcgtgctgacaaaagggataactcaaatagtatgttctgttaccaatatctgcttgtgctagtatgaagtgaattcatattttcaatttttgatggtaccgttatggatttctaaaaatcctgtctaacgatgcttgtctgtatttcatttgcaaatactgaattctggacaatgatgaatatattacatatcataaaacagagtacattgtgatttatttctaccattactgattacattaagagagatgttcaaatcagtcagtgcaagcacattgtgccccatggcctgattgtatctatctcat

SEQ ID NO: 97 - DNA, 740 bp, Oryza sativa
ggaggtggaccgcgccgcggaaagcgtgaggcacggctcggctcaccgggtcgactgggccaccctcctctagtatgtcgcggagaaggtgacgacagaaatggccaataggcgttccggccatgctgcctgctttttcggtgcttactggcagaggctcatctaggtgcagaggccggacctcttcagtttgttaggaaacgataagctaacaaacgataaagaaaacaatagatcaatcacagaagacacgagatttaacgtggaaaaccctcctaaagtaggagagaaaaaaccacgggcgccagccagcaaaatatcttcactatatctggggtgaggttaccacgccgcatgtaacaccctaaaaattcgacgacgaaatctaaactctaaaaatacggaccttcaaaaactttttaaataaagttgcatcatgccgattttgttcgattattttaatgaattttgatctcggagtttataaatcgcgaataatggaaaattagttaggagtaaaccctaaaaagtaaattgactaagtaaataattaaagagcaatttaaaataatatttagagaggatagaaatgagtaaaatattattaggactataattgtatcaattaaatcgaaaagtgtaggaataagaattaactctaattaaattcaagaaaattatataaaaataaaatatgagtaatattaatctagggggatcctctagagtcgacctgcagg

SEQ ID NO: 98 - DNA, 1529 bp, Oryza sativa
agatctgagctgaagtgatcatgttcataaattccaaggccaaattccagtgaataccaatgtgttgccagacattgttgtgctaatggacaggagaaaaacaaatgtgccatgctttctgtggtcatggaggttcacatcaaacagtttgtgccatcttatatgttgaattgctttttatgtaacatttcctttgtgttgagtcgattcattagcatgagccaaagaaaaactttaagcttcattgtgcatttgctttccagagtattgatagatgcctggcaacttgaagatgttcaaaaaacattgagtaaactttcttgggttggtattgatctgagttccataaacatgaccatttgtcaggctaattgttaatctgtaagctttgcaatctgtcatttaaataatgtcattagtatattccaaagcatttatagatatatctttcccttcctctattatgggaatttgaatgcttgttttgtgaaaaagataatcaggacttaattatgagagtagcaatataatttgtcacactttctagtttagtgtgaaatttactgtaatgaaaagttaatttgaaatggtacctataatttaattttatttatatcctctagtcatcaattaggaacttaactaacatatatatactccgtacataacattaacttttagtgccttgggccaaaataaactacaacaatatttttttttatttgtattaccctatatttcctctcttttttgaaccagtacacattgctgcctcttacagtatatgaggaacactcctctttgagtctctagctcctcagcctcattgtctagcacttgagatatcactagttcttactgaaaagctgagccaaaccaaaccagggaaatcaattcatttttattcaaactgaataattttaattctaaaataataaaatgggaatgccagacaatttcgatatatccaagacatcctaaaagcgtctttttttcacacttcatatatttttcgacttggtttttattttttttaagaactttgggcttgtattctagaggatgatttatgtcctagggatggaaaaggaacccatgcatcctgacccttgtcactacatccaaacgacacactgatatttgtgtagactttatggatctctagcaagatgcgacgtgtatgttatagaaatactatacatgaataatgtggggaggtttaaatatatgtgaatttattatttgcaaaccgctagtggtgcaatctcataaaacctttgggaataaatttagctctatttgtatctggggactagtccctgtcacatcggatatttgaatactaattagaagtattaaacgtaggctaatgacaaaactcattccataacatggactaattcgcaagatgaatctattgagcctaattaatctatgattagcatatgtgatgctatagtaaacatgtactaattatggattaattatgtttaaaatttttctcacaaattagctctcatttatgtaat

SEQ ID NO: 99 - DNA, 964 bp, Oryza sativa
tcatcggtttttctttttcccgattttataatagattaaatcttcggacaatcataactaaataaccgtagatccgttttaggtggttcaagttgttaattttttctaaaatcaagatttacatgttaaaaatatccacatgtactgtttatgcttgtttttgtactgttttgttgatttttgtttaattgctttagtttctgacgttccggaggagagcgtttcctttgaggaaggttccgaagcgtttgcggaagcccaaggcaagtcacacagatcccaaacaaccctttgagcatgttgaacccgtttaaagctattattttatttcaactatgcattgttttcgaatgtcatcgggtggtgaacctttcccaattaaataatggccgaagatgactttattttcctatgggttataatttgattagcatgaaccttatatattggattggttcagctaaatgctatatgtaagtttgcttagccatgcctagaaacatagctaattaaagggattaattataaactatgttatattaatgttttaattatggttacattaaatggtagctcacgatggttaatcgtgtgatgttaattaattgataattaaaacctggttaaggtgggttgtgagcatatggttttgatggttgtgctcatgacaattaaggaccggttcgcgagctactgttgtgaaacatttatcgtgccaaccacaagccagcgtgggcaacggctttatcttttgtatagcgtgattcattatagtgcgtcagactgagaagtggcgagaagtccacgggggtcgctggggagtccatgccttgtttataaggggggtgattatgatccaggaaaggtgcgctgtaatgggttatgttgtgcaaggggtattgtcacaactcctttccgaggtaccgtggtggtattgaggcccatgctgacatgatgtggggtt

SEQ ID NO: 100 - DNA, 1342 bp, Oryza sativa
ctccaaacctttgcaacagatggctgacaatgagaaaggcaataaggtcagaagtcaggacgttggtacctcaagctcccgagtgaacgaagcaccagacaccagttgtgtgacactggtccaacacctgattaaccagaaccgattgcttatagagatactgcagcagcatcagacgccaattctgaacctgagtcagatacaacctcaagtgcagttggaggcagtccaagcacccacaccacaagtcagcatgccgccagcatcccgaaggacccatggtgacgtgccacatgttgactcaaaagaagcaagtatcatttgttttatgtgtgatgagcaagggcactatgcaagggagtgtcctcagcagaaaagagaaacaccaatgcgaaccgaagatgaagtccgtaagatgatcattaccagcacagaatggcctccaccaggaatgacaaaacgtcagagaagaaataccttccgaggtgcaccacagttgacagagcatcttttagctaatggaggtagagtgtctgatagtgaagattcagatcaagtctcctcagatgatgaagacgagaagtctccccaaggtttcaaccaggataaaatggaacgtaaggcatgctctcgttgtggagaaatcggtcatgttgccagctcgtgtgccactacatgcattcattgtgaggaagaccatccacccgacaggtgtccaacgagcaggatcacttgtttcttttgtgaaggaactgatcatgtaccaaaagattgtcaattcagttttctgttgacgaagaagatggccaaccaacctgccagttccaacggagagaagcatcaaggccacacaaatcctccccaagattacagtttcagcctaactccagtgccaggacagaggaatcaaaatgagaaaagaaaatgccgagtccgggaagatatctgttgcttcaattgtcaaggaatgggtcatttcgccgacaagtgcccaaaaccgagaaacatagctgccagcacgtcagtccacgcaactccctgcaatcagaagcttgctcctcagcgaattgtcatccatgcatcccgaagcagtcctatagcccgcggtgcaacagctccaactccagctagtgcattaccacaaggtgtcaatgctcaatttcagccgcagccaccagttgacaagacagaggccagtatcggcattgtacctttggatgttccagcacagcagccaagaaatcaagtacaagatgaagaacccgagcgtaagaaattattgtcggttacaactgtagtacctgttaaggaaacagacatgccaatcgccaagtggtcactg

SEQ ID NO: 101 - DNA, 1107 bp, Oryza sativa
attttatgtctggttagttgctaaatgaatgaattttatttctggattttgtgatgcttgtggccttagcagcaccagttgaaggagatgcaatgcgggatgagttggtggtgatgatggggctggcgcgggagttgacggccatgcagcgagctcgagcaatgacttgatgacatcatcgttgcaatgcttaatagcgtagctcaatggcggccctcgctcgcctaatatcacgcccagaaattcacgagtaattttcgaactaatttgtacattaaatccttgtccaggaatcagcccaggtacacaaactgacaatttaatatacagattcatcaaaataactaaaacgataaatacttacataaaaggcacttagtcctcatcacgaagaaaactgcaacggaaaacaaaatctagcgaagcttcagctccactcccacaggcagctcaactgggatctaagccaaaggtcttctccttctggatcctttttcttcaactgagatttgatgattattgcaaggtgagtaaatgacatactccgcaagccacacagcaagtatgcaagtgcataggaataccaaaggatggcataatatagggttcatttgcgaaagcagcatttagcaaagatttaagagtagtaaaactgtagaataattaatcatcaatattaatcaatcactgaacagcacacccaatgctgcacaggcccaaccaaacctgaacaaccaactccggtcgtacagatcaaacctccaaaccaggaattagccattccaaaccaggagccaaattaactttcacattattatcattgatgagtagtgtgggactaatcacgaaaaatattgttagacccgcccataaccacgggcacggctattcgaatagttttactctggccagaggtgtaccactgtacccacaagacataacctcaacatcatgtctaccatgcgtcgccatactggaaagtacccgaatagaggctgtgacaatactccacacaacacaactcaccacagtgcaccgttcctgtatcataatcaccccctcaataaccagaggcatggactccccagcgacccccacggacttttc

SEQ ID NO: 102 - DNA, 507 bp, Oryza sativa
ctttatgttttccttttatctttaggaaagtttctttcttgtcttacaaggactagtatctccctatgggtataaatatgtatacccagggtcattctaatcaatctctcgatcaatacaactactctcggcgcatcgccaccctcattcctgaggttttacttatcaaccggcggaatttggcacctgacgcggggctgcatcgattcagttcgatctccggcgaaggggtaagtcctacgttccgccggccctggtgaatctaccggttacgttggtgttgatcaaggctgcatcgcttcgatctcttggatcgctctggtttggttgatatatttgcctacctgatatctcaattctatctttaattgcattgtgtttagagacacatcggtttagttgggactgtctcggttaggtccgatcttctatcttagccgatatatctctacaatcacaatgttgctctaaatagatttgttatatccatcaccttagacagatcta

SEQ ID NO: 103 - DNA, 628 bp, Oryza sativa
tcctgcagccccgcgcgcgaggaggaggccgatgggccgcgggggagaggagagagagggagggaggtgggccgagccggcccaaaaggggatgggggaaaaagacttttagggtttttctttttataaaaccactttaactttgtttatttcttcttatttattatttgtgctctgaaaattccactaaatttatttacgcattttaggcttttaggaaatatacaaaaatcctccaagccttatttgacttttaaatttgcacattttaattgttggaggctttcacatggattttacttattctttgcataatttcgaggatgtattttagagtcgttttgggacgtgacagttattgtaggaggactcggcataggggagactcttatcccaggtcttcccgaaatgtaggacacatgcgcgaagcatatcttctaggatctgatttagacgctcggtctgtccatctgtctgcgggtgatacgcggtgctgaaatttaatgggatacccagctcatcttggagcttcttccaaaagtgagaggtgaattggcttcccctatcagatgcaattttcttaggaacgccatggagactcacgatcctagcgaagtagagctcggct

SEQ ID NO: 104 - DNA, 1491 bp, Oryza sativa
accgaaccattctggccggtgttgaaagccggccaatgttcaggcgaaattcctgatccttacaagcaaatgaaatatcaatatggcaccgacgtttctggtgcttcaatcaacaacgtgcttgtgtggtgatgaatgctcaagaagctatcaatcatcagtgatcactaaattgtccacgtttatgtcctctttctgttgtctttactttggtcacatcaccattttgcaaacagtagatactgctcttccatatataagcttgtcagttgtcacacacgcacaataagaaagctgacatgagagaaagcaaattaggaaggaattaagacacatgtgaagaggcttatatatgagattaactgaattctaatttgaaaagagatatgctgcgctaactgttactctatgcattcatcaatataacgaattttgggtttcaattttatccacaaattataagaaattcgaaaatactattttacttaaatttcacatgagcttatctccaaccacctcccatttgatgagggggtatcctatttttttcccttcaatattaatcctcaaaaaatctagaatagattatatttatgaactgagagagtatatggtattttacttgctgtactaatataattttttataaaatataagtgaatcatcttatcaatttatatgcaccacttttttttaagatagtggatttaaaaccgggcctctaagtctaagcacggattttcacggtcagtgtaccacaatcttatatatgtactcccttcgttttttaatagatgacaccgttgactttttctcacatgtttgaccattcgtcttattcaaaaaattttattcaaatgtataagatataaatcacacttaaagtaccatgagtgataaacaactcataacaaaataaattataattacgtaaattttttaataagacgaacggtcaaatatgtgagaaaaaatcaacggcgtcatctattgaaaaatggaggtagtattaatttatacgtaccacttcatatgttcatgagtgcatattttcatgggatactgtatatagcagcatgtcttttttttttactggcaagtgcagactttcatctgtagccagtgaaaaggatcaccgacatcaacacatgcatacaaccatatattgatatatacaattgagatcctctgcagtactgcatgctctgctcaatgcctgaatgcaactttcatttatagccagtgaataaggatgatgttgccatcttccacttgaactccatctagtctaggacgtctaggagtatataaactagctaggtgatgactaatccaatcaaggattctgcagcttccacatacatcagttcagatatatagcatcaaccaagtgtatccttggagcgtcttagccatccattttttattttccatatgaattgaactttttgcattggtgttcatcatgggctctgaagatttctgccgtgt

SEQ ID NO: 105 - DNA, 3471 bp, Oryza sativa
cgactatcaaaaccatgtgctcataacccaccataatcaagttttagttggcaaatttattatttaagcaaacatgactgaccatcgtgagctcctattaattagatgacaataagtgatagtgaagcataagttatccccttaatgagctaatgtttctaagcatgactaagcatcatgatagctttagctaaaatcatataatgttctagctaatcatattattaacctatttacaaaggacaagtaatcaatgtcaaaggggcataacaaagcatataggtcaaccctccggtgacactcgaaaataattcaacagttgaatagaaacaatagctttaaacaagttcaacatgctgaaaggggtgttttagaatctgtgactttccttgctgttcttcataggcttccaaaccttcttcatcataaacggtctcttcggaacgtcggaagctaaagcaaatgaacaaaatcaacaaaacagtaccaagcataaacaatacatatggatatttttaacaaatagatcttgattttatatgaatttagagactgaaccacctaaatccatgttacggtgaattagttatgaattttctaagtttaataggatttaatccattaacagacaatgtttaagatttatgaagaattatttttaaaaaggaaaagggaattattgtgtcatcatggatcgggtccacattagaccgggtgcacagaagcggtccacgaacagctcagattagatcggcttgccacgcaagcagacgatgaggtgaactggttgggcgacgtggcgctgacatcatcgatgacatcatcgcctgcggcgactactcgggaccctgttggtcaccggcaatctagggcacggcgttgaaaacggaaggcgccgacatgacaagcgtgacggggaacccaccggtgtgcggcgcgacggcaaatggcgacagacagcgacggcgacaaggttggagcgacggcttggctcggatcatcggtggcggcggcgttccagcggtagtcaatggcgtcgggccggtgtatggggtgcgtctcctccttgcaatcccaaagaaggcaacgggaagcggaggcggcggcgcggtgacggcggcgctagggtttgcagtggcggcggcgctaggagcgacggcgacggacggggcttgggaggatcggtagagtgcgattagggctacctatttataggcacagagggagagattgagcccaacacgatcgcggtggcgccgggaaaacctagggttcggtttggagagataaggttgaatccgagctcgattccacgtcggattcaaagggataagagccgattcttggggtaaacgggagaggaggataaggggaagatttcccctcaccgaatcggactcggggcaaaaggtgacggcagatttaagagaaaatcgacggtgagattagacggtgccatgtggcagccaaggagcgtttgtaggaataccacatgacagcttaaaagcgtttatagaaagtttaatgaattttagtatatagtagatagtgtgctaaagttagtgtagagacgatatattatacacattaacccttagcttatatggataaaatataaaaattgaacatgtttttgccggtattttggtacgttgtccatgtatgagtcgatttttaagttcgtttgtttttttaaaatacatattcgtatttgagtcggtttttaagtttgttcgcttttggtgcttttggtaatacagaaggaatcgtataagaaatctcacagtgaatttcatcttaactaaactatataacaataataagattaaaataaacttcacccgttgtaaagtacgggtattttttctagtatggataaaattaaaggtggtaattacctcttctataaaatttgctccaagtcctctagtaagccggccgggctgcaggactgtagttagccttgatatgccataattgtgttttacgaattgttacaagctttggctgtttgcgtgaatatgtttctttcaacgggttcacgttccaatcttatctaataaaccgatttcagggttagaactctagttcttgattgggacaggtggcaccaatcttagaacaccgatcgaattcttggctggagaagcgcaccacgtatcccacccctccagcagcggtacgatagcatatcgacggtgaaaaagacgtcttgcggacttaaatgtatattgaaacttttaagaggtcttttttacaaaatgcgtgatctcatctagaacagcccggaagtagaccaaaatatcctctgagaaaaaaaagaatctaataaaaaaatcaacaagcggttagccccatcacgtggcctaattccatatatagttttgtcactacgcatagccatttgattaaaaatctggcaaaaaaaaaaaaactgcccccattgcaagctttgagtctttgttcgaattgaagataaatctggaattaatacaaatgaaaagatccgaaaatgtggtgcggattgtaaagaaaataaggataaaaataaaaaagccaatcctgcccacgagccgctgccatctcccctcccacaagacgctatcgtcaaccaccggattcgtccgtcactcaccgtgagatggtgctgtcctgctggccgtcaaatccgaggaagtcgacgcggagcttcgctgcaggaggtgaaggtggagaatattagagagaaatgagcagctcaacatctgcctgcatgcctgtgggcagcggggagaaaagaagcaaaggaaaggaagaagaaaggtagaagaatgacagcgtcttctctctgtccgcccgtgaggccgtgacgacagaaaaaaaaagaggaaattaggaagagcggtgaaaaatgcatcaggaggactgagtagaggtggccaaacgggccgggccaaaacgggcggcccgaggcacggcggaacctgtagccggcacggcccggcacggcctgctacagtaacgggccgtgccggcacagcacgagtagccgtgccgtgcttgggccgccggccgagcccgcgggccggcacggcacggcacggctactgtagtaagtccgcatctcatccttccgcaagtccgtatctcatccctcccaactgacggcccagcccgctagccgcctccgcaagtccgttgagcacccctcctagctgatggcccagcccgccagccaccttcgcaagtacgcatcgcatccctccgcgccatttcggtttctgggccaaccgtgccccgtccacgggccatttttcattcacgggcccgtactgacacggcgggccacacgcatgccgtgccggcacgggcacggcccggccattcacgggccgtgcttgggccggcggctcggcacgtgggtcgggacggcacggcccgtttcatgagccatgcctaacgggccgtgccgaaacgggccgtgccggaccc

SEQ ID NO: 106 - DNA, 948 bp, Oryza sativa
cagtgtggtgaacatataaccatttttgtttgctaaaagaatagattcatctcattctatgaaacttctttttagataatgaaaagattctcagccttagcttcaaacaagctacaaccacttattactgaatggggaacataaaaaaaaatcaaaagactagacaataactaatgatatcaacacaaaatatagaagacatttattcaaatttatttgtaaatctccatccgatgttggcaaatatctgcatgaccattatttctagcttctggtacgtagtatatattagttccttgtcctcatcacacctttacacctttatagttgtggtcaaaattggagcagtacattatcctgaatagtacctgtatataagatttcattagggatttgttaaaaaccatatcatttctacttagccaaagaacccgacatatagtagatgctactagtagaatgtgtttctttgttttttagtcaaagtgtacaagccaattcccagaaacatgagaagtactatttggaggtttcaaaccaaaagaaatatgtaatgatctccacaggaatctagcaaacaatggcactcaaaaaaataaatgatgtatagtttcactcttcattaaaaaacaacatctcatattgtcattccaattcattcattattgctaaattatccttcgttaatattactcctttgaactgataccacataaaaatctttattttaagagatatttttaatttccataaagttttgttgcaacggtacaagagcttggtaggtgtgtgtgatttagtataagaacttgaaaaatgagtacacgggtacatgaacttgacaatcaagtgcattttagtcaaaaacactaatatatacctttgattaattctggtattataatagatcattggctcatggattcaattttgtgttttaccatgttc

SEQ ID NO: 107 - DNA, 715 bp, Oryza sativa
ttcctgcagcccgctcgattgaacgatcagcggcttggatatcgccaccaattgactgatcgaaagcgtccgcttcatggcttggacagcagccgccgccgacaagcaccacttcagcagctggcaccgtcgccgcgctggacactttgcttggcgcgctacgcgccacatcaatcgattccctggccgcttccgaatcgcaagcctcgcactgctcgccgagcagatcgatccagccttcgtcggagtcccaatccggcaaggccgaaacagggcacgccaatgacttgatcctatcgcagaggctctctgttatctcgtcgacctcctcctcgtcgtcggtctccgactcccagaatgcggcgtccagtgtgctcttcggagagacccacctgggcttcggctgcgcggccttgacttcgtggcaggcgaatgccacgaacggatgctccaagagctgtgccgcggtgctccggtcgccggcgtttctcgcaaaacacatggccaagaagtccttcgcctctgcggacagccaaaccggcacctccggcacggcgtccgtgtacccaatccggtggacggcggcgaggacgtcgtccatgtcgctccacggcgcgcgcccggtggccatctcgatgaccgtgcagccaagagcccaaacgtctgccgctggcccctgctcctccccgcgggcaacctccggcgccatgaacgc

SEQ ID NO: 108 - DNA, 5666 bp, Oryza sativa
catgaatcaacaacttcaggatagatttcggttgcatttatcacagcatgcctagctatgatgaatttctggttatgaaagacatggttaatgaattatatttgtcccaagataatgaccaatgtagttatatacgcggaggcatgaaatacacttctcagaaattctatgccctcaatttcagaacagtacgcggaggcatgaaatacacttctcataaattctatgccctcaatttcagaacagtcaaccaccacaacaccttatatggataaggaagagtaagtgtaacttaaaattgaaggtttttttatgactccttttgatggatagactgaaccccagcccatgtcatgttggatcataagaactttgctccaccagattgtgatttggcatgtgttttctgtagtcatcaagctctagagacactaatttttggttgttcttccaataccctttttcagttgcttgctggaatattgtggaaataataacttaggacacatccttaagtatggagaaattattgttggttgcgtggaacatttggaagctaaggccctgtttggttctatgggctaattattagccctcaccttttagccctgaattagccctcaaggatccaaacaggagggctaatttgaggttaaagtgaattagccctcctcaaaacattaacccctctatggggtgctaatggggataattttgtgtagggaccatcaaaaagcagctctttctcttcctctctcctctctttctactctctctccaccttttagccttgaattagccaatggatccaaacataccaccctagactaatatttagcctaacaatttatgactaaacattaattagtctcaaaattagccctgggctaatctttcaaacagtgcctaagtaatggttcgatcttcaatcataattcacctacgttgctttcttggacacaccttttcaagtgagacctcttgctgcttcttttcagacttaatgagagagattagaatgtagtacagagactgaattatactggcggtaattgttttttgtttttttcttattaacaagagttcttaacagcaagggagcccttgctgttttctgatcggctgttgatcaagaaatttcaactttgaactccaaatgtcaatgccaactacttttagagccagtgaatatactagatataaaactgtgcgataatctaattcggctcattgcaagtatgactaacacatactagaagaagcatttcaaattattcaggccggtatataaaaaccatccatctcttcccccatgagcccatcgggcaaacacttttcctgctaggccatagctcacatattcttccagtgtgattgtctatatctaccttgactttgacgagacgacaacgaacaccaatttgcagtaccatcctcttatcatttctctcttcaccatattacacaacactctggtctctgagtgtgtgtgagaatatcaattctagcacgcatcgtcagacagtactgtaccctcttcagaatcactagaacaactatatagcaatttgatacttgaatgtggtcatgctatgaagcctgtattcccattgcctcctaagcctactgcacttcatgcatgcacccagggaacaacttgggcaggaggactgcacaaaaattctaataggcttagagcaagaccaattagatgtgtagatgactgtgtgagcaatggcacatgccttatatgtagggcaaagcagaggaagaaaataaatggtttcaatagatgcaattgacacctctgtctattccatacacctagcgccgttttccactccgttccctagtgccaggatttattgccgccgtcactgcctgctaaactgtggcatcatgtagtgacaaattaatccactgccctacaatgggtgaattccttgttcctgttgcatcctaaacctactaggatttgcactagctagttaaccaactaaggcagaggtagatgaaatggaacaatagagaattaagagcaggatcgagagataagataagataagatgactgtacctaagcaatgtgagcagatgagcaaggtcatgatgattttatcattgccgaaacaaaaggaaggaaataaatagtttctatcattgccattaacaatgtcttttttgggggattacatgatttacgcttcggtatacaaatattagagcatacatagtgcatggatgcacagtagaggtaattatgtgaatctcatgaaaatcatgttgaaaattaaatctaccccgtgcaagaacacatggaacactccatgtgctacccatcaatataatggttgtgaggcgcagaagtaggagctccgggaggccgtcgaacactccatgccgctgccgctgactgacagggtagaggccatggcggcaaggctataggcttgtctgtgcaccgcgtcgccggatctggctccccttcgctagatacggcaaacccccctaatggatcaggcttcttaggcgagggacgccgactcccctgcaatggctccctgtgacagggaggcggtggcatgcggtgaaggggcaggcggtggaggtgccccacggcgatggtgtcacacgcgtgtggatgagagttgacgagttggctagtgaggcccgtcttgatggtagcgagtggtgccggaggcagcgagaagaaggatgcgtggaggtggccgatgatgccatgggtgggctgaggctgactgacgaggggcatccggcggggaacgaagggaggctagcacgacgcaggtggcgtcagtggttcaggaaggctgatgctggttgctccaggaggttggttcgggcgatggcagggaggccgccccggtcgatggcgcggagggccgacgaaagagaggtcggtgaggctatctggtggagggcgtcagtacagtggtgaccatgtaccgatagaggatggtaggtggtggagctttggagctttttcttcaggtcttcatggaccgagcgacatagtaaagcccagcttggtcttgccaggtcgacaacaatggtgttttaggcattgttttccatctttggggcattgtcgagccacccctcttcctcaggtgggctaccaggagaaaacctattgtcttggttctccttgagatctcgacggatggcgatgtcggtgttcatcatcgtttttctcactggagatgtcgtcaaggaagcctcactgcgaaaacctctctcgggggctaggccaaaccctttgcccccgcgtcactcccagggtaggggcgacacgggaggcgacccagccgccaccaccgcaccacccccaccgccctccttccacctcgccgctgcccgagcgggccgccggaaaccacgcggccgcaaggacggcggcggtggggccttctccccccccaaggtcacagtgttcggagcccacgaccccgacctagctctggggcagcgacttcggcggctgcgacgtcgagctcgacggttgcgcatggcgtcggcgaggtggcggtgccgacgacggttgaagaggtgggcggccgggccgacgacgacgaggcggcggtgttggctcctatgctctcctgcgtggatctagtgcggggggatggatcctgagttgccggcggcggtgatgagcgtggaggcggcggggtggccggatccggccccctcttgtctggatccggcacgggaggccgagctccgaccccaggcagcgaggcgaagggggcgcgcagcgctgggcggcagtggctgaaggcggcggggacggagctggccgagggcgctgaggcggcggcggttgtcccgtggctgtgacggcgcggtgcctggcggcggcgttggcggtgctccacagatccgcgcctctcgaccggatcttgagggtggcggcagttggtgacagcggtggtggtgtggcgacggtggtggcggcagttggccggcagcagttggcaccggcggtctcggccggatctggacgccggcagcagttggcgatgacagccgtggtgtggtgatggcggcagcggcgacagttggcaacggcggcggcggtcctggctgtggtggctgccgtgtcaactggcggcggtggcgaaagacatggcgtcgggcagctagctgctcggtggtgaaggacgacggcgcagcggcagtttgcggaggcagcggcgacggcggcagcggcgacggcggctgcgactctgaggtggtggctacgtcggcggcagggaaggagtcgggtgcgaggtgaggatgacgacggcgaggtggttgggtgttaggcagcggcggctgtggtggtggtgaccatgtttgcggtcaccggaggcatggcggcctcggttgactagccgaggacgtgggagacagctgcatctggccggcgcggcatcgttcggtggaggggtcggagaccagcttggcgcagagaagcgcagccgatggcagcagaggccggctcggcgcgagaggcgcgggcggtagagatggaggccggcttggcacgagaggcgcggccgatggagggaggccggattggcgcgagaggcgcgtccggtgaaggaggccggcttggtgcagagaggcgcggccggcggtggaggaggcgatctaggtgtgaggaggtgctgtcggtgagtgtggcgcggtcttcggcgcactaaggctgttcggcgggggacgtcggtgcaggggtctcacatgtcggcaaagcttgtgtggtggtggagcatcggtgcatcagccgtggtttcgggatctcatctgtgcccctttgttggcctattagcggtcggtcacgcttagcggcggccgagccggtgctagccttctcctgggcgtgtgtgttggcgatgtcggcatgtgggtggtggtatattttttcctttttctagttacgactctctaaggttgtaatcttataatttttttcccgctctatcaatagaacttcgcaccgtctagtgcgagtcgttcaaaaaaaacctctctcagaaacctagtgtgtgctctctgctggcatatgtcctcttgtgatggcgacatagtcaaatgcaagctggccatgttggtgagccttgtaggggagagtggttccatcttctctctcatcttctcccctaaaacctcaagggcgtggatagagttgagcacagtgcccattgttagggtttggctttggtgcccgggtgttgtttctttgttggcctagcagcgactggtcatgcttagcggtggctggtccgatgctagccttcccctagatcctgtataggtgatgtcgatgcgtagtgtgtggtggtggtggttcttttcctttccttgctaccgccttccagggtgctagccttgtaattttttcctgttctattcaatgaatcatcgcaccgtctggtgttgttagttctaaaaaacattatttctgatgacttgtagctagagtagctgtaagggaatgaatgagacatatttgaagcgcttctgaattaacaaaattctgaaatgcctctacagggaggtcattggtttcaggttttgtccccaatttcagagttttgtctacctctttagcttcttggaaaaatggttgcagcacgttctgcctggagtttgtcgcag

SEQ ID NO: 109 - DNA, 1126 bp, Oryza sativa
acagttagaacttagacgccacagcttacctagttacctgctgtggcttgcttgttcatccggattgctcttgggattaatcggtggggggaactggcaacactctcttgtctccgaccaataaaggaatcggacctcgcagtttcgtgcaggtggatgcctgcatattttttgggagaggtcggcggccaaatgggccagagggccagaccgacctggcatgcagcaacgcgctgcgctgcgctgcactgccctgcactgcagtgcactagcagttggggtatgcgtcagatcggatgcatcatccccttccattccgcttccattccgcacagcgagcacgagatgcctggccgcaatgccgccttgtccgctcgcttttgcatcgtacgttcacggttcattccctcttgcggtctcgtgcccccccaacatacaaggtggtggtggcctggtgggcctcctcgtcgtcggagagcgcagcacgccgcgcccgcgcgcgcgtgcgtcccagcgccgctcgaactggcaaaaactcgtcacgcatcccgcctcgccgccaaaccggcgggcggcacgcgcgcctgctcggtatgattgatgcgcggtcgcgaacgcacaggagccagacgagagacaacaacagaagctaaaagctcgccgacgaacgcgaacccggtcgagccggacgccgggtttgattcggcgagcgcgcgactgcatgagccgatctcgggttggccccaaaccacacccgtcggtgcggcacaacgtcgtagatcctgcctgcctgcacgttgcaaacgcgttgaagggaggcagggagctgcgtttttcaaggcggcttgtgcaatgtgcacatgaaccgaactaccgaacgtctggagatctgcgagagagagagagagagagacagaggggctcgatcgctttgctgcgacgccgaactcgacgttcgattcaatggtccacggcccaagtcaacacataccagcaatgcgagcaagtcaaatgtttggtacggactacacttgaggtactactagtaattgagtagcctcaccaccctatgattacattaactgggcatgattacaataacccgttcttccagagctccgattcg

SEQ ID NO: 110 - DNA, 500 bp, Oryza sativa
cgagctaacgctgaaactagagcatccttgtgcctgaacttcctcagcaacttatcgtgttcagcaaccttcaccttcttaggcttctcaatcacaaggtcaccttccttagccttcgcattttgtccacggaggaagtacctatagttggacggtgccaaccgccgcttctccggcttggttggtgcccaatcaagctcaccaccaacacccttaccctcttcctcgtcctcccctgtcgacttctttttcctcctacccatataaattgtgccctttgaagatccagcaaccagcactgtcccacacggcgagcacgccaaggaaagcaattccttaggatatcgcatcgagtgcgtgagcttaagctcgccataatcaaagctcttgacataaccatcactccccgcgctaagcagccgcgtctcggccgtgttggtcatcttggcgagcgcgagggccatcaccgtcttgacatggctctccaccgagtggagaag

SEQ ID NO: 111 - DNA, 696 bp, Oryza sativa
  unsure (1)..(696): unsure at all n locations
gaacagcattgaccgctgcctgcaccgttgtgaagttgcagcagccattgggatcgacacagaagattgaaattgccgcggtatctggcggtggaaattccggtgggaaatcatcgcataacggattatattcgtcgcgataccgatgatttccagtagaatttgtagtgccagatgttagcagatagaatggaagggaaggtgctgcaagatcaagaaggattccaaggaatgaagaaatggctggactatggagatgtgatgagagcagcacaagtgcagatatgcagcaagagagaggaacgataaatttggtgctcatttgtatgactgaattgattcactatttcttggagaatctgggatggatttggggttttaacatgctgaaatgcactttaagaagaagcttaaattgcatgccttgcaaacaaccgatctcctttcttcaagcttgagacgcagcctacaactacaacagctactaggaggctaagatgtttatntaatgcgtgcaaaaattatcaagtcaccgtcagaatcttagagatgatcttatcaggcagcaacaatttcacaatagcaaacatcacaagatcttttagttcatgtgaaatagacatcttttgaaatgtcagtgacatggtgaacaatttccagcttaaaaaaaacaacgattacgcacatcaccatcat

SEQ ID NO: 112 - DNA, 649 bp, Oryza sativa
ggcgaattcgagctcggtacccggggatcatatataactgcgcctgtgggaagatgtacttaacactattgtgagcggggtatgcttgacatatgtcaccggacaaatagagcctgccgatctgaacagcatgaaccacggctgccaatgcaagatcatgggtgggataatagacttcatgaggcctgagctgcctggatgcataggccacaacctttcttttttgcattaggacacatactaagccttgattcgatgcattacacaaaatatttaaatcttttgccatctctggcaaggagagaactggggctatgaccaaccttttcttcatttcttgaaagctgactacactggctgctgaccattgaagagtcttttgcttctttaacagctctgtcataagtctggatagcttatataatcctccaatgaatacttccatgatatgcaactaagccaatgaagctgaaaatctatggcacattcttgggcgggatccaagctagtgcagttattaacttgcttgtatctacctcgacaccgttggacgagatcacgtattcaaggaatgcttctcgggctaaccagaattctcatttatagaatttagagaatggttgaagatccctgaactattacattatta

SEQ ID NO: 113 - DNA, 4851 bp, Oryza sativa
ctgtctggtactatacaggaattgggatgttttcgttgattgaacaccgaaatcttatctacaataaaacacggcttcgcattcttaataatatttatctcactactaaaaatccccatgttccctaccgtttaatattttcctactagtgtgtgtggagacaaggaaaataaaaatacccatatcgtaccattctaggaacatagggaaattttttgtttcatacagttttacagtattaagagggaacaaacaactgaaacgttcaccatgctggccggtcatgtttccctgcgatatgattaaaaacaaggtgattccccgcgctttaatgcgagaattactaagtaattattaatttttttgacagcaagttaggagtaaaaagaaaaaaataataatgaaacatcagggtttatcaatcaaataataccatgcttcaatgtgaaacatattgataagtatatgttaaatattgtaaaagtgatagatagatttgttaaaatatcgtgcaaatgatacgaggggtgatgattcaaggtttcaaacatgctgaacatgctgctacccagtcaagtgaaatgtccatgcatgtttggttttcaccttaatattgctatgttgtaggaagcaaacttatttagcaaactgtaagtttttattatactatgcaacaggtaggaaataataagaatacctggtgatcagagatcttgacaggcaccaggaagaagtcattgtccacctccatagcatcctttcccccagccaccacctctttccgcatcttggacaggcggggatcgtctttgtccctaatcttcgtctgcagcacaccatccttgaatagcttcacacaaagtagcgaaagagagagataatgccagaatagattgctagtgttgcccagcagaaaaaggaaagtctgtaaattcattctcacctaagatgaacaacagaggtctgcccccaattctgtgtgtctgcaaaaatcaaccaagaaacaatgaggataatgagcagcacaaccgaattagccaaggaggaagatttcctcttgttggctaaacgaaagaaaaaaaagggcaccaattaacctgcagcagtagagtgggcgagcttccaagagagaggaaccgatgatagcagcacgagcaacagaagcaaaggtgctgctgcccttgtccgtggccgccgtcgtcgtcactaccgccgccctcgaccgctgccaccgccctcatccgtgtccgccgccgccaccgtcgagtacagccgcctcgtcctcgtccactgccgccctcgaccgctgccgcctccctcttccgcgtccgccgcagccgccctcgttcgcgtccaattccgccgcgctcgtccccgaccgccgccaccgtcgctgtcaccatcgacagagtctgtcaccgccgtagtcgctgttgctgggggaggcgatacggtacaggaggcgatgcggtggggagcgaagggaccgagggcatgctccaaaacgcaatgaggaccactgagatgtaatccaacggtcgataattaaatgatgacgtggcttcaccaaatctcagctttgggtcttaactttatgaaagaagggattatatgggactaactctaaagaatttagctccagaaaaatttgcctgtcctcattttctttaaaaaaaattgcctgtccctgctagttttatagtttccctccagtccatacatctctgtcccacctcgtccacatagaaaagccctagccgcctccaccaaaatatttcccttcttcggtgaaatcagcggccatgctctagtgtcatgccattatctaaggtcattcttgcttcccgcaactctcctgcatcgaatccctaaactttccacccaaaaaacacgctttgtggccctaaatcctctattcgtcatcccccattacctttccatccattaaatgcgcatgaccaccttttaaaaaactgacaccttttaaaaactgagcagtgagcttatgagcggataaggggaggagagtgcgcggtgacaagcggataagaccgagagtctctctctctctctctcggcctcccctccgccagattcggtgggaggagaggcatcgatgatggtggtggcaggctccggatctcacgggcggtgggctccagatctcacgggcaagggcgttcatgggcgacggcggcctctccgtccgtctcccctcccctggcctgccttggcctctcctctccatccggccagcaacggtggccaacggtgtcctgctaacttccggctccaatgagcacccatgtcgacttgaatcctctttctctctccatccatctcttcagccttcggtgagcaccaccatttctctttgccttaaccctatcttcatttctagatctagagcaagcttttctccggtggatgcagccaacagcgactttttatgatgcttgattctatgatgtgaacttatcgatgaacatttgatcgtgtgatccatgaacttgttgattgtctgatgtgtacttttatatatatatatttggatttatttttggtgactttgaagcactagcttagctcaaattgagctaagctggagtttttttttttttgcaaatcgtatacctctaatagacttcgtggtgtcagttgggaaatccggcacctatgaaagtttcccaaccaacaccaatagccttttttataatagtgatatagggtatgttcagcagtcagtcacatgctaccacaaccactttggttgaacctttttaaggtttggtggttaaaatttttgctaaggtataggagctgtttggatggggggattgatttttagcctctgtcacatcggatgtttggacactaattataagtattaaacgtaaactaatgacaaaacccattccataaccttggactaattcgcgaaatgaatctattaagcctaattaatccatgattagcctatgtgatgctacagtaaacatgtgctaattatagattaattaggcttaaaaactttgtctcgcgaattagctctcatttatacaattagttttgtaagtagtctatgtttaatacttcatattaatgtccaaacatccgatgtgacagagactatacaaagttagtaactgaattcaaacactaccttagtaacgggatccaaacaccaccttagtaagcttaagagagaatcgtgtcatatttttcttaatcacttacacccgagccctagttttttagaagtactaatcttgctacaactgtctaaatagttgatcaaatttatctaatctatgataagttatggcgcaactaaacggggcttataatatcttccgttatatttgaagaaaacacgacccagttagctcagtactaatacttatgtgcaaacagtacgttacacagtacaatgtcggtcttttgtagtactacctccgtttcaatataaatataaatatagttgtggttttccatatctaacgtttgaccatcattcttatttaaaaattttatgattttttttaaaaatagttacacataaaatattattcatgttttatcatataataataataaaaatactaattatatttttttaaataaggcagatagttaaatgttggacatgaaaactcacacttgtactgatgtagatagtaattagggtgtgtttagttcacgctaaaattagaagtttgattgaaattataacgatgtgatggaaaggttggaagtttgtgtgtaggaaagttttgatgtgatggaaaagttagaaatttgaagaaaaagttaggaagtaaaccagaacttaatttttttgtctatgaaaaagagggagagggaggtacgtacgagctagaaactgcagagtgtgaatgcattcccaatcaatcagtcactgtaatctcaaacaccatggacagatatgatatggagtagataggagtgaaaagggtcggaaacgatcggaattgatatcatctctttaaaaacggtgctcgatcagccaataattgaccatatttatcatttaaactactcagtatcgatattaatacgatgcagaaaaaattatgaaaaaaatttaaaatagcaaaaaaacgatacggtcggaaacggtaccctttatacggaaacgacactcggttgatcgggaatttccgtgaccatcttcacccctatgagtagatatgtgatcaatcctgcagtctgcgctgcgttgtttggttacatgttttccgaactactgaacggtaatattttttctaaaaacctttatatataaaagtcgctttaaaaaccatacaaatctatttattttaaatttaaaataaataatactcaactaattatatattaatagctcatctcgttttacatatcttcccaatttacttcttttctcttctctcgaactcccagctagctcaaaagcaaaccccagaaaaatccaccggctgccacaagcagccaccgtcagaccatcacatatacacatcgccattagcagtcgagctgtcgaggtcagggagccggctaatttagcccatgcatgatagctccaattcctccatcctataaaataatttcgtatcttttacctctaccattcttttcaaaatgacatcacttctttcactttatttatatctaatccataaattaattagttttattttgttgatatttcttatccacttagaacaagttttatagtaaagatgatgatcacctctaatttatcttcatattacttgccttagatatacacccgtgctaatataccataataatatattttactatattacggggattattaacggggat

SEQ ID NO: 114 - DNA, 753 bp, Oryza sativa
aagaaatgcccattcactggaactgtttctatcagaggtagaattattgctggaacatgccacagtgccaagatgaataggacaatcatcgtacgcagaaactacctccattttgtgaagaaatatcagcggtaagtaaagcaatggaggactatgaacttacatttcttatctgtgatggcatcttatttagaaggtgaacttgttcatcttgtagatatgaaaagaggcactccaacattccagctcacatttctccatgcttccgtgttaaggaaggtgaccatgtcatcattggccagtgcaggtaatgttctctagctgatgctgtacttagtacatgttttctgttttgttctgcatacctgaatattgggattacatgacttgaaagttccactgaattatctgttttctttaaaatgttcttgaaaattaagaaactaatttatattttcatctgctctgtcattcctcttgtattacattgttgatgccataactcagaaccaagcatcatattgttttggatgaggctgttctattgtcttaaccaggttaaggtcctgtttggcacagctccagctccagctccacccctcctggagcttgagctcagccaaatagtttcagctccaccaaaactgggagtggagttgggtggagctctctcacagaatatactagagttgtggagctgggtttaggtagctccacaactccactccagactcaactcctggagcaatattt

SEQ ID NO: 115 - DNA, 2077 bp, Oryza sativa
ctatacccatgactatgagtacaccttagagatttcatctctacatgtaatgtttcttggagttttgcaaagctacactctctcattcgagaaagttgtggtttcctgcctgcagagactaggcaaggttgatgagcactgaacagctgtgtttatattcttctacactatatcaaatgattgttgcatgggcaaattcatgcgtgtatcctttgttagttctgcgtaatgtttatcctttgtagtaatgccaggtatttgtgcacagtattatctctatgccatataactaactgatcatggtttctgaaaattcattttagttgctcgaaggagctcttgatgcttctggagatgatttggattcagcaataaagagtttaaacaatctgcgcttggagtctacagaggctatcttatcagctactggttgcaaatctgaaaatgggctccccacagcagtttatccgtctgttgaaggttcagcttttaaccaaaagctttttatttctaggatctgtgcatataattctcatgcactagtacttcttgcttttgtcacacttaaattttagacaccgcagtaccaatctatcataatgatccatgtgggtcatgatatactctttcaaattgtctatcaatattattcagagatctctagccttgctggtttctttgatgtctgttcttatgtttatattctgcaacagtttctttgatgtctgtcttatgtttatattctgcaacgtaatgcgctgttcaattaaagacactgcacacgattcagtcaattatgttatatggagtgtgcatgattaactagacataaattctgatgactgcatccacatatcttctatcttccattcttttgtattcaccatatttagaatagttgtgtattccttctcagtgtgtccccaagctgtcaagttctcgcgttgcattttctggctatatactacccaagttctttgtattttttctaccaaaatactgccaggctttgtccagcaatgttaaactatattattaaaagaataaaatatttacagaacgattacaaggaaagagaaaggaaaacccaagccaattctaaactatcgtttcctctcacaacacatgaatcggttgcatctcactcccttgtgcaaatgtagcatactgtatatatgacaacagcaactattttgcatatcttggcaggtattgttaataatggtggtgtgagtacagctaatgaacacccagctgctgcagatagttgccagacaggtaataatggttctgaatgggttgagctatttgtcagagagatgacaaatgcatctgacatgggcgatgcgcgtgctcgcgcctcaagagctttagaagttttggagaagtcaatcgtggagcgtacaggagctgatgcagcacaaaacttgcaaaaggtacacgtgtgtctatcttctctagggtgtaaaaaacatcgtagtgtttggtcagcaattcggcatgtagaaaacatgcatcaatgcatgatttaggagtaacaataacattgaatactttcatatttttctttctgtacaggaaaatatgatgcttaaggagcaattgaccgtcgtgctgcgagagaacgctgtcctcaagcgagcggtcgccattcaacatgagcgccaaaaggagttcgacgagaggagccaggaggttcagagtttgaagcaacttgttgtgcagtaccaggagcaactgaggaccctagaggtggcaaccacaatcctatctccttttgcaagtttctttctttttctgcctaacatacatactgatgaagaatctactggggtaaaaaatgctgcagataaacaactatgcgctgacgatgcatctgaagcaggctcagcagaacaactccatccccgggcacttcaatcctgacgtcttctaacttttgccgcaagacggtctgtccagaataataatctctgaagatgtcatgtgttgttggtgggaaatgaataataatctctgaagatgtcatgtgttgtgttgttggtgggaaattgcctactgcctctgcgataggaga

SEQ ID NO: 116 - DNA, 21002 bp, Oryza sativa
ggctccgccacttagatcgatcatgggagtaagaatcatctagatctggttcgaacaagacccaatcaccttacaaaccgatggacgcatgagcaaattggtactttccacgctatttctttcttcatttatatcggatataaaataatgtgtttgatgttcagcagctaattaccatattttcatggtatcacgtaacacatattccctctatcccaaaatataagcatttttagaatagtgacaagtcaaacatttttaactttgattattaatagaaaaaataaataaaatcaataatgtaaaaatgatgttattagatttatcattaaaaatatatcataatatgcaactctttttatttaaaacatcttacttttatagatattattaattaaaatagtatctttaaaactatgtagaagttaaatattgtttatattttgggacgaaaggagtaggtgtttttatatcttgcagtaaatatcacggactttaagtgtcttcgcaaatttttccaaagacttataaatcaatactcgtaataaatacagagattacgccagggagctaatcgcgtacaaccgcgcacctacagttgtggccagaaaacgtttcgcgcgcccacgaggcacgtgtttcagttgatactgttggacgtaaacccgtcggcccaacaaccagacaagaaccaatcaaaaccactgcaaaataaagccgattttggtatacgtctcacgacagattttttgcctcaaatcacccgaatttgcttccgtcggatctcttgggcatggtttaatttgacggtcatgatttatccccctaccaccgcggcaccacctagcagtatctttaccgggcacacaatgaacaatacaaataaactgatgagtacgggcaaaaatatgaacaccatggtttaatttacagtgtatttttattaaaattacagtgcatctacatgctatatctactatttttacaaatgtaattttagttataaagcactgtaattttagttataaatgcaacatttaacacttcagatacctggacggtttctcaagcagtgcatttgtactaaaacgacaaatattctagttaccaaaatttacagtgcatttgtacttaaaattacggtgcacttacatgccatatttattgtttttacaaatgtaattttagttataaagcaatgtaattttttgttacaaatgtaacatttaacacttcagatacctggacggtttctcaaacagtgcatttgtactaaaacgacaaatattctagttaccaaaatttacagtgcatttgtattaaaattacagtgcacttacatgccatatctactgtttttacaaatgtaatgttagttataaagcactgtaattttagttataaatacaacatttgtgttaatctctactaaatactactctattaaccaatacaatcacaagctatacctggacggtttctctatatttttttaatggttagatgtaaatataaggagagaaaaaatattttttctcgaaaatcacacgacatatgtctagacagtcccaaataaagcagtagaaagcgccaaacgcctccgaatcagtaccccttccactactactgctcgtgctcgatcggccaaccatggcgtcgggctccaccgatcccctcctcccccgcgccggcgccgcacgccgccgccccgccaccggcggctggaggtccgcgctgttcataatctgtaagcacagctgccaccccagatcgcgtctcctcgatcgaaagctttgcttgaatcgtctccgctggtttttaggggtggaggtggcggagcggttcgcctactacggcgtctcgtccaacctgatcagctacctgaccggccctttcggggagaccaccgcggcggcggcggcggccgtgaacgcgtggtccggcgccgcgtcgatgctgccgctgctcggcgccgccgtcgccgactcgtggctcggccggtaccgcaccatcgtcgcctcctccgtgctctacatcacggtcagttgagtttcagatgctaaccgaacagcaccgtaccctccagccttatccattccgttctcgatctcatcgatgcgttttctttggggattttgttcaacctgctcaattccctccgtacatttgctacttctacattttaacctattgttttatttgttcaacctgctcaattcctccgtacatttcctacttctacagtgatccttgccataatttatcagtttattctaaaaaaatatttattagccatcttgcgcagagttcgatatagtatcaagggttacgcctagtgacctgagtagtattccaaagatcctaagttcaaatcttctatgcagctaattttaaattgggttatttgtggggctaagttttttatttcaatggtcgtatatatctggttggacgtagatgccagttaaaaaatacccttctcttaaaaaaaaaaggatttgagagatctcccacgcaatggcattatccgcacgcggttagttggaagcattttccgtttacgctgcgctgcggatggaaagtgactttacacgcaagtccaagcgaacccgttctgaattgtgatttactgaatttaacaagactttgcgtgcagctgctatcttattacgcccaagtcaaatgggcatggtttttcagttgatattgttgcacgtaaacagcatttcctgacgtcccgggagaagtttcagtttcaattggttaatttaattgtcccttaatttatagcctgggtcgtgtagtttccagtggccggtagtgatcatgctcaacacgttcagtggagtgagaggacgtatcaggcatgtgtttatttgcatactagtctccaaatattgttttctaccaataatagggttgttgctttcaatttagctagtagtctattttcgaaggaacagggtagtagagccagccacatcaataatctttcatgccattgtgtttactgtttagtgataggatcacaccgcgtcttgcagaaaatatttatgtacctgcccattgcaattgaagttcttcagctcagtgtctgtttggaacacattaatttcacatggatcagtgtctgtttagatcccaccctaaaattttacaccctgtcacatcgaacgtttgaacacatgtataaagtattaaatataggataaaaaataactaattgcacaaattgcgactaatttgcaagacaaatctttttagcctaattgctacatgatttgacaatgtacttttacagtaaacatgtgctaatgatgaattaattaggcttaataatttcgtctcgcagtttaccgacattatagatggccatctgggccgcccggcacggcacggcccaagcccggccgtgcctgggccgaggcttgtcgggccggcacggcccgaccgatgcaccgggccgtgccgtgccagcccacgggcggcataaacggcccaggcacggcccaatactagtcgggccgtgccgggccggcccgaaggcacgatgggctattgtgctgcctcacagaaagagtttatatttggtccctcaactctgtgggctgtgtttaaatggctggaaataagtctatttttgatccctcaactctgtgggttgtgtttaaatggctggaaaataagtctattttgtatacctattttcttgggccatgccttatacggttatataagtctattttttgtccctatattttttttatttgatcgggccgtgccgggccggcccaccgtgccgagggtgcagcccaggcacggcccagctatcgggccgggccggcacgggcacgaccctagtcgggccgggccgtgcttgggccgggccaaaattgcgggcttcgtgccaggccgtgggcctcgggccatatggccatctataaccgacatactataattagttttttttattagtgcccaaacaccctatgtgacaccctatataatacctgatgtgatacactaaaactttgcatcccagttcaattcttgtttgaatccggtaaaataccgacgttacaattacggttttgcatgagaaaattcctcggaacaggacctaaatatatttgatctcgcaaactgcgctcacctattcaccatggccaaacaacggcagggactgggcttgctagcgttgtcgtccacgttctcgtcgcctcagagccaacaatgcagctcctccggcgatggccggcaagtttgccggtcttcctccgtgcagagggccttcttctacgtctctctctatttggtggccatcgcccagagcggccacaagccgtgcgtccaggcgttcggcgccgaccagttcgacgcgacggaccccggcgagtcgtcgtcgcggagcaccttcttcaactggtggtacctcgggctctgcgccagcgcgaccgtcacggcggcggtgatgagctacgtgcaggacaacgtcggctggggcctcggcttcggcgtgccgggcatggtgatgctgctcgggctcctggtgttcctgctcgggacgaggacgtaccggttctacgacggcggcggctccggcgcgttctccggcgtcggcgaggccgtcagggcgtggaggaagagccggcggcgaggagaaggcggcggcggcggcggcgccacggttgaggcggagcacggcgagctcgcggaggaggtgagggggatggcgaggctgttcccgatatgggcgacgtgcctgctctacggcgtgctgttcgcgcagccgccgacgctgttcacgaagcaggcggcgacgctggaccggaggatcgggccgtcgtcgtcgttccaggtgccacccgcggcgctgcagagcttccttggcgtcagcatcatcccctgcgtgctgctctacgagcacgtcctggtgcccgcggcgcgcagggccaccggcgtcgccaccgggatcaccatgctgcagcggatcggcgcgggcatcgcgatgtgcgcggtgacgctgctggtcgccgcgctcgtcgagatgaggcggctgagcgcggcgagggacgccgaccccggcgcggcggtgccgatgagcctgtggtggatggtgccgcagtacgtgctgttcggcgcggcggacgtgttcgccatggtcgggatgcaggagttcttctacgaccaggtgcccggcgcgctcaagagcctcggcctcgcgctctacctgagcgtcctcggcgtcggcagcttcatcagcagcttcctcatctcggccatcgacgtcgtcacgaggagggacggcggcaccagctggttcgacgacgacctcaaccggggacatctcgactacttctacctgcttcttgccgcgctcaccgtgctggatcttcttgcttacgtatatttttcgatgtcttatatttacaggagaaaggttgtcgatgttcaatgatccatggatcgatgcacgcaatgcgcttgtatagatgtatattaacctgctgaattcagcatggttataacagtataatggcaatgccaggggtaaaatattggtgtaaaattccctctttacctttattttccttctagttacaaataaagaagtgagaatcgaaattcattgcctgcactcttggtggtccgccctttaaaccgtagtacaagcacatcttctatcccttggattggtccggagataaaaaaaaaccattcagataattatgttgaacaactaatcggcctaatttgaccaatgcatttgtgccctcgccatgtgacagttttagtggtgaaaagttaaaactgcagcgaaccaccaaactaggtgatgattctcgtaaagcatggccatgggcagagcatggtgtcgccacgttcaagcaaataccgaggaacgtgatatagcccgtcttaggggaaaaaagaagtacatatggacaagcaagtccaatggctacaaactaaaaaacacgggcacacaacatgaatcttgattcttggatttgatggcattttcttttctactatctgcgaagtggtgcagcagaatccctcgagttcgtcaatgtcttccctcaagtgtgcttttttaaagttagaacgaacactagcgtggcgcctcctgggagtcatggaccatcggaaaagcctctgaaacattcgtggcaccaatttacttgttactggcatcaaatatgtcctaacatttttatcttgaaactatcttattcccagttcgatgatacgatgaattgctctcgcagcagcaacagaagggatctactagcaggaatgcaggacaacagaagtggtctctgcctctctcaactgagagaacaggatccggcaggaagcataaagcacgaaaagaactcttttggctgaaagctgtgtcccaaacaaattgttcatgggtcaaaagaagtcttaaatcgtggaaagttcagcattagtaagattttaaaaatcgcgtggagactccttcaatcatggcaaagtctcagaaattgatgggataataactgccagtagctcaaggcacacaagcatctgatgttctcgactctcaagccaccacagcataaaacgtgtaaagcactggagctaaacatacactcaaacagggatttggatcctctgatgcctacaaaggcagaggagccggatccctcaaacagacactggagctttatccctttatcccctctcgaaatagtaattcaacaccggataaaaattgccctgatcaaatatactgaagtagtagtagcaccaaaattccatgtccatacaaattctgatccattgcctaacattacgacggatgcagagaagccgtagagcatagcagagcagagctgacctactcgatcactcactcactcaccagtgtgaccagttcactcctcgagctctacgaccggctcgggcagcgtgggcagcacggggtagttgcgcgagaagcaggcgtcgcagtagccctccgcctcggcgccgtagatgctgtggagcttgccgagcgagaggaaggcgagcgagtcgctgccgatctcgcggcggacgccctcgagatccatccggttggagatgagctccccctcgctgggcgtgtcgatgccgtacaggcacgagcccaccaccggcgggctcgcgatccgcatgtgcacctcgcgcgcgccggcgtcgcggagcagccgcacgatcttgctcgaggtggtgccgcgcaccagggagtcgtccaccaccaccacgctcttcccgcggatcacgccgtggaccggtgccagcttgagcttcacggcgaggtcgcggatcgcctgcgtcggctggatgaagctgcggccgctgtagtgccaccggatgaggccctgctggaactccagccccgacgcgcgcgcgaacccgagcgcggcgtagaaccccgagtcgggaaccgggatgaccacgtcggcgcccgcggcgggggactcctccgcgagcgcgcggccgaaggcggtgcggcgctcgtggacggcgtgcgagaagacgacggagtttgggagggcgaagtagatgtgctcgaagacgcaggagcggcgggggcggtgcgggacgaggcacgctgaggagacggacatgtcgcggcggtcgacgacgaccacctccccgggctccacctcgcgctcgtaggtcgcctcgatgaggtccagcgcgcaagtctccgacgcgaacgcgacggtgccgttgcggcggcggccgagcaccagcgggcggaacccgtgcgggtcgcgcacggcgaacatcttatcggccgtcaggaacagcagcgagtaggcccccgcgaggcgctcgcacgcgtcgcagatgcgggacagcagtggccgcgacagcgacgtcgcgatgaggtggaggatgacctccgtgtccgacgaggtgttgaagatggagcccctcgcctccagcttgttccgcagcgcctggtagttgacgaggttgcgttgtgcgcgacggcgacctgcccgaacctgtacccggccaggaacggctgcacgttccgcagcgacgcggcggcgccggcggtggagtacctcacgtgcccgatggcggctggcccggggagcgatgccagccgtgcggggtcaccgaacacgtcggcgacgaggccgagcccggtgaccgacttgagcttcccgtcacccccgacggcgacaatcccggcaccctcctccccgcggtgctgcagcttctgcagcccgaggtagcagagcgacgacgcgtcggggtcccccacgaccccgaccagcccgcactcctcgcgcgggtggtcgtcggactcgtcgtcctcctcgtaggagaacggggtgacccggtcgggcagcagcgccccggccgccggcaaaaggcgcagccggggcagagcgagagaagacggcttggaggaatacctgagctgctgctgctgcttcgacccgtcggcggcggcgtggtggtggtggcggaggaggagaaggcgcgacgttgacgcggcggcggcggcggcggccattggtgagtgggggaaggggagcggcgcgagggattgggggggaatggatgggtttcccctccgagggcgaggtcaaggggcgggatttaaagagggttttgctcgtcgccgtctctccgccgtaggatgcgatgtacggtgctgaatacataccatcggtatccgtatcgtatctcgtacgtgtaccggctgctgttgcgttagaaaaaaaaaaggaattctgagtgcgtagtggccgagctcgaggctcgaggagaatgggccactgatgggtgggccctgctatggtggagtagtagtagccgcctcgagcgctagtggatttgaccaggccgtgtgcaggtcggcatatggcggcggctggtccatttccggtccagggttggggtcccacgtgtgggtactgtgtcggtttcagacttttcagtggacacacacgggtgtgggctgtcatgcgatctcctttttgggctggagttactgtgggctgccatgagacctccttttgggccggagttactgtgggctggataggcggccttgtcggagacagtcacggctcggcccgtcccatttgtttgatggacccgaatactgtcgcatattgctgatttgcagttcccctctggtaaagtgcaagatgacgttgaggaggtggatgcgaagatgcccgtcagcacacaccatcacttttcaccttatcacatcactaaccaccgctaactaaaactctgaaaacacactaaagcatagaaacacataataacactccagtccaaggaatcagtcgttagcacggaggaacaaacaccacgttagcaaatacgggaaaaaaaaccctccagtacagcgaagaagatgaatgacaaaagaaaaaaaaaaggacgcacgagacagcaagatgcagagacgaacacaaagcaccagcaactaataaagcaactactgttaattcatacggagtataccccgaacacgacttgaagagtgacgaccaatcggcattcgagcgaccggctctcacaagtgacaaaaccgggagcaaaaaaaaacaatggaaaaacacaaggcggccacgcgggaggtccatcggccatcgcaattgaagcacggcgatgggggtatctgcaggttgtcccgccccgcagggaggtggggcctacgactacgatgaattgggatctggatcgcggcagaggcggggggagcgcaggaggcggcatgtgagggggcgtgcgtgcgtgcgctgtcgcggtggtggagccgtccgcgagatcgtgccatcggtccttcaccgtggatgctaaccacgctgcatttatatttgctgcgtaaaactcctctctgcttcccggctccctgctacgcgcacccgaccgtgtgattgatattgatactgataagcagtgacatccgtctgtaaaacatacacactccgtcccataaaaaacccaatcttatttacgaacctggacatatacgtgcccaggttaatagctggggtttgtcttttttttttggacatagtagtatttttttcaacaaaatacgtactaacacgtaaaagaaaaacagaatatgtagggtgacaactttcatgtctaccgaaattccaccgagtgtatttaatggtatcgcgtgatctctctttacatgagaacctagccatagtacattctcattttaccgtcatcaccttttctaccctagtgcgtgttgtgcatctaggggtgggcagaataagaccgaaccgaagagaccgagaccgagatcgaaaaattcggtctcaactattgaaagaccgaaatatattcggtttatttggtcatgggccttaattaaccgaattgaccgaaataaccgaattaggctcaatagatctagttggtccaataaacccactaataagaaatcctaggggcaggtgcgtcacagcctcacaggcatcgacgcatcgtttcatccccatccatcctggagcggcgccgtcccgactcccgtctccatcccatccgcatccttcttcgctccatcgtcgggcgccgcttccgcctccaccgccggcgccgcctccagccggcccggcgccgcctctagccagcgtgccttcacctccaccgcctggcatcgcccccagccggcccggcgctggctccaccgccgggcgccgcctccactaattgttgatttgctttgcttttgctgtttttacaaatagttttgttgatttgctttgtttttgctgtttttacggttagttcggtctatgaccaagaccaaaccaaactaaccgaagaccgatttgctcagtcctgagatttgttggagaccgatcggtcttgagattacaaagaccgaattttaaaaagaccgagaaaccgaaccgaatttttcggttagaccaaatacccacccctacgtgcacccgacactattggttcaatggcacacacttccgttaacaaactctatggacaattgtaggttggacatttgaaatgttgagtaaaaattcaagatcaacatatctttaattcaacccaatggcctactccctcaatcccaaaaaaagccaatctcccctcctagtacaacgaatttggatagccctttgtcacatcccctcctaggttgtttttttttttgggatgaacattatttaaaagtctgaactttttttatttaaaagtgttgtggcaggtttgttctaaacaacccggttacctccggcatttccgtccttggtgcccattgtgagtacaccaagcaaaatgtccatgcaaattgaagaataagatactcatttccacctcttcctctcaagttattacacttgtttccccccatttccctccaaccccggacaccccgcacacgtacgaacaggccacaaatcctcaaatatcggacagcgcagggatcgaacgcagaggaaatccaaaatccaaaatccgatcccctcgaaccaaagaattcgaagcgcgcaggcgggcacacgccccaaatgcgccggcggacgacgcgcgccgccgcagaagcagcacggcgccgatgagtcgcgcccctccggacgccgccggcgacctcttcgccgccaacctcaagggctccctcctcgccgtcgcctcctccgcgttcatcggggtcagcttcattgtcaagaagaaggggctccgccgcgccggcgccgccggcccccgcgcaggtccgccggccttatatttttcttggttctcctggtttgcagcctttgggcagcgcctctcgcgttcttttggtttcttgggcgttgttatgaggtcatgtggcgaggaatgtcctaaaggcgccccattttatggccaatctggtgctcttcgtcaacgatgcgctgtaatcattgtttgttcatggtgaatttcaggtgttggaggctatggatacctcttggagcctctctggtgggttggaatgattacaagtaagttcttgctttcttaggttgcttatttcttgaggggctagtgcaaaattattcgaaattcttgataattttttttccgaatttcgtagtgctcattggtgagattgcaaatttcgtggcttacatgttcgcaccggctgttctggttactcccctcggcgctctcagcataattgttaggtacaactgggatgtgttccctttgcttgtaaaatttcctggttagaacccatggtttgaattagttttaatctgtccatgcacatgcgtggtgaatgcgtaatctttgtggagcagtgctgttctagcccatttcatcctgaatgagaagctgcaacggatgggagtgctgggctgcgtgctctgtatagtcggatcaacagtgatcatccttcatgctcctgaagaggagacaccgagctcagtggagcagatttggcacctggcgacacaacctggtatatccttgtagtttccctttgtactttattatcgtcagtcatcacaattgtactttgtattttctgcagcctttctttgctatgtggcctttgcactggtggtctcactgatcttgatggcgcattgtgctccccgctatgggcagaccaacatagcagtgtatataggaatatgctctgtgattggatctctgacggtaagtgatctctatggactatgaaaatgcctttgttgttagcttggtctggtgtttaataggtttgtttatcttatttttgttatgctaggtaatgagcataaaggcagttggtattgcaatcaagcttacaattgagggcataaaccaggctggctatttccaaacttggttatttgcaactgtttcagctatatgcataattatccagttaatttacctgaacaaggtacacctgtagtcattttgtttaggtaacagaaatattgatgttaatttgcatgttcacatcatgataaactttcaggcactggacactttcaataccgcagttgtgtcccccatctattatgcgatgtttacatccctcactattttagcaagtgccataatgttcaaggtatgcaggttttagtaagttccacaaatgccagttagtttaagtccatttactagaacaaaaatttgagaatatgttttatggtttccaggattggtctggacagagtataagcagtattgcttctgagatctgtggatttcttactgtgctttctggtaccgttgtattgcattctacaagagaatatgatcaaactatttctccaggtaattatttctgagttttagtcaatcaatgcttggctattcttatatgagaagatgaatatttgttctgtggtacatcatgctgataatattattcatgcaaacataaataagtggttttcccaaagttgaagttatttagtcactgcagtttgagtttccaatctccttttactagccttgtggtaacaaagctggtgtaagttgtggttgttgagagttggtgctttactttagtattaaaatcactaccaatttgataattcctactgaaaattgtttggtttcttttagcagtgaagttactttaatcaaaagtcaatagtattttgcctcaaggagatagacttcgttctgttaacagtagttgtcataggcttactcattgccttcatagttatggatcaagaaagaaatggcctgtggattgaaaagtattaatcaagcctactatttatggtgtcttggcatatctgtccttttcaactgatttaaggcttgcctctagatagttatacaatgctaggaatccctcactttttttagtgcatgttctttaaaaaaaggaaaagtaacggcaatgggatttctccaagatattactagcacttcacaatgtctatgatattataggttacccaatactgttatcatatatatagagtggtactgtaataatttcctgtttttatttttttactacagacctttatactcctcttcccccaatatactggcatatccaagggaacggtgagacggtgaaacaaaaagaggatgattcactctctgctgacttcatcaccgtggtgcgacaagattactttgtctaaagaatagagaccgtcctgaatgctcggtaatctcctcaatatcgtctttcagcagtgacaagaccaaatcaactgcaaattgtaggattgtaggattagctcgtgcatgatcatgctgcatccaagccaacaccctccaaaggagcatcgaagcagcctggcttttttttgcccatttgcacgaaacaaggtcttctgcttgtttatcaaggtggtgtgacatgatctgttatgtgtatctgttcctttgattcgaggagcaagtttatgaggctgctcttgctagtttgacggatgtttttttggcttttagtttttgaggtttgtctgttgatgcatgtatattgtacagtctaaatgaatgtaagaagctagatctaccctctttcggtgaggttgaaaccattcatgtagcctactagcggttgctcaccatattagcgctgcagagtgtgaaactctgctgttacagttcacattggcatagcattgagagtcttggtatttacttacagtgcacattagctctttaagcttttctgctgctgtcctattcaactcctgacatgtaataattactgttcccgtgcaaatattgctgaaacttgaaatggttattgctgctgtgtgctgtccaggaaaagcacaattttgctcatctattctattatatactaaaagtctattaaacttcctacaaacgctcttaaaccgccacatggcatcctacaaacgctcctaagtcgccacatggcatgctaataaataatagaaattcctagaaattctaagaaaaaaacaaaacatctgtccatccgttttcattaaaatcagtggacccaatgtttcaagccgtcagatttatcttaaaaaaaaaagctttccacctccacctccttcctcccacacgtaacatcactttccctttatatgtagtcacgtataataaatatataacaattgatttacacatgtacaggtgtagaatagattagatcaaatcatattaaagtaattaatccctctcttctaatctcatgtgtatttgcgagagataaataaatatatactattcatccggagaaaatatatgtatgtatatatgcatgtacatgagactattatttggaaaaaaaaaaagaaaacatgcatatgtccgtacataaaaaaaaccatattttcctacaaatactcataaaccaccacgtgtactcctaaaaacacttctaaaccgtcatgtggcactctaattaaccggtggacccactattttagatttttcagctattagatttacaattatatagtggacctgatattatacgtcattagatctatttttcaaaaaaaaagaaaaagaaaatagcatcgatcccctcccatcccgcttaagtacatttccatttacgtgaactccatctgtgtacgccctcccctctgttccttttctctcctattttcatgattttcatgctattttagttagatggaaattagaatttataataatattttttctaaaaaaataaaactaaatcactgtccttttgtagaaacggacgtatgcctcctccttcgtgttccaaggccggtgtccaccctcctttttttatatattatttaaattcaaactagactgaatatttttaaccattaaattattaaattattattattatatcaaatagatttttaaaccttttgattaacaaaatgcactaaaattagaataatttaagtagtttaattagaaaatacagcacccaaagtattttaaattagatctaatattaaatgtatttataaaaatagataactctaaattatagtgcacattcgatctattttaaaaacagtaatctcctcccatcatcctgtctttcgtaataccactctcctcccactctggctcttgcatcctctcctctccaatgcaattatcgtctcttttattttttttctaactaacataatataaaaatagtcataactattattttatttataattaaacattcattagctatattttgctatataaaagttaaaatatatcatttgaaggtggaccctatcgtttgcatgaacactaaataaacacgaaaattaattgaaaatatgtatcgtgttatactaaatcattgtacacaattaaaatcaattaaatgccctcaagagtgttcgtaagtcaccaactacataattaaagcaaccataagctacatatatggaatactcctatgctttttaaatctgtgaaaccattatttctaaccattagatctatcttatatataaaaaaacaagcgtgtattcatggtacatcacattttaaaaatattactgtgtaattatatttcgtcgttatcgtattcatgttaggttgcgtggagcctctcactcactctatatgaaatgaatgttcaatggatcatctctcaaactacatcaatcattttagtctatataaacctgtcccacccaattcatcctttagtacactatgataatatatatgcaactaaaaaaagaaaaccaacttacttttactgacatgttttctaaagaaaataagtctaccttctttccaaatgatgaagaagattataaataattgcttatagatattacttaaatatgatttaacataaagctaataggttataaacttataaaagcaattaatgccatgaaaacaatttatagagaaatcatgagaggtgttctccggttaatatttcacttttataagtatcttaaacttagcgtacgacacatgcccgcgcgaatgcgcgggctaccttcctagttcaaatttaaaacacataagttttctacagtgatgtgcaattgccatggttttattgtagaactccatataatcgtgtgcacagaacactgataaccatttcattctcctcaaatatgaccagataattgttcagaagctttatttaaccctttcattccactcaattaggaacaaaccaatcaaaaaatttacatcaaactgcttatataagtacttgtaacctacaacgttattaccaaatttttttctactacaacttatcaaatcagatgctactctacattgtaccctatgagaatgtgttctatcttgatgcggttcctttcaaggctcctctcgtgtcgtcttccgccatgggcggcacgggaggcaacgacccggccatcccttcaccctcacctccctcctccgcctcgccaccgcccgagtggccaccagcaaagccgcgcggtaacaaggacggcggctacggggcccctctctccttgcgctccggtgaactggggagtcatccagggaggcggcggcgataaccgccagatcctcgccgctccggccggatctggcggggacagggacgacgtcgacggcggtggggatggcgatggcggtggggatggtgatggcggcggggatggcgatggcggtggcggagtttgcggatccggcgacggtgcggcgtccgacagtggaaggatcatgcggcgtcggtggcctgtccatcgcccgatgctgccgcttgtggcgtctgctggcgatggtgatgcaaggaggacagccggattctgctcctctaggtccagatctggcgcgtcctcagtcggaggtcaggtggtgtggagtccggtcgtcgtgcaggtggtgtgaatagtgccgatacctttcggtgtgcagttggcatttgggagcttccgctatggatgctttggttaacagggtctccgaggtgaaaaccttgctccgcttctggtgctagcaacggtgactccctcgagtgccgttctccttctttaaggcgttgcttttggagccctcgtttcaactccacttcaagggaattctccgggtgaaaactttagattcgttaggatcggaagttgccgtcgttctgtcggcgttaccttcttgaaggctttgttttaggagtttcttctctttgttggactactgttctttggttcagtttgtcaatgccgggttttcaccggttttcatgaaattaaccgtgttgttgtaagatttttgggtccagttttccttataaactggatcgactatcttcttctatagtgaaattgcaggagctccctgcatgtcccctcgaaaaaaaagaatgtgtttgaccatgaaaaatctacggaaccctaacttcagacgacccatctacagatatgcaccctgctcaatagagattgcttgcgtccgatctatcgagccccatcaagaacataggcaatggaagcatgcttggctccggcgaaacgaaggacggtccagcgaactctggcgagcgaaacgaagcatgctcatatagtccttttgctcccgccagggcccaagtcttggccttctccttgatcttggtcaccacgtttgccgctaagagttctttgtgcctaaagactctctggttttgttccttcaagacttcccaggccgttaggaggatcagggtacgtaatccttttttcggcacccccttggtggtctctagccctatccaccattcgtgtaccgttgtagctgggccccaactttccggtatgatatgttcacgggaggtccaagccaacaacgttctccaaattctcgtcgtgtaccttcattccatgagaaggtagaagatcgtctctggggtatgcctacaaagcaggcaataggtgttgttcggccatccgtgagttgccagtcagtcagatgtccaattctattttgcaccaccagccaggcaaaaattttacactttttaggtgcccaaggcttccaaatgatcactctatagtttgtactggttgaagttttgtacgccaatgccgccgtgtatttcccgtggtttgtgaggttccaagtgacgtgatctatctcgccgtcggtgagctgcattccttgaattgcattccatacaactgacataatgccactagctgagaggttgaggtcttgtaatggcaaatagttgctttgaagtccatgtgtgtaaatagagccattttttttttgaaaattttgcacagccatagttgacatgaaaaaaacggaaggacgttcaccccagtgcttaaaagagttccccccccccattttattgttgtacagtagaattgtgaatcggagtcagtgcttcattcaacataccattttacatttctttctcaagtatagcatctcaattgataagaaactatttttgacttcaccccagtgcttaaaagagttccccccattttatggttgtacagtagaattgtgaatcggagtcagtgcttcattcaacataccattttacatttctttctcaactgtagcatctcaattgatcagaaactatttttgacttcttttcagtaaataagaaacaaatcagtaggtgaacttacatcaaactgcttacagaaatagtgacattcctgcagttgcagaagtagtaaacaaaaacctactgtccatgcaactgagatgctactgctgaactgcattacaacctgaagactcttttcgaacatatacagaattagggataaaggacttgacaatgtgattgagcacaactgcacaagaaccctattaagtcctaatgatttatctacagacatgaaccctgctcagctcgggagctagctttcctccattgcttgcgtctgatcggttgcatgctagcgagccatcaagaactttgggagaggaagcatgcacggctccggcgcgacgaaggacggtccggcgaacaccgcgtgccgtggcttgctgatctccttgttcgtcgtcagcctcatggtcatggcggcgttgcggtcctcctcgccgtggagcgcgtccgcctgcagccacggcttcttctggatgtcccagcgctcgtcggaggacgcgcggctcgacgacgtacgaccgcacggcgtcgggagcagcgcagggagagcggcggcggccacgaactgcgccgagcgcgccatctctcgcggcgaagcgcgggagccgtgaacgaacgaacgacacagagcccgagcttgcggagaagaaggtgcagttcgttgtgggctcggaatacgacggcccactcggcccagtacgggcccatacaggcccatctaggacgaggagtaaatccacatctcggcggagatccaacggccaggatgggagcaaatatccactacactgttttaattggagcccacccgtttcggctatctcctccactatccccccctcgccatggcagccgcttccttggctccgcccaccgcctccttctcgccggcgccggcgccggggagggttaaggcggcggcgcctttgctctccaggaggcctcccgggcggttccttctcagggtggctagcgaatcctcctcggttcgtagaccactccaagctcccgattgttttacaaccgctgtttccagtggttcttgtcttgtttctggtttccactctgctgcgtggatttggttcctgtgccggcattggggttggttcgatatctactgtgtggataaatccctagctccggggtccggggtcttgtcccgcttccatttaccctttcttttactaatttgcgtctgtttatggcaattcttggtttggagcaaagctcatttgtgagtagtaccatcctgacatttcgctgctttgatcgtcttatgcttgtatgattagatttctggtgacacgctgctgggattgtatgagaaagagaggttaagccactcgctatatgctaacgaagattacgacaaagagatgttctgggacaacttggatgcggatttgcgctactggaccagatccctgcgcccagtgcaggtatatataaggtgtgctttagtggaatttaacaagcatatgtgcggaatcttgtactagctctaatg

SEQ ID NO: 117 - DNA, 5106 bp, Oryza sativa
tccgagggagaggagcggcgcccgacggagtgtagttgggcggccccttagtccccgcccccgccgccaacgtggcgctccccttcccgtcccggtctcccctgccgccctcgattcgctcccctccccttcccccgccgaccgccgctcccatccccacccccgccgccgccgctctgaaacgagccggtgttcctgaggatgaaatggctaacctaaaaaggcaactagcgccaggaccttccacagctccaccagctccaagcactgctactgctcctgctaaccggatgatgaactttgtcagtgctggagtgcaggcataggctgagagcagcagcaggcaacaacaggctgctgctgctaacaatgaggatatcgagctgcctgatgagagcgacgaggaggaagacgatgaccaaattgcgaagaagagtgttcccgctgcggtgtttggagagcttggcaacagagctgcagagaacagggaggaggaaagctctggtgcccaggagaatgggcagcttggcgcccttgagaggatcaagcgaaggcgtcaatgatctgccactgtcaagatgcccacagagctggtgcccttgtaacaacttgtaaacatgattttgagtggtgtttttgctcttgtacaagaatttacgggagttattaatccgttattgatctgcgaccattttttcgtgtactaactattgggtacattccccgctttttattctctcttctaggctagaaggcaatcatgcattattcaattctttttcatttttgcgaggaaacattatttgatttcgagagtgtacactgctactggagtgttgaaacctgaaaaatggaactaggagacttcatttctgttactgtctcatgtggtttagcctttcatttgcaaagttattggttgagctacggttttataaaccgagtaatataatgatggtgatatgtaaacaaaactagaaatttcgttaactcggattattcgaagtgaaccaaaatagtgtattcctttgatcacaaaataaccatcacaaaactgtcagaaattttgaacatatatttgcaatttgagctctgaaggtaatgaatagtggaaaagaaaacatgtagtgaagaaggccagaatagaggaaagcatgtacaatttgatcacaaggtctctcattcgtcgatgggccggaacacctcgagcgactcgcgcagcagttcgtcgccaatggtgctcaccaccttagccgcgccgatggccaccggaaacgtgaagccgccggagctcacgacctgagccggagccgggcttcttgccgcggtaagcgcttgcggtggcggcggcgacgacgccaatggcaccacccatctggagcttagtagtagccaccgatgcggcagactaggcgtggccggagagcagcccggagcggctggtccagctcgcctccgacgagcacgccacggtgcgcccgttctggctagccgcgtccacggccatctcctgccgcggctgcctcttgtcacactccttcttgacgacgtcgtcctgcgtgtcgttgacggcgccgcctcctccctctccccagcgttggcgtcggcttggcggtggtggcgaggcgggaggaccgtgtcggcgtcggcgctgggagctagagcggcaggaggcagggacaaactgcgttgcactccagctccagccccggccccgcccgccgccgaacccgatcccctgctgcttctgctgcgttgtcggcggcggcgtgaggatcgtcgacggcagctgcatggcgagacgtggccccaccgccatcggcatcccccgcgtcgagcccagcggcgcgcggtggaggaaaccaccgccagcgactccgctcagcggccggaaagaggcgaagaagaaggcggcggcaacgaggacggcggcgttgcctccccggccgccggaccccccgcgccgcgtggcggcttcgtccccactcgtcggtcgccctgccgcttgccctgagaagagagagaggatgggaaataagagagagatgatgacatggcatcttacatgtggggtccacacgctgactcagccgtcatgtcggataaaaccggggtcaaaaccactgaaggacctcaagcaaacggttttcttagttgagagacgaccggtatccagtatctgattttatggttggaggatgattttataacttgatgacaagttgaggaccttaggtgtactttttccaaggaattaccttaggagacatccaggtggtggcaatgggcagaaggcccatccgacctaggaagaagcggaattttttttatttttagattttttttaatatttacagaaataatctatcggtcaaaaaaattataaaaatagatcctgctgtccaccacttgggcggcaagctgacgtggcaaacgggggagggacaggcggtgacggagggagggttttttgcaggaaaacccttgccgccctctgttggggcggcaaggggtcccaatgcaaaaaagccagccgggaccggccattttccaggcggccccttgccgctctctggtcgggcggcaggcctcgctgcctataaaaggcatgccgcccagcccctagccctcattcctccccccacaaatctagtaaaaaaaagaagaaaggggaggagaagagaagaaggggcgaagccctgccggattcacacgccaatttcaggtaatattcattgatcctatatgtgactattgagttaaatattgtgtattttttaaaactttgtttgaataaatgcattatatttttagggttttagttgtactaatctagaagtgcgtattgtagatatcggtaactacgtagatctgctagtttggaatcagtactttaccgttgcattgtcatacacaaggagatattacgttgtaggtgtttattgcatgaaagaataatatgatctagttatttcgttgacagatatgtcgaacaaacaaatattccaagtttaccatggcccatgaaacgtccgttacgggccaactggggtagatctgtcagaatttattgtatcagaaaggggaattgatagaccggctgagaggagtgtaccttctataaaaggatggttaatgaggggcttgagagttgatccacagacaagtgacataacaatcaatgttatagtaagtcgggcaactgagggtttttattgggaactaatgccagttcaaaactctcgagtgtggagatggtatgtggaaaatgcattgcaacgtgggtggtctctagctatggttccgtttgttcacccgaaggatccaggtgtgcagatgaacatgaatgatggcgagggaccaagtgctgaagtaaatgagacttttgtggaagaggtcaacgcatgagaggacgggggcgtagtacctccagtgggcattcaaccaagtggagtggtcgacgagggggagactgtcggtgccattgtggatgaaatgaagagggaggattctgacaacgagcgtgtagaggaaggtgattcgtcagatgatgagacggataatgaatacgttgttgttatatgtgcacgatacctttcgacgcatgcacgatacctttcggcgcatgcacgactactttctgccgcaccgatgcagcctcctttattcgagtgcgatacgagtatttgcccgccatttgccgcatacgaccaatgtaactttcggcgccaatcaggcgtacccaccatgccccgccacattcacatgtcagggatatcactcgatttttggtgcctatataagtcgccttaacgagcgaggcctcacaatctttcagaactcagtcacattcagtactttcttccccacttgcttcattacaaatcctaccggctttcgtcaatggctagacgcctgggcgttgaggatccgaactggcgtagcgatccttgtgtatacctactaccaccttggtgccagcgtcctctctgcctatgcagtgatcgatgccaactaatggcttcgaggaatcctgatattcgaggaaggtgcttttttaggtgccctaactatgaccgtgaggtattttattatctgcatatgcttattcattccgtatgagcaatcgttttattcttcgtaacactactctattcggcagacccgcactacggcttgcgcatatatcaagtgggtcgatacagaaaatcccgttctcgacctaaccacttgtttacaagaaggtcgctggtatttcgcatccgaaagtactgagcaatacttgcagagaaaagcggcttatgaacgacaatgtcatgaacaacggtgcgactagcgggtgctaactacggcactccctccatgggaagcccgtccaggatgcaggtgtggtgatcgttgtcaagttcttcgttccataaagcctacaatattgggtcgaaggttctttgtttgtccaaatattcttgacgacgatttcatgataagaatattttgattacatgaatccttattttctcacaacatttactaactttgctcgcttcatatctattctttcctcccaggaaccaccaaggagatgtcaatatagagaatggatagacaccagaagggttctaactccacctagccgtgttgtgcagcttgaactaccagagcaatacagggttactaaagcgcggtttgagagaggagagggatcctcacgtaggggttagctattatcggacaacttggcatactgaaatttctactgtcatgcttccttgtcccattactacatcgtcgttgtgttcaactattgcactacctccctcctagttcgaatctaatatcatctatgtaaccgcaatggaaatagttgtatcatgttcaaattgtactactatttcttcatgttacataattctccttgtttaaatccatataatgtttctacgaccgagactgcgataggactatatcaattctccgagtactaatacgtcaaataagttacaaaataatatcttacttaacatatgaaattacgaaacaaccaacttcaatacatttttataacaatattaacaagttttaccaataaatacttctttaattatt

SEQ ID NO: 118 - DNA, 600 bp, Oryza sativa
tgggccgccagcccatattcctccccctccccgctgggccggccgaaggccacggcccagccggccgcccgagcccccctcctctctcccagggtcaccgacaagtggggcccacctgtcgggtcctcccccaacctccagtcgccgccgcgcatcccgcaaccaccggcgccccctcgctcccgtgcctcccgggcaacgttgcccacatcgccgcccgcgcccgccttccccgcgcccactccctctctttcccgcccgcgcccgcgctcgagacgtccaggattcaatttttgaatcccgcctctctctcctctccccctctccccactccaccggcgaaatcgcggccatcccggccacgatcaacccttgcgagcctatataaagcacccccgctctcccctctctctttttctccattttcgccgagctctcatgtgccctctatcgccctagcgccgtcggcctcctcttcaccgctgtcgccgccgctccggtagccgctagccgccgtgccgagccgtgccggtgccgccgtcgggttcgcaagcccaagggccacgccgtctggcttttcggcaccgcttttcgccgcgg

SEQ ID NO: 119 - DNA, 2318 bp, Oryza sativa
agggtcctgtttggatctcctggtaaaaattttcgccctgtcacatcgaatatttggatacatgcatgaagtattaaatataaacgaaaaaataactaattaggcatattgcatgtaaattgcgagacgaatcttttacgcctaattgctccatgatctgacaatgtggtgctacagtaaacatttgctaatgacggattaattaggcttaataaattcgtctcgcggtttacatgcggattctgtaatttgttttgttattagtctacatttaatactttaaatgtgtgtccatacatcagatgtgacacgccaaaactttacacagcctagatcggacggacgaaaagtggatgtgacagaaaaattactacaggcctgtttagattccctggcaaaattttacaccccatcacatcgaatgtttggacacatgtatggagtattaaatataaacaaaaaaaactaattacacagattacatgtaaattgcgagacgaatcttttaagcctaattgcgccatgatttgataatgtggtgctacagtaaatatttactaatgacgaattaattaggcttaataaacatatgctaatgatggattcattaggcttaataaatttgtctcgtggtttataagcggattatgtcatttgttttgttattagactatgtttaatattttaaatatatgtccgtatattcgatgtgatacgccgaagctttacacccatgtcgtaaacacaaccacgttgatttggcaatgcctcttcggattctagcggcctgcgcttcggaatcggactcgcacgctctccgatctcgagttctgcttcttctcgagttcccaaggctttttcgcctataaaaccaagccatccgtgaggcctcaacgcggcaaccccatccaaatcactctctgcctccgctgctttgatccgaggagttcgccgcgaggctcgccgaaaccctagaccggtagacctttcccctccgatcgccggtatcaatggcagccacggtcgctgccgccagcagccggaagcgtgggttcatggacatccttgacgacccgtgcccctaccgttgcgccacctggcgaagcgcggccggagctcgtcttcgccgcctccgcggctgattagatcacaaccggatttgccacatcgtgaggtgctgcaaattaaggtgaaagattagttttttttatagatttggtacttgtttatgtgtttccgcttccacctttataatttttgtagcgtcaaccttgtgtttgcattgtgttattcaacggattcgattatgtttccttgtgaagtaaaacaatggaaaactgattatgttaagtgtttatgtaagattggatgcttgggatttttgtccgtgtataatacttataattaatgtgtataatacttataaattttacacaccaacacatcgaatgtttggacatatacatgtagtattaaatataaacgaaaaaaataactaattacacatattacgtgtaaattatgagacgaatcttgtaagcctaattgcgctatgatctgacaatgtggtgctacagtaaacatttgctaatgacatattagttaggcttaataaattcatgatggattaattaggcttaataaattcatctcgtggtttacaggtggattctgtaatttattttgttattagactacgtttaatattttaaatatgtctccgtatattcgatgtgacatgccaaagttttacacttgatgtaaacacaatcacgtcacgatttcgcgatgcctcttcggattccgagccgcagtggcggacgtaggattttataaatggggtatgataaactaatctacttataaaacaataaattatgtaattgttgtacaatattttctctaaagaaatataaaaaacccaatatatcataaaaattagactagaaataaactaaatcttatttttatctctagatcgcattgtaatgcattgacatgtaactagtaaatatatatataacattataataattggatttataacaagtgtcaatctctaattcatccataaaattttttatataattatatattgttcaatattataaatctttatagcattctagattatgtttaataaaaatatctttccacttattaaaaaactagtcaggtaccttatataaatataataatattaataaagataataattattgtttacacatgtaaaaacatagataattgttaacgaccaaatttggtaaggccatgggctgggttcaaagctagagtcaaagccagatttggaggaa

SEQ ID NO: 120 - DNA, 3381 bp, Oryza sativa
ttatttgaagcatatcttgctctttatcagtctgccagtccatcttacttgctagattgatctgcgttttatatatttcatttaccctgttatcttagtatagagtcgtactggagtactagccgatacatgctaggtttgctgtatcggctatgctgcgagcatacacaatctttactttgaggcacatttagatattaagtgatttatattatctcggcacatcgtccgatctattccaatcacttggtttaaatgtatttcattagatagactgtgtatcgttgacatcttcaaccgatcgagtagatctaataatctctacgctttatcttcccttgccgatctgatgcaagttacatcgacttggctccaaacgatatgtcattgtcaatccagccgatcggctatcgttgacggatttaactttgtccctttttatttcttgttggttgcaggatcaaaccaactggcacactcagaacccgaaggtaatcgctttggacctgcactagagttaagcagatctctcaggccagtgcgtgtttttcgcgtcaacaataatatatattacggagcgcacacacatgagttagctactaatattcatgtgcaaataatagtgttggttgtggcaatattattataaaagaataagaatgagaaaacaagaagaagatggaacaacataagaatataaggttaaagttttagtttcacaccgtattacgacgaagaacaattttaataatattagtatattatcgattaatgtgagcatataccataccatggatgtgagtaacttttccccacgtgtgtttgagctagtgactaacctcctctttttcttaccttcttttgaagttctcctaacgtgtttgataaaaaaaatgttttgttttgaatgagataaacaaacaatttgactagattgttttttagagagaatccattgtgtgccgttgactttgtccctgttctataatatgccactgagtttgtcaagttatacaatatgccattgtactttgcttatcctctataatataccgtcgccgtccatttagactccgttagttcggtataattttgtcataatgaccgaaatatccatgggacggaaattctaaaatttggcaaaaaatccgaaatgtcattataaacaaggcagagaattgcgcatctcaaactttgttacaatctgatatttgtaatttttcgtcctaggggtatttcggtcattatgtcaaaattgtacaattctaacggaagctagacgacgatggtatgttatagaagttaagcatagtgcgatggcatactagaacttggcaaacctagtgacatattgtagaacaaggacaaaatcagtaacacacaatggattctctatatatttttttatggttgttcagttcattacctatctactattgtgcaaaatttttagaaaaagttaaatagtccatatcttacacattaaattacatgcatataatataattttcgcattatacaatgccctattcacattttataggagaaatataaaaaatgatttattatctatttaattatgagaaaaatattagtccaaattaatgtatatgtagaaaaaaatttaatatgatagaattatggaaatgcctactgatataatcattgtatatcacgtagtgagaaaaggagaccagagtcgaatgctttattgttgagcgtaattgatggcattaattttatcttttttagcttaatctatctaaccataattaattaacccgtgttagtagaagtccatatcttgatgcatcaacatatcatgagattattagtaatagctaagtacaccgacccaaccacacttagtatatcacaagactgtcgggtaatggacaactcatctttaattatgctaaagacttagtatatcacagtagtatcgggcaatggacaactcatctttaataattgtgctaaagaaaaaaagtaaattatagttcgtactatgtattcttaaaagttttcatactatgtcatctttaaccattcttttcatttacaaaagagctaactttacatttcaatttggaccaccctattccatccatatccaagtccggtgtgacgacgctctctctcgtggcccgatcttctgatgagggggataactctcactttgatcgagtgcgacgtttgcgatgtggctaccaaccagaacaagtctaggacgctgtgcaatcgctacaccataaacgatgtcgtaccaaccgtggcacacggttgatgatccctacaatgcaaacgagagaacactacaagaacaagataagatgcaatctaaatattgcgaataggtaattaagtacaaaggaacgagttgcgattgaagtggtagatctaatcgacccggcaaatcaacacaccaactattgggggctctaaatttatagtcaccgactaatcgagcgaggactagagacaaggtgaatggcacttggcaaaattcaactaaacaaaacccaatttttctaaagggtgtgcatagacatttatagaggaaaatagatctagggttatgttctaattcgtggaggtggacggagacacttccgagatgggcctagtctattacaaggctgaaagcccaagttcggtttcagcaacaacactgccttgttttgatgattcccgttgactcggaatgaatttggatatgagactggatgcatttgaaaggtaatgagataagctttccatcaagtcgaagatcacccaaatcggagttggcatgaagatgctaggtctgtttaaagttagtgttgtctccggagaccgaactatattccacaactcattggacttgaatatcttgtagatcctctattcatccgatacattctttgacaatgttttatatttcttatgcttggttacatatacttgatggtcacatcacagtgactcaggaaccactccgcacactaactctctctctctctccattttctttttccctccaacaattggggaaccgctatattcagcaagaaggagcccaaatctagtgtcttcgctcttcatcgggtcgactcctgcctcctccttgactccctgtgtctctgtaagaccgacaccaccgaccttaatggcgaccataatgatagtgtgcatgacgagaggggacgagaaaaaagggtgacccatggaggataacttgagggtgcgattgcacatgcaaaggcggagatgagcaacgatggtggctcatggagaaagagcggtggtggcgatgcgtggagtgatagttgttggtggtacgaggagtttgttgtcgatacgatcgctaatcgagtttgttaattcttgatacgtgggcaa

SEQ ID NO: 121 - DNA, 2188 bp, Oryza sativa
ttttggtggagctgaaactgtttggctgaactccaacttcaggaggggtggaaccggagctggagctgtgccaaacacgcccgtatgtttaatgacaaattcttaattaccagtactaggatgacaaatcattaaatattctccgaatagaatatattacttggcagcgtagatgaaaaacaaatctcccgtctttttatcttcgcttcctgccctggcaaaaacaatggccgctgaacagaacaagggacaagggcggcgatcttcatctggcgagcaaagcaaagcagattcatctctctctctcccatcgtgactacttttggctggatattgtttgcgttcgttcgttaaccctagcttctcttcgagagctggaagaggctcttcttttaatttcagagccttaggccttgtttagtttgcgaaaattaaatttttagttgtcacattggatatttgaccgaatatcggaagatgtttttatacgaatgaaaaaactaattttataactcatctgaaaaccgcgagacgaatttaaggcctgttcactttgatgctattttcaaccataccattttttaataaagttgtcaaaaaatatccatgtctagtttgttgccaaatttaatcaatacataagaaatcctgctaaaattttgacaatattgccatctggtaaggtttattttgactacaatctgagcagacccttattaagtctaattaatctgtcattagcttatgtgggttactatagtacttatggctaatcatggactaattaggcttaaaagatttgcctcgtgatttccatgcaaactgtgtagttagttttttattttatccatatttaatgctctatatatttgtctaaagatttaatgtgacgtttttaggaaaaaacaatttgggtactaaataaagccttaaccttaatacaagtaacagtttgttttttccccccgaaaagtttggggctcaactgaacccccatgtcccaagttggatctgcccctaccgagccgcttcggaatcggactcggctctccgatctcgaattcccctggctttctcgcctataaaagcaagccacgcgggccgcgaggccgcaacgccggtccatccgaatcactctccgcctttgatccgaggagttcgccgccggtacaccctctcccctccgatcgcccgcaccaatggcggccacggtcgctgccgccagcagccggaagcgcgggttctcagtcgcagacatcctcgacgacccgttccccctcccgtcgcaccacctggcgaagcgcggccggtgctcgtcgtcggccgcctccgcggctgacctcggggtgagtttggagttcgacccgatcgaagtgctgcagctcatcttcccccatgaagatccgcaggtattgcaggattcatccatcgatctttgtttaccttctgttctgttttttctggttgctctgttttttttaagcttcttcaccataggataggagcgctattcgatcacgatgtagatgaaaggattgtgatttatgaatgaatcatcagccgcagaaattagcacgcatctattatttttgtgggattcatgtttgcacttgcacaggcacttaattagtaagtagagggttaagacttaagaatcctgattttactgatgagactttagatgttacatcatattggtattgaatacgattcagcattgatcattgtgtttgatgttgaatatgattcatcattgttcattgtgtttgtatctaatttgatctctgtgccagtttgtctgatactgtattttttttatctctttttgaatttgtagctcctgaagagcttttttgaagcgtccggtaatgtgttggacgctgcaattaggggattcaagcatcgtttgcaatctcatactgatactgagatcacagaggcggcttccggtgatacaggaaacgaggtggtctctcctaaaggtatggtaacatttgttttcctttcattcatgattacccttccagaccaattagttaattttgcggaaatctgaaactctcttttactgatggttgttgcagttgaatctgatttgtcagcgatgaacatcccatccaatgggtctgaatgggctgagctagttgtcaaggagatgtcctctgctctagatttggttgatgccaag

SEQ ID NO: 122 - DNA, 1211 bp, Oryza sativa
tttgtcagcgatgaacatcccatccaatgggtctgaatgggctgagctagttgtcaaggagatgtcctctgctctagatttggttgatgccaagaaccgagcctttaggttacttgacctattcgagaaatccactgcagcatgtatcagtccagttgaaatgcggaagatgcgcgaggtaacaaatactactccatccagttataataatgtcgtcttgaattatcaatatcttccagttatgaaagttatggaagcttgactgatcaacttgactgatacttccaggaacacaagatactgaagctgatgttaggaggccttctcgaacagaacggtgtcctgaagcgcgcatttcttaaacagcacaatcggctcaatgattatgaaaagaaaatgtcgcaggagcggtcgcagattatcgacacgtacgaaaaggagataaaggcgctacaggtttgtgcgtttatcacaacattcattaattttcagttcttttatgttatttctaatgcttgttctaacaagaatcttggttgttcatctcttatcttgcagcataggaattatgtcctgtcattacatcttgcccaagcgacgcaacacggcattatctccggccattgcaatccagacgtcttctaggtgatagtgctgctacaactgctaacttgtcatctacaccgcactgaagatactgagcttggaagatagcaagatactgaagctgcaagctgagaaagatcctattgtaatcagattatggcgcattttgatcttccgaaaactgtacttagacctcgtctatgtgaaccgaaatcgagtgaacaaaggacattttttatcttctgaattctgctagcaacctcgtgccatgcacagagtcctgtttgttatggaataagcatggcacaactgtagtggagaattgtttaatgctgtgtaaaatgacagaataatatatgtatgccctttgttttagctgccacaatgcttcttgatctgaatactaatcttctatagcatgatatactatagtccaatcgcaattcacatgctcatctttaaatacgatatcgtccgtaaacaattaacaatctgttccgagcatgtactgcatgtttaaatacaatatcgtccgtaaacaattaataatctgttcaaagcatctactgcatgttataaggtttatgcacaagcgaaattgcatc

SEQ ID NO: 123 - DNA, 1767 bp, Oryza sativa
atgccctttgttttaggtgccacaatgcttcttgatctgaatactaatcttctatagcatgatatactatagtccaatcgcaattcacatgctcatctttaaatacgatatcgtccgtaaacaattaacaatctgttccgagcatgtactgcatgtttaaatacaatatcgtccgtaaacaattaataatctgttcaaagcatctactgcatgttataaggtttatgcacaagcgaaattgcatccctttgtacagtttctccctctcttattataaaaccagcaaaagctggcttaggtttcaaaataattgcatccctaagtaaacatggcctttgctgcagggcttgactacttgtctccatatggagtaatatactaatcactcgccattctcctgctcgtttaatatggctggtcgtgtatccagctagcttgtgacatggctagctattcctgaacgaataatgcccaatctcaaagcaaatctagtttgacatcctcacatatttttggatagagcatcccaagctggaacagcagtagagatttattggattgaaggacaccatgagacaagccacccgaaggggaaaaaaaagggccttaaatcagcctttttctcattgactggaaaatggggaaagaaaggaataatgcgagaatgtttagagaaaaggaagctacaaatcatcaaataattattcgtttccaagatgatgagctatgatgctggggtttggccagtgcaaaacacatgggaaaattgttgtcacgaggagtaaggaggattgacgtgcaagcatgttacagttacacatgtacagttttttccttacttttagcgtttggatgtataactaaacttccctctattaatataacgccgtcaatctgattagccgtttgaaaaaaaaactcaattcctgaacaaaatatctgaaagttctgagtttaccggtcgatacccttaatcagctggaaatttgaatttagaaatacaaaaacatttgaattgggcgtcattctgatttcaatttttcttttggcatcttctcaagcttgctttctcattgcaaaattataaagctcggtaccccattgcaaagtttgcaaccactgcaaagctgaaacagagaaacatggagcagtatctcttcttggccactctactgatactatctctcgccttcgtcaagctcaggccacgcaacaatggcgagaacccgcctccggggccatggcagctgccggtcatcggcagcctgcaccacctcgccggcgcgcttcctcaccgcgcgctgcgtgaccttgccacccgccacggcgagctcatgctgctccggctcggcgagctccccgtcgtcgtggcgtcgtcgcccgccgcggcgagggaggtgatgaggacccacgacgccgccttcgccacgcggccgcagacagcgacgctccgcgcgctcacccgcgacggcctcggcgtcgcgttcgcgccgcagggggagcactggcgctgcctccgcaagctctgcgtcacggagctcctcggcgcccgccgcgtccgctgcctccgccgcgcccgcgaggccgaggccgccgccctcgtcgcgtcgctgtcgacgacgacgcccgagccggtgaacgtcagctccctcgtcgccaggtacgtgaccgacgccgtggtgcgggcggtggtgggtgaccggatcagtgaccgcgacgcgttcttggagaggctggaggagggcgtcaaggtggccgccgggttca

SEQ ID NO: 124 - DNA, 2981 bp, Oryza sativa
taaataaattgagagagagaatgaaggggtgaggtgatcttttgttgttttgctttgcacactatgatatggttgatcataagaccaaggatagtgcgatcttctcaggtcgcgtgggcttgtcctgtcacggctagaggctttgattagctagggtttgggcagaaaccttaccttttatagggataactcaagactgctgctatacacacccgtgggtatttttcatgtaaatagtagtttgaccctcaagaaggtcattactcttccgttcaggaatataaggtgtattttgactgtccaattttgaagagctttgacgaactattaatccaataatatttaggttttaccataagaaaaggatattattggattcatgtttgaaattactttcttatgactctgattttgacagtgtaaaagtaccttaaaaaacatctttaattttccagctaaatcagatccttcctaagtcctaactgatagatagggtacaaaataaccaatcccatgctttgaaactaataattatttaggcaatagatattcttggaaggtatgtaaacccttcccatattctgttctacaatatgcattactgtccgtgcttcaagcatcaacgctcataacagctgatttatcaacaactttgatccaatctatccctattaccattttttgttttcttaaattcaagcttctggtagttatacttcttgcaatcggcattctctctagctactaattgtatttattatatattacagaggattgttaacagggagaaacagcggtcaacacgtgcaaggttctcccgtgaaaaaattcttcacgaatgcagactgctccgtgagcgtctacaggaatgtactgccaagtttgttgcagatgagcaagacactatgactattgatttatcatctttgcctgatgctttagatcttgtgacgacatcagacaatagaatacgtttgcttgttgctgaggtaatgttttaaatatcttttgattagttattgtcattcaaactccttctagcttctcacgggaaaggcacacttagaaagttgagctcaaactccgacggaaacatcagacactacctgacactagattcttcaaaggatctggagtcagatttggaacaactcctggcctaaattgatttgtagtttcctcagcctctgcttatgtttgaagtttgagccacctagttgggccttcaaagctgcattcttgattctattggaacaaggtttacgtgttagttttggttagctctggggaacagttttcatcttcccagctgaagagtgatatcatttcagagtcagtaaaactatatttaacaaaatgagtaaaatgatctatattttcacaaactttttttcctattttacagtcatagatgcatttactttagattacatactggcgccactatacctaaaaaagaagtcttgccaatgaccaatgtaatggtcatcttggtacagaagacattgttttcagtgttatgtacctgtccatttagaaattgattttgaatattcaaagttacgcttctgttttcatgaagttctcacttccttgtgcccatgaaagcggatctgttagttacatttacattcacaatctgtgttctataatgatcctctctcaatctctcaggctcaacttctgtcacgagatgatgaacagggctcttctgatgatggtgataattctgatggtaaatcctcagttaccatgagcagtgaagatgcatatgttactgatgaagagacaacaaaaatgttatctgatctgcttattgacaatgcacaactgaggttgcgcttgaattctctcatccgtaatgctgtaaatactgctgtgaagacggagaaagaaggtagtgatggaaccgtgccaaaaaagacggtgcttaattggttattggacagatagaaaaaccagtatatattcttgtgaattagctcttctagttatgcggccttctcaaagttatatgatgagtattgttataatgtgggagtaacaggagtggagaaaaaaaaatcaaaatcttccttacatgcagatcaagcatgtggtggtgttgtatctcttatttacaaagattgatcaaggataatatatttaggaggcttctgagcctggcctcctagcgggagaacggtagggctcatatggttttggggaggcttgcaactggagtggtagagaacatgggtcccccttttttgcaccatacttcaatttgtaattgccgagctgatggatagctgcatggttgtatctttgtacagatgtttcagatggtgagttcccagcaggaaagcattgtacactatagttaaactctggattaatcttcttcacccatagagtgctcaactgttaaatcagtacttcttactcatgcagttgcacctcttccagactgaaaacttctcaaagttctcatgttgcatacagctggtaataagagcgtaatttactcaggcatggacacctgaccctgcctgatgtttagatcattacgtgcgtacctttatacagatggtagccgccacctgtgtaatattttccatgtcactttcagtctttcgttagagttttcaagtcgctttctattttactttattaaatgttcttgacaagattaaaaggcgtatcctgaaattttttatccagatgttcttttttagataatagaatctctactattataaaaattaaaaatgtttttgccggtactttggtacgtcatccatgtgatcgttcgcttttagaaatatagataagtatttgactcggattttaagttcgtttgttttaggaaatataaaactaagtcgtataaaaaaatcttttaaaaaaactcacatactaacttgagataaaagttggactcctgactgcatctcatatttgttgcaacgcaccggtatttttttttctagtaaaagaaa

SEQ ID NO: 125 - DNA, 987 bp, Oryza sativa
aatattgtcttgggatcttttttgcacggtttatgatagttgaggggtagagatttttgctatcgcggattagggacctcagacaaactcaacataaagttgagggccgtcaggtgaacttatattcccttatagttatgaagtgactttatccctcaaaatgagttcactttaggtcccttacttcatcgctccgtctgttttgtgatctttttcgcacggtttatgattagttgagaggtagagattttattgtggattaggaacctcagacgaactcgacttaaagttaagggacgtcaggtgaacttattcccttatagttaaggaagtccaagtggactttatccctcaaataagttcactttaggtctcttactttgtcgcttagtctgtttttcatccttatccgaaaaccatatacaatccatccttcaaagtgtgcaaacgaggtccctcggtaataatatttctggttttggctgacatgacaccttcttcaaactgtgcaaacgagctctctcggtagcaatgtctccggttttagctgacatgacgcctttgactaggggtcttcgtcccacgtgctattgacatgacgcttacgtggctatttgataaaaataataaggaggtgtttggaatggactaaaattttttagtcccttccaaattggatgtttggacactaattagaagtattaaatatagactattaacaaaacctatccataatcttggacttattcgcgagacgaatctattgagcctaataaatccatgattagcctatgtgatgatacaataaacattctataattatgaattaattaggcttaaaaaattgggttaattggatacatgccattgtaaattcttcagttttgaaatataccattactactcaactatttggaggtatgccattataatttttcaggtattggaaatataccattacataccccttggatatgtctaacaaaa

SEQ ID NO: 126 - DNA, 3030 bp, Oryza sativa
aaagttgagggacatcaggtgaacttattccaactataaggcaacgcatcacggcccatggcccatgggatgcgcattctggcccacaaagcagcacacgctctctcccccaccagtaagccctagcctccaggagctcagccgtataaagccgcagaccttctccttcccctccccgccgccactcgccgcagcgtctcgaccagacaagggagcgcctccgaaaccctagctccccctttcccctccgcggccaccaaaatggtacgcttctccctcctccccgtccgcctctctccgtcgcacgacggcaagatcatgcgcgtgtgtgtcctcgtgccagtccacggcaccctgctctggtcgatttgtagggggattgcattctttattcatgttgatctgctgtagatgggggcgatcttgagccggaggagtagctagcttcttgttgatgcggtttcgggatttagagatttaacacggagattgatagtttctctttagcgatttctttttttcttgttgatataatgatatccacggtgattgtactagttatggtttttttatcttcaatgctttgaattattgtttttgatttgtgggtagagaccagattattgttgttaagatggacggattctttgagctggtcctttgcatgctctgaagcgcagaaaatttgtgtaatgggttatatctggattatgtgtagctattaacttctgtagtaaacattttcatcttcctttgaggacatgggatgaattcctttttttcttctcttgttgtgctaaaattgttcggtaatcttgtctgtggctttgactgatgggctccgatgatggcatgaaatctttgagacctgacattcttgtgatgacaaacataagcatatttcctgaggacccaattgagtttttaaccattggtctgctgaatgtgtctttgctgttgaaaaatatgtatacacatttgcttctgattatgcacatttgattgtgttgtttataggcctgctatgtgctttccaataaccagtatttgttaaatttgtttcatatttcttatgtatataggtgaacgttcccaagaccaagaagacctactgcaagaacaaggagtgcaggaagcacacccttcacaaggtcactcagtacaagaagggtaaggacagcctgtctgcccagggaaagcgccgttatgaccgtaagcagtcaggatatggtggtcagaccaagcctgttttccacaagaaggtattgtgacagtttatatgtgattacgcagtgctgtgtgtgattgtctctcttcattagaaacatatggtgtcatgatttgtgtctgttcaatgcaaacatgtggcaataaccatcatgtagttttaatgtatctgactttcagctgtgcatttttcatgttatgatacatggttcctgttttcaggcaaaaaccaccaagaagatcgtgctgaagctgcaatgccaaagctgcaagcattactcccagcaccccatcaaggtattatttcattgtcaagactccagagctgaaaattatcatgaatcattattttgctggatgtgttggatgctcacttgcataattgttctctgcagaggtgcaagcatttcgagattggtggagacaagaagggcaagggaacatctcttttctaaattgcttgctacctactggatactatagttgttggtctactgtgcttcaatatttcaatgttattaggagcttaatttaagcagaccatatcatgtattcaagtatcatcgtctgacatttactctagcaaggattggctttctgctgaatcaagttttcttgcttaatgctcgtcgaatccaatgtgatgcatgtctttagatggcactgcaattgtgacttttgtcttatggcagttttatctccctaagtcctcagtgtctgtttttcgttatcttacccgagtttgcaatcctagagcgacccacgtaaacgaattcctgtgacatgaatccctgagaggctagtctgatgaacttccgtttttcagatcgaatttcgtatatggttaactatactatgttttgttcaatatcttcgtaacgagatggaaggtatggaataccatggatggaggtgaattgaaagataggccttggtcttgtgattgttatcttagaaggtcgatactaatgtttggtcttgtggcgttagtgaaactgttttcgtagcaatgtttggtcttgtgatgttagtgaactgttttcgtagcattgtattacttgttccattcttcatgcatgatttggataggttattgacaattgtttatagtaatgaattaaatattacactcctaaatctattatataattaaaggaatagaaaaaggagcctccacgtttactctcatggcttagaaattctcacattaatcggagaaaaaaaaacagagtccatatagaaatacaatttagaaatagctgaaattcggaattaaaaaataaggaatattagaagagaagactagagttcatatagaaatacactttagaaatagttgaaatttggaattaaaaaataaggaatattagaagaggagtatagagtccatatagaaatacaattaggaaataatagaaattcggaattaaaaataaagaatattagaagtagagtatagagtccatatagaaatacaattaggaaataatagaaattctgaattaaaaataaggaatattagaagtagagcatagagtccatatagaaatacaattaagaaaaaaaatagaaatttggaattaaaaataagaaatattagaagtagagtatagagtccatattggaatttaaaaccaactaaaattcggaaaaaaaaaggagccttcacgttcgctctcatgatctagaaattctcacattaatcggagaaaaagaaaaagcagaatctatatagaaatacaatttagaaatagctgaaattcggaattaaaaaaaagaaatattaaaagaggagactagagt

SEQ ID NO: 127 - DNA, 741 bp, Oryza sativa
ctgattaatattatttttaaaacaactttcatatagaaaacttttataaaaaatacaccgtttagcagtttgaaaaggagaaaagtgagttgggaaagaggggtaaacaacacagccttagtataggcatatggatttcagctaaggccttgtttagttcccaagaatttttggatttagttgtcacatcggatatacggacacacatttgaagtattaaacgtagtctaataataaaataaattacagattccgccagaaaactgcaaaacaaatttattaagcctaattaatccgccattagcaaatatttacggtagcaccatattgttaaatcatggcgtaattaggcttaaaagattcgtctcgcaatttacacgcaaactgtgtaattattttttttcttttgtctatatttaatactccatatatgtatccaaacattcgatgtgatgggtagaaagtttttgtttttgaaaactaaacagagcctaaacatgtgaaaattctaccttgaggtcagatgatgagatgagcccacatttaactcgcccgcggtggatgggattgccaaattaaccaagttggcctaaaaacatattacgaaacaaagctggtgaaagatctatggtgttaactaaatctgcgaggcagttcctatatgtagtaaaaaagaaaagttagtttttctatttagtgtttggtgatgtattatgaaagtacattgcatatagcttgtta

SEQ ID NO: 128 - DNA, 569 bp, Oryza sativa
ctctttatttgattgcagattaaatcagcctataacaagaagggggcccgaaggcctcggaagaagaatgaaaagctattaagattggcggaggcctgggggctcactccgacgcgcctgggtagccggcctcgccgtcgctgtcgtccgcaccgtcgtcaccgcactcctcgttggagttgaaggcaaacgcgagccgaggggccgctccttattgtcggtcggttttcccttgctgatgcgcgcgatttgcgaccgccgggattctgcccgaagagagagagagagcagggaggagaggcccccgagccgaacggcggcccaaggcccccgacggccggagctggccctccgcctgcttgtccgacggtgccaggcgcccccgacccccaggatggccccgaggccactgcgggaaggccgcgcctgtcgccctctgaccccgaggtcgtcggcacagaagccgagtgcgccccgcgtggcctctcggatggagagcgccctggaaatgtggcccctgacgaagaagatcggccccgccgaaaggtgcagcggcccgtctacttcgt

SEQ ID NO: 129 - DNA, 601 bp, Oryza sativa
gtaccacttctcaccgtttcactggcacaaccatcacgtgagtagagattttcgggtatcaattgggcataaaatttctagtgataagtgcttgacctaagctttcaaacagttccagcatgcaacactttgtactttcagcaacatcactcaagtattctatacaaaaagaaccattatcaattaatatagatataggatcgtcctatcactatcatttcctcataagcggcaatatcttcttcagttcattctgaaagagaaataagaagtatcaaaagatttgatgatatttttgtgtgataatccagctgattcatgtggccatggatttctctgtggttttgtaggtgggtggcggcgcaaagtgtgttctaccacttgtacaaccaagtgtcctacatgtcattggacgagatctcaccactgacattcagcatcggcaacaccatgaagcggatctccgtcattgtcgcctccatcatcatcttccacacgccggtccagcccatcaacgccctcggagccgccattgcgattctcggaactttcatctactctcaggtagattttccgcacatgttttaccaaatcacatttt

SEQ ID NO: 130 - DNA, 607 bp, Oryza sativa
attttatgaaagttaattttcaagccagataaattctcaaacacaaataagatcaattttagattctttgcttgttgtaaatcttgctccaagaaaatgatagtatcatctgcatattgcaacatagacaaaccatcatatactaaatgagggattaccccattaagaaaatcactatctttagcccttttaattagcaaagctaacatatcagctactatgttaaagagaattggtgataaaggatccccttgtctaagacctttatgtgtttgaaagttgtcaccaatttgatccttagctttaataccagcatgtcccccttggataaaagaggatatccactcacaccatttgggagagaaacccttcatcctcaaagtctgttgaacaaatgaccattttatcttatcatatgctttctcaaaatcaatgttaaaaattactccactcatatttgtacgatgcaattcatgtaatgtctcatacaaaataaccacacctgcatgatgtttctcccaggaataaaagcaaagatggtggcataacatattttttgagaccctctagcgtgcacgtatgtgcgatgcgtgtagcataataaccc

SEQ ID NO: 131 - DNA, 2420 bp, Oryza sativa
caggaatttcccagaaaaggaatcccccctgctccaccgaagcatgccttttcaagaataaattcaagcagggtgcttctagaagaggttagccgttatgtatattgattaatttttgctttgttcgatgtcaaatactacattcagttgtgcttagcctttttgaccggtggttcttgaaatgttttgtttgcagagaaggaacgctttggaggagtggatgcaaaagctactttctgacattgagttgtcgagaagtgcacctgttgctgcttttcttgagctggaagctgctgcacgctcatgtatgttccgcttgacatattctattgaagacactttttcctgattgtgcattgatccatttattaactaaaatttcttaacatttttagcaaatgtttaattacgctatttttctgaatgaaagattaccaagattggaatcagcgcccttctgaagtgggttcttcagcaaaaagtagtgcagattcttctccgcgtcctgatgaacatggttcaggtgttctctctgagtccagtcaaatgaattcagcctttgctcatggtaacggtccgacaggagcaactggtaatggtatgctgggagagtctatcttagatcagcccaatgagcgggctagtagcatgtcaaatcacaggaaaaagaaccatgtctttttggaacatggtgttaggaatggttccatagatacttataagggagtggtttccgaagaggatcacgattctaaccctggccatgccaggaaggactctgctgaaagtataggaagtgatttgagttctttgaggggcagtgaattatcggttcctggagttagtagttccctttgggatggtcctgtggatcttccaagtggaattgatggacatagccaaacagaacaatttacaggtttagatatgcagcttttatatgatatggatgcacaaatcatccttcctgctgatcaaaggccgaagttgactagacttttgatcagcatggacagaagacaggtgacagcaaaaactgatatggaggatctcatagcacgactaaatcaggaagtggctgtcaaagaatatcttgcgacaaaggttacgttttctacctgacattcatttgtgatgcctatggattatgcttaaacacatgatatgctttgttttatatgtcacgagtttaaaataaattgatttgtgtttttttgttcatactttattgatgtacgttgttcttgtgcttctctgctattctgtgcaggtcaaagatttggaggttgagttggaagctacgaagaaaaaagacaaagagattctacatcaggctgttttgaccgaaagagagaaaattacccaacttcaatgggataaggatgagctctacaggaagtactctgaaatggagtcaaacctgaagattgaacaagttggttttcctctttgtctcctctttgtcatcatggcttggtttcttactatccatcttacaagtattttcttacatttctttctacttaattgcagaatgagaaaactcgtgtgcagtcagagaaaacaactgctagcggtgaaaaagaaatgttactggaagagctagaaactaaacgaaaagaagttgagagtttgcagcaacatattggagaattcgaggcaaagtctaaagcagatataaaagttcttgttaaagaggtgaaatctcttcggaactcccaaaaagagatgaagaaagtgctgaatcagtatcatgaggagaagactgaattagaggtataaatgtaaatttaaagcttttctttctcgcagaactatgatagtatctataaattgtgtgaaattgttgctatggctggcctctcattgctcaaagccaggagagcataaccctttacaagttgcaaactagattttggttgtagctaagagaaagtggcttgtcaaagtcattagacaagtccccacaaaaaaaaaagtcattagacaagagtaagcctttgaaagcatgcaagccatcttgagtgtttgcttttccacttctaacttattaccctgatttctgcatctccaccacccatgcaacatgttgtccatttttggaatattatcatgaattgttgtacttgcctacttggtatctgacaagatgagcttaacagtcttcttttgatcaacaaacatatggaccttttcccttttttattatataaccagcacagccatctattctttatgtgattccttttgtcaaggccggctgaataaagatttctatctacacaagctagattcaacagcgatttctttatctatatataatcactcttggaggacaattgaattaatttaatgctacctgtttgtacaccacttaactaaagaaattgagagagagaatgaaggggtgaggtgttctt

SEQ ID NO: 132 - DNA, 3637 bp, Oryza sativa
tgtataaccatattgcacgatgagcatactaagaagctaaagccataatgttgtggttgtagccatggctgccgccgttggtttgataattgtttgtaggcagggttgctagcttgctgattgctcaaatggcacataaagagtaaactctcgatttagttgatgtagtaagctctacatggattgatggatatgctttgaaccttttagattttcccctgtttgcaccaaaagagtaactcatatgcacttaacagactcatatgagtagtgttccgcttgacaaccaccaagccgaaataggtgctctgtgttatagctgttcacctaggctgccacttaggcgcttaacccacttggttaggcacttggcaccagcctgttgccagagcctagcaccaagggcagcaccagaatcgagatttatgtcggttattggtttaccctgataaatatttataggcaaatgcttgatttttttttatgatgatgtggaagctagaaattagctcaacatcaatcaggttgacagataacttctgggcagttgggaaatatgagctgaaattcctgattgataatcattagcctctcaacattttaacaatacaatagcctttttatgattggcatagtagtaagtaaagtttgcatgctaagacttgtgatttctctgtgctattagtaaacagctttcttcattttgtattatacaattattgggttaggggtaagtttatctaacttttttcgatacatggaaaattcagatttggaccatacttctgccagcctgttatcgctggacttggagaggacaatgagccatttatttgtaccatggactgcattggtgcaaagtatgtatcagttcaattgtgtttttgtttttattcaaattaatttcttttggatctattcatacacatctggatggttatccattgctcatgttctgcaatttactgcattgattaatatgcccgccttagtcttattccacatttagatggttaggtggggagttatctacatctttaatttataaatatgtttgtcatatctaacaaaggttacctcccaaatttctaaatcatcattaacaaaagaccccatgtgaatgaacaacgtgatttatgggttcaccattcttgtttctatcctgaattccatgacacccaaacacgattggctccgtctctgtcccagagaaatgtgtgcatgcttgacattggtaacttgctctatcagagatttgcttgattccttttttgttcctttctgaatttgatatattttttctatctgcttcatcatgtactgaaacaactttgatactattattccaatagcatgccacctgtttaagtttttggtctaagtccgtgtgcctgatatgtctgattaggcgtttgaacgcttgtttctcatattcttgtgagctgattgaggatgtttatttctgtgcagggaactagctaaggatttcgttgtatcggggacagcatcggagtctctatatggtgcttgtgagtccatgtacaaaccaaacatggtatgcatttgtttgtttgtatgatcacatttagcccgtgtaacattctttatgggataacatcatgggctatagcaatttcgcatttctgtttggatctgtataatatattataattctgttgcattgtactgtttagatttctaccactattttgaatgatagatgttacatgacaacatattatttttcttgacaaaggaacctgaagaactctttgagactatctcacaagctctgcagtcatcagttgatcgtgattgcctcagtggttggggaggctttgttctgcttgtgtaagttcacttcactaattcaagattggatgagtggcttcatttttcttctgttaaacagcttttgaattaaaatacgttatgcaccattattttatctaccgttctgcaataaattggtagaagttcatcagtaatgatttttttcccaatcaaatataattggagctcaaagtcctaccgcattccgcattttagttgtttcagcacttcatttgagcatcaatacgtttcttttacataatcttcttttgggttttcaggacaccaaccgaagtaaaagagtgtgtgatcaagggcaggatggactaaatttatcattgcgaagagttcttggaaccatttctgatgcctgctgttcctggtctctcagcattactatccgtgttgtatgtggattccgagggaaccttgtaatatcaaagatgttcattcacccgtagaagaaactgttgttttcttacttttctacgcttcctatgaatgaaaggacttctatttgttgcatgagatgtgcacttcttggcagtccttggccttgatgatgacgattatactgatcagtaagccggctactggttaattagctaagaatacgcgtatcgtggtgcaatgagctactcatactcacccttctcaggcatttgttcgttcaccgtttctatatcttggcaacactttttctgaaatggatgttagtgctttgtcgagtatggagccgacgatgtgaagtctattctgagtgcgagtcgttgcgactcagattttaagttacagtactaactacagttcatagcttgtagtgctcagagttcaatggtcttggctgctttacaaaaattggtaaaaaccgaggacgacttttggtcaattctatacaactaactaaaactgcttgtttttcacaaattggtctccaatgatttcatggaaatggagcgattttcgttcagtactgtaaaccctagtattgcaaaccctgttagtgcttccttcgttattttttactcaaactacaaaaaatacccatgcgttgcattgcaacgggtaagtgctattttaataataataataataatattatatatggtttgtgggaactcgcttggatccgtatttcatctcaagttagtatgcgagtttttttaaagagatttcttatacgactccttttgtattttcaaaatcaaacgagcttaaaatccaactcaaacacaacgaacttaaaaccgactcaaaacgtaccaaaatttttgcaaaaacaactctaatttttataatagtagagaagagatagagatatacatgttttttttgttattgtttcgagcatcaatacaatctcaaatatgtgtttggtcattgtttcctccaactatagatgtattgaaccccataattttttctacttagatattgtttagattctaacttttttcttcaaacttcgtgtgtgtttagttcacgttaaaattaaaagtttggttgaaattggaacaatgtgacggaaaagttggaagtttatatgtgtagaaaaaattagaagtttatatgtgtagaaaaaattgatgtgatggaaaagttgaaagtttgaagaaaaaatttggaactaaactccgccttataacttttcgccacatagaactttcgtacacacataaacctctaactcttccctcacatcgtttaatttctttgaactttaattttagtgtggaactaaacacagcctaatagtatgtactgaaccaagtcgtcactaagaagtgcataccattatctgtcg

SEQ ID NO: 133 - DNA, 966 bp, Oryza sativa
atggctgttacggaatgtagcgaattctggatgaaatgtactttctaatattaattgatcaaatttgagtatggaggccctttgcttgtcgactaagtgacaacgtcatggctagggatgcactggtgtttttatatttggatctcaagccctcgtatctggttctccagctgaatgtgttgatgcgatgactgcagcttaccaatggatgactctgtcatcttttcgctggcttgaagaactctgcagagaagcagaggtaggatatgttgacatcaggtgcttaactgaaacccgaatagaatccatttattttgacttcaaactgatgttcagatctgacatttggtgcacaacatgcagttgggggttttgacgtttcttaagtttttttcattgaacttgatcagccaaataagctattttagacgtgattcatgacctgttagtctgaagcgaaagcaaaatcagattcaagaaatgcagatgtagaactatcccatcatatcgatcgagcacaatctggtcatgccattcccagacattcattcttgcacaaagcaaacttcactcaagaatgttagataatgcatgtacaaaatttttgcccaattaagatgaaaaggatatatgcttttctctgctgaactgcatattctgaatcaatcatccatggtcatcaatactcaaaaattttgttggtatatcagtcatgggaattacatttgattttttctccctttgcacgtaaactcacagtcggcataaattttatacggtcctcacctaatgtttgggggttagtattagagtgggcaaattcatacatgtgagtgttacctccatatgtatatctgatgtacacaagttcatactgagctggtattatccaatgtacacaaaataaaaaaccttaaatttttttgagttcttataatgaacttagtagatatgtacttacaaaat

SEQ ID NO: 134 - DNA, 8649 bp, Oryza sativa
aatcgacgtttgcactatctttgtcttcaacatggttccttttggggaaaggggatccccaagccaacatttttacttttaaacgggctctgcactggtaaataaaccccaatttggtgaccaaatgccaagggattaccctgcatcatagtatattttcttcgtcgttagcttgcccaattttccacttcgtcgaatgtccggctcatctcgcagggagaagttcgatctgtagcaaaacttgcagacactgcatttccgctctagctgttttcagatagtcttggaacaaaatcttctgttattcctcgttgaaaggcatctttgaccgaaacttgacgactagttgcatgggtgtaaaggggcccgaattaaatcgctaaagtctcgttggttatccatcgatcatgcaagaaggaagttcgcaacccatctccaacgtcgacttcagttagggcttgtagatcaggcagcagtttctacattgaggtccagtgaggcccaagtcgaaaagatgttagaagcggagtatctcaggccctatttgggggagcttgtcccagctgcagcttttcccaaaagctgccccaaacagtccacagcttctgagaatctgtagttacatattctgaaaaatgaactaagaagccagaagctggagagctgggtttcagagcttttccagattcttagaagttggctaccaaacagctgcttctcagaatctaaagctccccaaacaggccctgagtgttctttccagatccattttgtccatgagatctttgagttgtacatagggatgaaaacggagcggatagtttccgtccgctccggataaaaatgaatatggatacctttcggatcggatacggatacctttcggatcgtatgtataaattatactacattttatataaaatgagctaattatatatgttgatatttgtttctattagaagttgaattggttttcgtgttccgagaaaaatttgtttccgtattcgtgtccgatcatattcggttcttattcgtattcgagatagtccgtattcgtttccgtatccggcaaaaaaatatgaaaacgaatatagtatgagcattatccgtccgtatccgctccgttttcatccctagttgtacatactgaataggcgtttaagaaggagcgcttcattctgaatttttaggtttttgatttcgagccctccctgtgcctttggcttgcatactgaatcctaggcaaccaggcattgtgctcccgagcagacatcgtctccagtctagagaaaagcccatcttcgtttgtcaatttcctctatggtttctgggggtaatctgaatgcagacatcgcgtagactgggagactgctaagaatcgcgtttatcagtactagatgttctgcctgcgacaaaagagaggcttcccatccagataagaaaccatctaacttggaaaccagaggttgcaggtcagctgaagatagcttatggacataaagaggaagcccgagataggctatcgacagtttttccagtttgcactgtagcagtcctgacaagatcaactccttgttctgatcgacattcagggtaatcactgtgcttttaacccagtggcattagagaactttagaagggtatccttaaggccttgtttagtttgcgaaaagaaaatttctgggtgtcacatcggatgtttgaccggatgtcggaagaggttttcgggcacgaataaaaaaactaatttcataactcgcctggaaaccgtgggacgaatcttttgagcctaattaatccgtcattagcacacgtgggttactgtagcacttatgactaatcatggaataattagactcaaaagattcgtctcacgatttccatcatagccgtgcaattagttattttatctatatttaatgctccatgcatgttttcaaagattcgatgtgatgtttttagaaaatttttgggaactaaacaaggcctaagtgctgtcagcaaaacggaaagagcaaactctgaaatcgctcacactcgctcactctgaaaattgccggacaacgatagtaacctcaagaagttcggggaaacgtcaagaactgaagaacaaagtagaatttttgtgcagcgcaacctctgctgcttttctgttttcactctatattctcctccaccaaaacggagtttgttacatgcacaactgaacggaacgagcaacccggatcggctactgaccgcgccatcccacgatctgaaaccaggtcattcggcagctaaacaaaactgacaacatgcagaaggaaatagctattctaccgaccggccaaaacaaccttcagccagccactacgttcatgcaaaacagaaatataaaatgctcaagattacaaaatatccaacaatttctccccctaatcttgacgcatcacactggagacaaacccagctttcccctcagctccagaaatcggaccttgccaagaggctttgtcagtatgtctgcaagttgttctgctgaacttgtgtactccacttcgacctcctttctttcaaccctctcacggatgaaatgatatcttgtatcaatgtgtttgcttctatcatgaagtacaggattcttgcagagattgattgcagatttgttgtcaacttttaacatggcacaacagggcttcttcatttgcagttctcccagcaaacgtgctaaccaaatcccctgacaggcagcagttgtagcagcaatatactcagcttcacaagatgataatgcaactattttttgcttctgagactgccatgtgattaagttttctcccagcttaaacaacacccctgttgtactctttctatcatccacatccccagccatatcactatcactatagccaactagccgaggaaatttctcttctccctttctgaacttgagaccaatattcagacttcctgccacatagcgcaaaatatgtttcatggcagcccaatgttcagcacctggattctccatgtatctactaacatatccaacagagtaggatagatcaggccttgtattaaccaaatacctcaggcttcctataatgcttctaaactgtgttgcatcaatgcaatcttctactccttttttcagcttcagtctagcatccataggaacctgacaaggattgcaaccttgcatcccagccttctctaaaattcttcctgcatacccagcttgggacattgtaatgccttcttcagtctgtttaacctccattcccaggtaataggacagtaatccaagatcactcatactaaacatacttctcatctgctccttgaattttgctatttctgtccccaaagctcctgtaatgataagatcatcaacatatacccccaccatgagtctggcattaccttcccctctagtgtacactgcattctctgttgcacttcttacaaaatccagatttgcaagtgtagaatccagctttgcataccaagctcttggcgcctgctttaaaccatatagggccttttttaacttcagtactttgttctccttgtgctcaacaacaaaaccaggtggttggactacatacacctcttcctccaattcaccattgaggaaagctgacttcacatccatgtgatgtatttgccaaccctcatgtgctgccaaagcaaccagcaacctcacagtttccatccttgctactggagcaaatacttcttcataatctatgccttgttgctgaacatacccctttgccaccaatcttgctttgtacttcaatatctcaccttcggcacttctcttgatcttgtaaacccatttgagaccaattgccctatggtcagatggtaagtcacagaggaaccaagtattgttaccttcaatggagctcatctcctcttccatcgccttcatccagcactgctccttctcagcttccttgaaactgaaaggctcctgctccgctatgagacactcgtcgtcgtagtcgaaatcgagcaccggagttgtggtggccagcacattgttcaccgtccgaaaacggggaggagctccatcgctttcaatactggcatcagatggtggtgtacagaactcaacaccggcaggtgagcttgatgtcactggagaccacacgggcgccgcgtcgggcgtggccagcggacttggtgcggtttcagtttcccgtgcgcctccatgttccacaaccacgtcaggaacacgatttccacctagcggagtggaaaaaaactccacagtgaaatcctcctcgcctccagtttgagtgacctccggatcacgccatggccacattgccgcctcatcaaagacgacgtcgcgtgacacataaactcgccgtgacaccggatcatacatccgataggcttttgagccctgctcataaccaatgaacaccattcgtgtgccacgatcatcaagtttcctcaaatttggcttcactgtcttgacgtagccgacacagccaaacaccttcaggtgttcgaccgagggacgtcgcccgtgccacgcttcatatggcgtcacaccatccaggctctttgtgggcgaccgattcaatagatacacagccgccacgactgcctctccccagaaatgtgccggcatccccgccgccttgagcatagagcgagcagcagcgacgatagtcaggtttcgcctcttgacgaccccattttgttgcggcgagtatggagccgtgagctggcgactcacaccccgatcggcacagaactcagtgaactcgacagaggtaaattctcctccccggtcggtgcgcagcgcccgcagttttcggccgctttccatctcgacgccggccttgaactgcttgatcgcagccgctgcctcgtgcttgccggagaggagccgtatccacatgaaacggctcatgtcatcaacaaggagcaggaaatatttcctgccgcctggcgttgccggcgcaatcggcccgcacaggtcgccatgaaccaactcgagcgcatcctgcgccctgaacctggctttgtctgggaacggcactcgtcgctgcttgccggcgaggcacccatcacacagttgatcgacgtggtcaatcacggggagtccacggaccatctccgcttgcgccaatctccggagggcctggaaattgaggtggccgaaacgggcgtgccaacgccacgccgtctcggtgccattcgccgccaaacagatgggcctcgccatgttcaacttcagaatgtacaggaagcttggggagcgctttaccttggcaagcagtagaccatcaggatcacgcagcgtgcagacaccatggtatatgtgagcatcgtagtcacgcgcgtcaagccggcctcctcctcttctgcaacctcatgatccagaatcacctttttctcagtgagatgcacctcatgcacaccaggtgttcgcccgagtgtctcctcaccggcgagagacacccccatgacgtgagccatgagcaaggtcggctcctcctccccctgcgtcaggtttacttcccctcgacgttggcgccgcggcttgcggcactgccttgcaaaatgcccaaactcatcacaattgaaacattttaccttggagtagtcacggctggtgttcccactgttgatcgtctccttccccttcggtgacccaccggccttgccccgacggttgttctgggtgccagagctgcccctgctcttgctgctgccgccggagccttcctgctcctgtttccttgcgcgtgcctgccactgttcctccgtgaggtagagcttgtcgccgccaccttcctcctcatcatcactgtatgagttgaccatcgacagccgcccaacgagctcctcaagggccatcgttttcacgtcgagaagctgctcgagggaaatcgccaccggcttgtacttcttgggcacaacgcgcagcagtttcttgttgatgtgttcgtcttccatgactccacccatgtcgcgaatgtccgcgacgacggcagtgagtcgcatcgcgaactcctccggtgtctctccatccttgaagcgcatcgcctcgaattggcgacggaagccctactccttcgcctcacgcacacggtcgacgccgacccgcattgtcttgatggcgtcccacgccgccttcgccgtgtcatgcttcgccagcccgcgcaacatctcgcgcggcaccgcctgaaggattgccgagagagccgcccgatcgtcgcggtactccgcgtatccgggttcaatcgccgtccacaacccctgcgcctgtaggtttacacgcatcaacaatgcccaatccggataattggtcctcgacagcaccgggaggcgagcagtgtgcccagcatctctcccctgtggcacgagaggaaggttcgcgccgtctgcgccatcccccgcgccgctgccacttgcgcctccgcgcccgctgccgcttccgccgccgccaccgccaccacggcgtccgggcggtgtgtatcgcccgccatcatcagacatcgtctcaggaccgtcgtggtaccgctctgataccaattgtcagcaaaacggaaagagcaaactctgaaatcgctcacactcgctcactctgaaaattgccggacaacgatagtaacctcaagaagttcgggaaacgtcaagaactgaagaacaaagtagaatttttgtgcagcgcaacctctgctgcttttctgttttcactctatattctcctccaccaaaacggagtttgttacatgcacaactgaacggaacgagcaacccggatcggctactgaccgcgccatcccacgatctgaaaccaggtcattcggcagctaaacaaaactgacaacatgcagaaggaaacagctattctaccgaccggccaaaacaaccttcagccagccactacgttcatgcaaaacagaaatataaaatgctcaagattacaaaatatccaacaagtgcttgtacatcctcctcttccactcggtacacagatgattaagtatcatccgtgtaccgtatagtggcgcaagggcgatcctggtagacggcgtgtctgattgcctggttatgctcgagcattctttgtagcacatcggcaaccaaaaaacaggtatggcgacaaaggatctccttaccggagcccctttttacatgagatccatctcccaggcactccattgatcaagacaagattttgaggagcagagtaaactctgaatccattgaatccagatttctgggaatcctgtgacagcaagtatttggaagagacttgaccaagtcaaatgcctttgcaaaatcaagctttataattacagttgggcacttccttttatagcaagcttgaatcaattcagtcgtatagattagattttccgagatgcatcttccatggaggaaaccagtttggtccaagtgaatcatcttcattagagctttttggagcctagtcgcaagaactttggagataaactttagtgagaaattttgcagggagataggtctgtagcaatcgacagtgttttcttttcccggctttcgtgttagaacaatgaaggctctataatcctctcaaggttagccccaaagttgtaaagatcctagccaacctcattacatcctctttgatccagctccaagcagcacggtagaaactaggtccaaatccatctggtcctggcgcactagttgaattcatacctttaattgaggttaggatctcttcttgagtgatctgcagtccttgtccagctagaaggttcgaatcactttcttcgtctgtatatagttgttgtagatcaaattcccaagaaggctggcccagaagttgattgtaataggagtacataagttggaattttccattatggtcagctacctctaccccattatgcttgatcgatcttattcttgattttctaaaatttttagaggcatatgctttgaagaaagcaatattgtcttgtcccagcttcaggtgtttcactcactacgcctcagtggcggatccagaaagaaatagcagtggggtctaagtaaactagatagagttatagtccctctcctatctacatatggtaaaaatttttagtgtgatctttgtgggggctctcatagtcttcacgccagtagtgggggctcgagaccccaccgcccccatgctggatccgcccctgactacgccagatcctcacacctctgacgggatatctatgacgagcaaacgatttggtcactgatgaccgtcactttttttttgaccggaattactgccaggactttgcccagcagtgtaattttataaaactcgaaaaatatttacaaagttacagaagaagaaactgaataaaactataaagcttgtaaccaattaaaaacaatttgctttaagggatccttcattctgcacatatgcaaaagaacttctttcacaaaaagagatctctaggcttggaaggagggctgaatgctcttaaagattaaaccattcctcttcttctaaatgtgccaggctgccaaaaagaaaacctccaggaagcccctttgagcaaacttgagtcttgctagagcaatcatctgaaagaactccaaattatgattccactcaattcctaagtgttgaccgtcacctttgacgggtcatacgggatgtcg

SEQ ID NO: 135 - DNA, 1494 bp, Oryza sativa
aactcctcccgccaccggaagcactcccccatgattgcgcgcagcgccaggtccgtcatcggcccggtgatctgcctgctgatgttcaccgccgccgcctccgccgtggacgacgccgcggcggcggcgatggcgtcgacgaggcgggcgacctgctcctcccggatggggcggaacgagcgcacccgcttcacgctgagcagctcgagggtgcagatgccgcggagctggcgccacttcttgccgtagggggagaagaggatgccgaccttgtcgccgatggactccctcaccgtgacgctcatggcgcgggtggcgaacgccgcgtcgtgcgtcttgaggacctcgcgcgcggcctccggcgacgacgccaccacgacggggagctcgccgaggcggaggtacatgacgggggcgtcgtgccgccgcgccagctcggccagcgcgcggtgcaccaccaccccgcgcggcctcatcaccgcgaggtggtgcaggctgccgacgaacggcagccgccatggccccggaggcagcctcgtggcgccaccattctcgtcgccacgacgacgacgacgacgacgacatagctcgccgcagatcatggcggcgacaatgatcaataccagcaagttcaacaagctccatgggctcccctgaagcggattactcttcatcaaatccatggcgtttaacaaagcttacagtcacttaatttaccctaatttgaccgcctgcaaaaacgattttttgcagtattgagttgattaacacaatctaagcttgattacgtaggattactatgtgtatcaaactcgtgatgagttagcgttgtgtgtttttgatgcatacgaataacccttccggctgagggtatttataggaggcaagtaagatagctaatggtgaattggtgatgatatcacctgcacaaggcaatatgtagtgttaattgcaggcttcgccgccgcaatcgtcattgagtgtgatagaaataattggcatgaattttcaacatgagaacatggaagaagcatggcatctgtgcctaggtttcatgctgacatctcgctgacgttggcatgatatctaccagaagaaggggccaccgccgctgcaatgagaaggggacctccaccactgcctccttgcggccgccgccgctgtctccttgcagccgccaccgctaccgggagaaggtaccgctgcaaggagaagggggtagccgccgctggagaaggggccactgccgctgcctccttgcgatcgctgccgctgtcagcgcatcgctgccaggagaaggaggaggaggcgggagagggcgagaggggagggggatgcgagtggatggagtgaggagtgagaggagcgagtggatgaggtagagcgaccgatcaagagatgcgagtggataaggacgtcgaccggtcggttttttctaagtagaaccggcacctatatttatattataggtgtcggttcttttaaaaaaaccgg

SEQ ID NO: 136 - DNA, 3509 bp, Oryza sativa
tatagggcgaattcgagctcggtaccctaatgcttaaaggtgtcgattctttattttattcatagtgcgaagctaggttggaaaaggcctataggtgtcggttttaaatgaaccggcacctataagaccggtccctatatgggttttttttagtagtggaaataaaccatctaaattcctaatcacagaaggacaaaagatctaaccaccaaaagaccaccccaccctgagcggctgcgcttgcttcgcttctttcccttccgatctctttttttcttgttggtttctataaaataaacaaacaatttaaatttctaattaaaaaaggacagtgatctataataaaaaaagacgaaaacatgtctcaccacatcgttcatattttctttcatcatgatctcattttttctttatctttatctttacatatttaaaatatttgtagtgtttagagatggcaacggggaattcaccgtcaggggtcacatccacgtccccgtccccatggtgataaaatttcaccatccccgccccgtcaaccataacggggctacatttctccagtcccgatcaccacgtggtgaatttatccccgtggttacagcggacgacgtggcagcggacggcgtgctggcgagtggcgatggagggcgttggtggctcccggcggcgcgacgacagccgcaggcgctgcgcggcgcgacaccggcgctctcggcggtgctctcggcagcgagtcgacggagggacgggacaacacccgtgcctgtgccacgcaagaggaggcggcggcgtgcgcgtttcgagcagtggtgctcctggtggctagggagtggcagtgcacggcggtgtgcctggtggctggcagagtggcgaactggcgatgcacgcaggtgcagcgccgcaaccgagagcaggaggactggaggagagactggatctgaggatttggattatggagtttgaccggttgacttagggttaggttttatatatatacctattaaatgggcttcagtattatgggccaaaatgtataaaaagtctagaattagtcctctatatagtaaagtcgggtcaccgcgggggcggggacagggaatcgtgcaccgtccctgcccccgtcatcctcgatggtaataagtttgtaaccatttcatcccccatagtggatacatattaaccatcaccgtcacctaatagatgaattcaccgtagggaaacggtgaacgggaccccactgccatctctagtagtgtttctattattcgtggttgtatggcgtacattaacgattttcgtgtttctgcactggcgccctagcaacacgtgcgagtctgattgctcccaaaccaaaattcaccgcttccacgtcgatgatgaagcatcccacgtgtcagaatccaataggatccacactcagcacatcccatttgccttcccacgccaggcgcacaaccataaatcatatcctattttggttctgctccatcggtaagtttacaatttaaatgacgtcaaaggatcgccaactcgtgaattaggaaataaccgagtcattaatataacaaagtgtataatagtaacaagcatcataatccatatgacatgtggacccatgataactagaaaatataaattaatatttaattaaagtaggttcactctttttaatatacacatggattcgatctacatgaagtcatgaacgaacaaacacccaatttaagaaataatacatctgataatttgaataatatattcttgaggaagcgcctggtgcctggaagcttgaagtggccgctgacggtgacccatacgccgacagaggccatgttggtggtgtcgggtaggcctacgctacatttaaggcagcgatgtagagtgtggagatactcgtaatgggaggcaaaggggtcggtgtcgctaggcattagtaaggcccaacagtggaagcagtttgatgaagatgaggaaacagtgtagttgaggatacgatgggagtagaacaggagcccacgctttgatcgcacaagcatgaccattatatgttgaatggatttctcaattattgtgttgtaccgccaccacaagggatcagcgtatggtgtccaagcttttcactccaagtaattcctataatgcaggaagggcaaaagcagagttttgtcaatccgtctactaaaaaaaaagtttctgaaaaaccggtgaacgtacacaaaaatagagaaaacaaccatagaaaaaaaagttgaaacacactaagaaaaactgaaaacatactactccctccgtcccataatataagagattttgactttttgcttgtattgtatgaccactcgtcttattaaaaaaatttgtgcaaatataaaaaatgaaaagttgtggttaaaatactttggataataaagtaagtcacaaataaaataaataataattctaaaattttttaaataagacgaatggtcaaacagtgcaagcaaaaaatcaaaatcccttatatcatgtgacggagggagtataatagagtggaacggaacatttaacccctcttactagatcccatgcaacacacgcgcatatttgctagtagatacaatatataaagtacttgaaaacaaatctatgccatatataccattttccctttttcaattaaacacttgacaaaccattggtggccactctgtacaatttaataaaaatattatcctaaatgttaaatatttacaaacgaagggagtatttactatatcatatttaatctgttgtaacggtggtgatagtgccatatcatctcatcagcacaaaaatcgctttgcagattttttttaatgataatatgtcatctgtgcatgtggcttctataagattgcatgttacaaattgtatatatgtagaataagaaatttgtagtagtagcagctggcatttatttttttcagataagatcagactaactactgtagctggatctctaatttaattaatgtaataaattagtattagattatctataccactagagcatggtaaaactgtatgttaacataatgtatatagcgatctgttcggtcctggctaagctgcatatgccactacttgttcaaatcagttgacccaaaaatgcacatattaattagtcaaagcccgcaaaagctgcaaacaaacgtgatgtgagctcgatcggaagaaatctagtagaagtccaaggttccaaacttacggcatgcataaaagagcgacatatatacacaataatgttaaacaaattccgtcaaagctcactactttgtcaaaagatcacaaatttatcgacgggctagccggctactcgatcgactgttaaactatatataaggcactcctggccggccgtcgttgcttatagacttagcactctcattttctaggtttagatttattggtttaagcttttaagtcggtcttttgactttcatgatttatgaattggcggatctaatatcataagtttaatggtgaaa

SEQ ID NO: 137 - DNA, 756 bp, Oryza sativa
gcaatcaacacatgtatacttttgttgccttatctctctctctcttcttaatttgttgcatcttacaacgaacgaataagcaacagttgcttcttgtatgtacaagtttcgacatcataacaatcaataaatccttgtcattaaccggacgacacggtaatatctcacacttgatgaccgactcctgcaagctaaacaaacttaaaaattttaaaaaaaaacctcacaaaaacaaaaccactcaaatcaattaattcgatcgtctaccgctgtatatatatgcttcttgtgtactctgctgtatcgaattatcatttggttcatcgatccatggagagaaatgttttcttgtgtgttcgatcgctagcttagctatggcgccgggcagcccatctcgtcgcgtgcctggatgaagacgatggcggcggcgtagtgcgcgagcgcgccggcgatgacgagcgcgtggaagatctggtggctgtggccgcacaggtcgaacatgccggggcgccaccgctccgggacgcgggtgaggtagaacgcggtgccggcgaggtaggacgccgccatggcgccctcgtacgccagcgtcacgttccggcggggctcgtgccagttgacggcgacggcgtgggcggcggggacgacgccggagaggcccatggcgacgaacagcagcgcgcggtgggcgcggtacctcgccgcgctcagcctgggcgacatgagcgcgtacacggtgccaccccggcggcggtg

SEQ ID NO: 138 - DNA, 3228 bp, Oryza sativa
agtcgtgtcgtaacgggtagacttgatcatcacaatcaccaagtcacaaccaagtcctatgaacacatcaccaaagcttaacatcttgtggtgaagtgaagtggccaacacttaatctaggatttgtcatgaatgggcaccagtaaaaggggacctaattgggcaaggttcatcaggtaaaggtgaaagcaatcagaagccccacccaacactttggcccagctgccatccaaaaagtccaaatcatgcacatctgaacaaacagaaggaaacaggacagtactgaaaagtggagccactcaaagctgcacaatgaatctcctaagcatgtggatctaaccagcccaataatattactgcaatccagtatttttttttcttatcagtaacttctacttctatcacaggaatgaatgatttcaggaaatagaagctttactcacagagaggacatctccaatgttactggagacattttcagcaacctttgagattggcctgcagtcaaatagaagtacaattctcagaaaaaaaaaaagggacagacagtgaacagaatattaagcatgcaaagcacatagacatctgaaataaaaactgcaacttgtcattttccaggttgtatggaattggagtgaatttgttggtgagatttaatttgtcgatacacaagcagctagatttatcgaaactctcatgctatcactcagcataatttgattaacaagaaacaagtaggatgtagaatcctattcagtgccttaaaacgttaaaatattcatctcacagctactgaaaaactaaactatttcgtgctactaattccaggacacattagccaagattttaaccaaacaaattccactgaggctttcacaaactcaccaggagaggtgtccgatgagatcagcaacctgggggaagtactggccaagatgcaggacggtgaggccgaagaacagcacgaacccaagaagatgcctgaacaaacaccaagaacgcccacacgatgagcagcaagaacacagcacacaaagctgaaccagaatcaaattcagaaaaattcaggttgaaatccatacgtccagatgttgatggtctcgttgtgccaggagaagaggctgaggagggcattgaggatgggccactcggagcggtagtagtcgaggatgaactcgttctccttcatgtagtccggcagctcgtggtagctcaccagcctgcactccttcctcttctcctccctcttctgctgcttcctcttcttcttgctccctcctcccttcgccggcgccggcgccgccgccggagcaagctcatcatggtaggcgctctccatggtggccatggctgcctcctctcccataacttcttggcctcttcaagggaaaggtttgtgcagtgcttggctggctagctgtggcacggggttaaaaagggaaagagcctaggacacaggagatggagcagctttcgcaaacaagccaagaaaatggtagctagagtgcagtgctatccaagtcagtttctttaattttcttctcaatgcagcatgcaatatcagcaaataatgccaataaatttgatgctacagcaatgaaatactgaaatggattttttttttgtagaaatggatattgatgagatgatgagatttgtaggtgcaaatggcgtgagattgcgtgtattttgggtgagattatacgctgcgagaacaatggagagggggggttttatttggtatgaggtggaagaggacaaatacaggtagagtaggaggacaaccacatcaatactgttgctaacagggcttggaaaaagatactactactacagtgatgtatttttcttctataaaagtccatgtcaaataccagtgaaatattgattaaatgcctttggacacctaactcaagaatttcgatgtgtctgcattattgctcagcatcaatattgttgaaatcattttttatatagcctgagggtattggtttatagttaacactcttaatagtggtatgtcatcttttacacagtttgacagcagtggtggatgccataatggcgtagccaacaataggttcaatgtaaaatatgtagtatatacgatgataacagagaagaggagaaaagagatggtgcggcagtgcataaaaagggagcataactaggtgtcaaaaaaagtctagcaagttcattatcactttcaccacacaacatatttacgcttacatgcatgtatgactatgtgcatctacgatgtagagagaataaagatataaaaccttttcattacaaaaatatgccccccccctaacattatatttgacgctacacacaaacttatgtcgatattatatgacgtcaaatattaatgataggaggcggtatattttctttcaccaaatagtatagcaagctcattatcactttaaccacaccacgtatttgcacttacatgaatatataattgtgtacattcacggtgtaaagagaccaaggatataacactctcattataaaagtatatttacgctcccttccgttgttatatccttcctccatctcatataaaaccaatggacatactaaaatgtgtcaatattagtactataggttggtttctttgggacggagggagtagtagagggttttttttttcttcaaattgacagcataaagaaagtgctttgaaatagaattaggtagctgttgtttgctccgggtccatttctgaagttttgacccgtctatgttgtaggtgtcagctggccatccatccctccgtcttcccacctgtcacaataaattcttcagcaatgggcactctcgcagtccagcaagaagctgcaggttaattttctctctgtggcgtgcaggcaaccgttgaaaattgaggctctgattgcttcattagagataatgaaagctttctgaattcaacttcagggaggttcagattcagattagttgggaagctcacaaccaacctgagctaacccaatcttgtactgtactcgtactggtatagaatggctgagtttcagactttcagtctgcagtccgagagagatgacttgtctgattggccgattcgtcgtagtacttcaccgttttttgcgccttatgaggaaacgtgcaggtttgcatggaatgattggtgagttagccatgaatgtggcactgaacaggaggggttaccaaagttgacgcaagagaattgctttg

SEQ ID NO: 139 - DNA, 593 bp, Oryza sativa
atgggaaaggtgaaaggttggaaaaaaaatttgggacttaacttgggctttttaacttttccgtcacattgaactttcgtacacacataaacttctaactcttccgtcacatcgtttcaatttctttgaactttcaattttagtgtggaactaaacacagcctagtagtatgtactgaaccagttcgtcactaagaagtgcataccattatctgtcggcagccatggccacatccaacaattacacttgtgtgggcttgcgaaaaacccacacaactccccgccggcccaccaccaactccaccaccccacacggcggtggaaaagcctagacccggaccggaccggaccgacgccctcgcttggctgccaccgccgcgcgttgacggttagacgccaccgcgggaggagagcccctccctccccgtccgcgtccgcgtccgcctcatctccgccgccctcttactccccctccccttcctccactccgtccacctcggaatcgtcggcgcgacgcctccaaacccccgcatcgattcctccctcccacctcaccccacccttccgcccgctcgatccaccgccgaagcgggc

SEQ ID NO: 140 - DNA, 737 bp, Oryza sativa
caagcagaagagtttattccagagagatttgagaatgctggtattaatttcaaaggaacaaactttgagtatatgccatttggagcagggcgacgcatgtgtcctgggatggcgtttggtctagcaacgttagagctcgcacttgcgagtctcttgtaccattttgactggaagctacccgacggggtagagattgacatgaaggagcaaagtggggtcacaacacggcgagtacacgaccttatgcttgttcctatcatccgagtgccattaccagtgtagacgcacgtagctgctatctacgagttattgaaggggaaaatatatagtgcaaacctaaaaactagcataggatccaaaaatagacgtctaagatttgtctacatcacacggagtaaaattttcactccaaattttaaccatgagtaaaagttttactcatggtgatgtatatggataaatcccaaacatccattttttctattgtacggtaattttcaggtttgcactgtatatagagtttgcgctacatatttggatattccccctagtgaagcaccccaacatctttgggcactactgttcatataataagagtttgaacccaaacaattaattatttttggaaccagttcaattggctgtgcaacttacatgtgtaggccccattatgtatttgaatatatagttctatttgctattcatccttatcatttgtttatatatagttttattat

SEQ ID NO: 141 - DNA, 1478 bp, Oryza sativa
ctaataaatatgacacataaatctgcaaatataacaataacaaaagatgaatagcacagagaaactgtatattaaaatacatatcggaatgtacaaatgtaattaattgcacagtgagttgaagtagttttgtaataatttaattgttaaggtttgaacataggtaaacattagtgaaccaatatatttggtcgctttatcaagaaataaaaaatcacaagctacttatctagcacctagctagctgcgcgagtctaacggtaacggcactcgaatcacagggacaagcaaaagatcatggagtcgccgtgtggtggcccccctctcctgcgtcatgtctaggtcaccgacttattttgtcagataacttccagtcaaagtgatataagagactcgctagtacgagctctaaattcactagaccaaatgccatcccagggcacatccgtcgtcccgctccaaacggcatatactcaaagttcatccctttgaaattgatatcaacatgctcaaatctctctagtataaactcttctgattggtcccagtacttaggatccctatttatagcccacatattcacgagcactattgttcctttaggcacatcgaaccctagcacttggcaagtagttcgacactctcgtggcagcagtggtggtcttggcgggtgcagccggagcgcctctttgatgaccaagtacatgtaactcaaattgcttaggttttcttctgtgactttgtgctgaccaatgaatactcgttggacctcatcttgtgctttttgcataactcttgggtttctcatgagtttagccataatccattgtagcgtcgtcgctgtcgtctcactgcccccattgaacaagtcctgtgtaccatgaagccaaattttcaggtaactacattttgtggaaaagccatggtaactttttgctaatttgcttggtaaccctgtaaaaaaattatggtgctgaaaaatatcattgtatcaaaaaacaaaattatagtatatatgtgtcattgacgtgtaggttcagtcctcacgcgttattcttactagcataacactactaagttacaacggatttcttttaataaaaatagctcattgtatatattttttgaagcccataacaaattatttttattatctaatatattatatatgattatgttaattttgctgttactttttaggtgcctattgagctagagctcttaggatttgtgggggttaggaaataagcaaaatctctcgtttgtgtgtcctacaaagtggcaggttattactagaaaaaaaatgctcgtacgttgcaacggataaagattatttttatcttattattattatatggtttagttaaggtgaaattcactgtgagaattcgtttcgatatatatttttctagaaaatcataagctgcaattagaaatctggtcatctcaaattagcatgcgagctttttaaaaagact

SEQ ID NO: 142 - DNA, 1028 bp, Oryza sativa
cccgccttgtgctttccttcctatcctccatcaacagaatgtataaattttatgtagcactgtaaatatgcatgtttccttttaacatgcactaacatatgcatgacatgcattggccaggacatgtttgcaggtggaagtgaatcaacatcaacaacacttgaatgggccctgtcagagcttgtgaggaaccctcatgtgatgcaaaaggcacaagcagagatacgacatgctttgcaaggcaggactagggtaactgaagatgatttaattaatttaaagtacccaaagaacataatcaaggaaacactacggttacaccctgtagcacctctacttgtcccaaaagagtgtcaggagtcgtgtaaaatcctcggctatgatgttcctaagggaacaatcatgttcgtaaatgcatgggctatcggcagagaccctagatattggaacgatgcagaagtgtttatgccagagcgttttgagaaagttgcagttgatttcagaggcacaaactttgagttcaaaccatttggagcaggacggaggatgtgcccaggaataacatttgcaaatgcaacaatcgaaatggccctcactgctcttctataccacttcgattggcatctccctccaggtgtaacaccggatgggttggacatggaggaggaattcggcatgagcgtttcaaggaaaagggatctttatctacgaccgacactccatatgggacttgaaacaatatgatgaatacacgcgtgttgtcatggaaaatgttgataatagccgaatggtgtatgtacctagtagaaaaaaaatactttctgcaaattatagtacctatacttacaagatgtttgggaggtaggaactcctgagatattcagatattccagagctccgagtgcattagtatagaaattcatgcacgaacacaatatatataaggcgttgctgtcatgtacaagagctgtgttttttaaagataaaagtactgtacgtttccagttgtaatgtaacaaaagtttgca

SEQ ID NO: 143 - DNA, 518 bp, Oryza sativa
ccctctcctcccgcagttgatacagcttgtgcctgaacaccaggcgctggtacctgcaccaccgaccgaccgaaaccctaattctcccaaaccggatgctaaaccaaaaaagcacaaagaggaggggacaaatctggcgcggcgactcacagcgtctgcgcgtcggtggcgaggccggagaggccgatgtagagcttgtcgtggatcttgaacaccctctggaagtccgtcgcgacggtctgcagctgcaccccgagccgccggtcgctggcgatcgcgaagcagttcttccccaccatcgccaccacggcggaaccattgtactcgaagatctgcgaggcatgggagaattaagatccgtggggcgggcggcccggccggccagggagcggggcggcggggggcactcaccgacatggccggcgcggcggcgagttctcggcggaggcggaggcggaggcggaggcggatgcggatgcaggcggtcaggttcgaagtcgaggaggagaatcggagga

SEQ ID NO: 144 - DNA, 1353 bp, Oryza sativa
tactcggtcgcttgaagatgtcaacgatacgcagtctatctaatgaaatacatttaaaccaagtgattggcatagatcggccgatgtgccgagataatataaatcacttaatatctaaatgtgcctcaaagtaaagattgtgtatgctcgcagcatagccgatacagcaaacctagcatgtatcggctagtactccagtacgactctatactaagataacagggtaaatgaaatatataaaacgcagatcaatctagcaagtaagatggactggcagactgataaagagcaagatatgcttcaaataaacgagatcttaatataaagggcagatttagaagatcgagaaccataaaaggcacaagacaactaaaccagataagatcagctgaaaccccgatgctatctctattagaaatcataggaaaagctagataaaacgattcaagacatcacttaacagatcgaacctaaccgatgcagcattatgcgtgaaaagaaacataaaatctaaacaaatcgatgaagactcattcaagatggtagatacgctgtataatctagctcaataccgatatctaaatctatcggttcttttcgatgatagaggctggccgatgaagttagatgacgggatcgatctaggctatacagcatatatgataacttggcgatttacatagacaggattagagtgttatagagatgtaagcactaatcccgataatgcaaaccgccataacaagctttacctcttcgtcggagatcgaacttgatgcagcccaactcgaaagcaaagaactcgtcgaaacaatagaaaaaaggtggcgatgcgccgaagtattattgaactgtcgtcccatgattacaaggtgtcgggtcatatttatacccgaggtacataacatgtccttgctggacacgactcttatctctattacaatttaaaatatgaacaagtcccttaggcggactcttaccaaaaatatctctaaagaaaagcgtcatcggcttgtcttcatcggatttagcgtcagccgatacatacgacaggcgatgccgcctgtagccgattcatacggcagccgatgatgctcatagccgatacgcactctcccttccttaaacagaattcctccaaatctggctttgactctagctttgaacccagcccatggccttaccaaatttggtcgttaacaattatctatgtttttacatgtgtaaacaataattattatctttattaatattattatatttatataaggtacctgactagttttttaataagtggaaagatatttttattaaacataatctagaatgctataaagatttataatattgaac

SEQ ID NO: 145 - DNA, 3917 bp, Oryza sativa
tattttgtcttcactaattaatctatgtttggtgaggcacaagaacacatgtttgattaattacagtgtaataagtcatatggacacaggagccgagaggcccgagagtagactatgtcaaaacgattgagcagaattacaaccacaactttaattctacatgggaacaaagatggtgcacgtatgatttggttaacatatatggtcgattttgctgcaaagcttgaggataaaatactagctaacaagtcttttctttaaaagaaaactgaaaggggatgtgctctatgtaaagactaagatatcaacactgtaagcagtaaaggttgcacaatcctcgcaatgtctaacaaaatttctgtttgtgtagaatccacagtgtatagacaaagctagcgcgagacaactgatctatttctgaattcattctcagtatctgttagtttaattacaaaccagtttacatactattgcgtttaacaatttttttcttcgatggagaatgggaaaaaaaatgtgccaaatatggtctttatcaatgcggaccatgcatgattcatccgaattttcccagcgtagaggacttatctggctagggagggtacttctgttcactatataaactgggctggaatgttgctacaccatctttcataccaaacctagccattgggcccgagagcacttttcaaatagaaaacacaaaaagccactgtgcacgcggggatctcccgttccacctcatttagtcccacctcggaaaactagctccacacatcgcagcataaatagccggattgcgccccttgctgtcgcgagctcagcagcgcgagcttgtaacccgagcgggggcattaaggtggtgtggacgttgcggtacggctgcgggcctgggtcggcattgctacagatggctcgcccgttccaagttgagtagtgggccggcggggcttgtgcgaaagctctggggccccacggttcctagagtggcaggcatggcgtgaggctggtttcacagagcagcgaatactgcccgcttccaacggtggaaggataacgggccgccgcactgctggcccgcttgggtctcgcatcctactccaacggaccaccacttttttatttttcttagaaaaataaaaacttcgttctgtttttccagctagctagtccgtgcacaaaatctttttttttttggttaaaaaagaaaaacttctttctgtttttgcggatagcaggagaagtgtccagttcgtgacttgaggtctctttggacttggaagtacaagattctcatagaaaaaagaaaatagaggattgcaattccttggaattttttttatacatgccatttgaaaaagggatttgagctcaccaaattcctatacatatgctaatagtattacaagtagaaagcaaatgaattttgtatgaaatgttgtttggaacacatggttgtcctgaacacaaaatttagattctatcctacgccagctagtgaaaaaataatgttgaatgttcagaaatccttccgaatttatatgtttttatggaaatcaaccaaattcctatgtatgattctcatattcttgtgggattcggtagcatatgacattctaggattcctttggaacaaagaaaaaaaatagaggaaatctaaagtgttaaaatcttatggaaaataatcatacttgatcctctgtaacaaaggataagcatacgcaaaatcctttgaaactcccattgaatgactcatttcattcatgggaaatttggaggaaagcttgtaagaagtatagcttcatgttttcccttgtgtcttagattcctctaagtttcaacagagcaagatattctgttagtagttttttttttccaaatcctgtgtttgaaaggagctaatcctacgttgttttctattcccttgaaagaaagggaaaacagaggaatttcaaagaatttgaattcaatgaaaaaatttcctatgataccctttggaatagaggattagatctttaaaatttctttgaaattcgtatggaattgctgcttgtaaattttagaggatttatatcctatggaatagcatgtttcatgtgaattttagaggatttatagtatgggctccaaaacctcctggaatttttcctttgtccacctcttccaaatcctgtgtttgtcatgtgctccatccaaacagcttcctctgtagttttcctatgttcctcgttccttgggatttaataacagttgttacatggctaaaaggattgtgattgtgatgttttagtgcacttgttttttctgtcccaacaatccaacatgcatgcctgatgcctggttagcatgcatcatcaaagccccatgcagtccagatttaaaacgaggtgatcaccaactgcgttggagacttggagtctttaaagtgaagagaaaaagcacaaaggccatcacaggacactggttagcagataccagcagccatcaggcaaggcaaagttcctcacaaataatggggcggctaccgaatttgttcatggcattaaagcaaggaaaacatcccgtgaaaagatggacaacttcaacatttctgttcaaacgggcaggcttaggatacagcgacacagagacgttctcaagctcacatattatggatttgtatcacacagcaaggttttaatgaagtccacagatcccatatgggatatcaacacacgcattttagcataacagtatttacgaatctaacaaatatgagtagcctttgacgtgacaatggctcatagcagcttgagaatcatatctgcaaaatgagatacggtggaagttagttaacggggaaaaaggtttaatgaatcaatgcatataggcataggccatttcccatatatggaaagtgcagtgaatatgtaatatgcatgcattaaagaatgcatttagtgaactcaaatttgtggcgtgcatttacgctttaagttagcaagcatgtgaaaatgcgatacagtaaagtttgaagacatttgtatacccttctatgattttgcatgaaaatacaaattggccttgaaagactgcatcgcatagagaaaaggtatgcgtgcaagtcactctatacacactgtctcgataaatgcaacaaagttcactatgtcctgataaatgcaacaaagttttagtaacgttcgtccaagtgttagggcttgtagccattgttaacctccttgtcaaaattttggtaagatggtttgatgccaaattttttttggcaaagatactttaaccttttgtctagccttcccaaagtattggcattgtgaatttttgcaacagaccaaatgagcctataaaagctttgccattaccaatattttggtgtggttgggttgagccttatatggtgtttggaagtaaaatcaccagaaaatgcagtcactccaagatgtagcactaagggggtggtgtttcacataaagggaaggtcgacacaactacaaagggcaccacagcaggatgttatgaaagccagccctttcaacacaaacaagggtaacaatagtaatcaaattacaaataaatggagatgagatttcatcactgaggaactcaacataaaaaatacatcatgaaaaatgttactttatatattcggtgaagagcttgtgctacttacattaacaaatgaacattctgtgagtaggattaaataaacaaactgatagtaggattaaataaacattttgtactaccaatattctgtgagtggcttcctggcatgtaaggtgcagaaaactgcttgcgtactgatttaactgttcaaataccattgagaaggcaacataaaaacacccaaaacctttttatctaaaagctaggccaaaagggtttaacatatttttacatccaaaacatgttgaaca

SEQ ID NO: 146 - DNA, 2240 bp, Oryza sativa
ttttacatccaaaacatgctgaacattcaagagtaaaaagacaacttttatgtttcagcaggtaaaacaatacaatttacacaaaatgaataggtgttatcatgatatcatctgagcacaccaatgatcactggtctcacttcatacatgctgttaagggtgctcctaagttaaagcagaataatattatccttgttatttgctatcctcctcactttttaggtagtacaagaagagtaaatcattatcaaaatatcaattccgtagtaagtcataatataggactaccgcatgttagctgttaaaaatcctgaaagtcattttatgtcctatcacaattcacaacactacatacctcccaagtaatcagccaacagaagagatgatttgccgcatgtatgatgctatttgatattggaatacacagaaatttccattggtgaaattaaggctgtttggctgcctgggctgcatctgcgccacagacaacagcaacagtgctgcaagcagcaaggaaacagcgggcagcagcagccgcagccacagcccaggtagccgaatggcctgattgttaggtcagtgataacagcatgactcattgttttattggcatccatgttatgcaatgacgatgtcttcagcacagggagcatgacatgaatatgcaacacctcagtaaccctcgccatttgacaggtaagatgtgaggtatggttagtcttatgtttccacaaatcttaaaccatagcagcatagccattatttttcggtgcgcagctgcattcagaaaggccaaagtaggagtataactcaaggaaacagcgtggtcttgtagatactagatacacaccacataaccaccttcacattctccatcaaattgataaaaactaaaacaatatttcacaagtgcaacagaaggtaagtattcatgtatgatgctaggggtggctatgtttatcacctgaagtgaaatccctcagccgcgggccttaagctcagccaggcggcgggagaggtcgtcttcatcaacagccttctccttctccttggcagctggtatggcgtgagcggcggcctgcggcaacccaacggagacctcaaggccgtagtcgtcggcgacttgctgcatgaggctgttgacctcggtctcgggcgtggagagcgaggtggagccggccatggcgccctccatgaactcggcctggacctccatgttgacgaactggcgctcgaagttgtccatggtctcggacatcttctgcaggttccccgtggcgagcgcggagtcgagcgacttgacgatgttggccatggacttgccgatgacctgcatcttcgcctgggtgtcgaggcgcgcgacgacggcgtcgaggcgggaggcgaggcggaggtagttcatgtgctcggtgcgcttgcggatggcgttctcggcgtagatccgcgcgccgtccatgttccccttctcgatcgccttcttcaccttgagcttctgctccttctcctccttctcgcacttgcgcgcctgccgctgcagcgacttggaggtgaacttgaggtcgaagatctgggtcatcagcttctccgggttccccatcgccgccgccgacgagctagccccgatcgtggatttggctagggtttgacgaggaggaagaggaaaggcagatcggattgggggatttgggaacgcgtcgtatttgcgaggagacgagacgcgaattggggatttttattattggggagatgggattcggttccgtttgatttgattcgaggaggagacgaccagtcgaccacgcggtttggtttagtgtacgccttaacggcgaagtaatccccgccgtttgtgtgtcgctgcgtgtggggtcggcgtgtccaactccaaccagtgtcgttggcgtcaccgacgccgtttggataaagcgttttattgtatctctaattttggaataattaattactagaaaatagatgcggccttgccgcacaatgcaccagccaatatgaaatattccatccgttatatattgatcatcaattgactaaaatcaaaaatttcaagttgattattatgtaatgttggtgtagttactacatctaagcatgaaaattgggtttgcatgcatgcatataggtatttgaggtagtaaagctctcttttcttgttgggggggggggagttaaaagtgtgcatgtttccttattcttcaccacacttacttaagtttttttttgtg

SEQ ID NO: 147 - DNA, 741 bp, Oryza sativa
tacgactactgcctggtcctcgaccagcgatgtagcgtttctcccactacttccaccttaagtggttgagttacgactactgcctggtcctcgaccagcgatgtagcgtgtctcccactacttccaccttaagtggtcgagttacgactactgcatggtcctcgaccagcgatgtagcgtctctcccactacttccactttaagtggtcgagttacgactactgcctggtcctcgaccagcgatgtagcgtctctcccactacttccactttaagtggtcgagttacgactactgcctggtcctcgaccagcggtgtagcgaatctcctattacctctatttcaacaaagttgatagcaggtatacaatatcgccaagtgttttacccagagatcccttaccacgacgacacctagcgttgaaacctatcctattgtccttttacgccgtcttgacaaggcctccgaggaacctaagggaacttcggctggggacacccagagccgataaggccttgtcggatcctgtagagacaaaagaccatgtaagacctggtcgtgtaagagttctcgccgtgcgtattaaccaagccgtgtgatcggaaattgagttttccaacttcacagctgggggctaggatcagtgcttgttcaaccaaggcaggtgtcacacccgaagttttcctcccaagtcaaaatggtaatttgcaaatgaccctaagaaaatgcaggtgaaatcagg

SEQ ID NO: 148 - DNA, 2706 bp, Oryza sativa
tgcttctcgggccagcggccggatccgcagcccacgataccttcgccctccgcatccggaagacaactcccatattcccaagccgatgtgattatcggcgcaaaaatctagtagtgagctttggtgctggacaaagcaccagtgagtgtgagttgtgcgatacagctagcgttgcttgcgtccattcacttactctctgcctcttttgctcatttgcatcaccatccagtatcccttagtataggctcggtgattttggtactcgcctgcaggcatgcatgcatgcatcctacttgggtattttcctctctacaagttcaacgaaagatctaaagagaaccaatgatcctagggaagacactgcttgattttctttgctgaaaatatctcaacacgtgccttaatttagcaccaattgcaggtaattttaaccagttctttggtgttctaaatggaaggagtataaataaaggacacgagagggtggttcgccgcggcgtcatcggccgtgacgcgcaggtggcggaggatccggcaggccaccactcactcgcacacgccgcctcctctcctcctccgctagttagcgcccctcccttctcctgatccgggccgatggccagtgccgtccctcttctttctccccgggttcaatggatctggcaagtctgtattggcacgggcgttctcgagggtgactcctgtcggtgagatagaagcgttgaggaagggcggcagcatggcggcgggaagcacaggggagggcgaggtggccaggcgaatgtgaagaagacgagcccaacgccgttgagggagaacatgaagcgggtggtcggccgcaacgcgcgggtggcggaggagccagtggattagggtcgagcaattctgcaaataaaaaatacagtaactccgtagttttacgatgaggtccaccgcaacgaactttagccgtcgatacttaatcaaacggtgcaaaaggagtgccaaggagacacgtggccaggtgttactggtttcgggccctacaatcggtatataagatttgtcactcttaggagtgatgataaatgatttgccactggacccatatgtcatagatacgtgagggctcacatgttatagacagcgagtggcagataattaattgccacatcttaaaagtgacgaaaagttaaatatccctctaatttcacaatcatataaacttttttccaaaaaaaaaatattacagttccttacaagtggttgttggtttggacacttttccaagcttctaccgctatataaacggtgtgttttcttaaaataaatatataaaatttgttttaagggtgtgtttagttatttgggtgtaaagtttttaagtatacggacacatgtttgaagtattaaacgtagactaataataaaacaaattatagattccgcctgtaaactgcgaggcgaatttattaaacctaattaatccgtcattagcaaatgtttacagtagcatcacattgtcagatcatggcgtaattaggctcaaaagattcgtctcgcaatttacatgcaaactgcgcaattagtttttccccacattttgtcagggttatggataccacatacctaatacatacctaatagtagttgactaaatctcggcaggatccaccacataccatgtcttatacggaaactgacctcgaaggagttccagataaggaaagacaaccagagttctacatggaaacgacaagtactactcgaattatatccatattggtttccctagttctacttggacaaggggacacctatgggtataaatacaagcccccctaggaggacagggggacagacatccaccatgaagggatcaacacccaacacaatcgacatagaagccacaacatagaagcctacatatgccaagacacgccgccggatatcgacttcagggataagcacggtctgacgctgtctgttatacaatatcaatttttatacaatatcaattatgcgagtgtttccgatgttaaatcgactacggtctgacgctgtctgttatcttctgtataaatcatgcttgtttacggtttacataatgcctgatatttacatctgctcattatatcctgataattctagaagatccatgcagtttttcgaatacatactcgatattctctgctatatatcctgccttctagaaaatatttttcaggaataattgagcactcgagtaggtcgtggtcgagtacaccgcattatcgagaacgatctcgacaaatgcagaatcgtcgcgcccaacctaccaacgaagaccgacaacctatctcatagcaccggccatcgctggattactcgagaaaaggttgttaacggataattcctcgcgaacgccgtcggcttgatcacccgacatgattgcgaacggacatccggatatgctacaagttgtgtgtgagagtcatgctggccacatgatatgcacatgtaataaaccaactttagcgcccctataggtgattaagagactcctactcctggttctcgaaccagtaagacgcagtgatctctctcgcctcactttaagtggtcgagttacgactactgcctggtcctcgaccaacgatgtagcgtttctcccactacttccacgttaagtggtcgagttacgactactgcctggtcctcgaccagcgatgtagcgtttctcccact

SEQ ID NO: 149 - DNA, 749 bp, Oryza sativa
tttagtttctagattttacatgggtactcatatatttacggttattctttttaagtgatagacgacgtatacgtaaatagcgagacacatataatgacctcgttaattttaagatatgccggctcagtctcttctgaaggtgttcataagatatgagtatgtgcgttcaaggagtacgtgttatagcgtctgtatttatattgcctttaaaaagagtgtatacaactagacacgcatatttaatgtacgtcatactcccatcatcaaacatttagggtgttttggaggggttctctccgacacgcaaaatgaagtatacattaacgcattattaattcaatatattagttatttttaaaaaaactaatatgattttttataaacaattttttatagaattttcttaaaaaataaattgttcatagaagtttggaaagtatacgtgcggataaacaaggaaggagaagttgtgaacataggccctgtttaatttctaaaaattgtcgcaaaaacatcacatcgaatctttggacacatgtgtggagcattaaatatagataagaagaaaaactaattgtacagtttgcatgtaaatcgcgagataaatcttttgagcctaattagtccatgattaaccataagtgctacagtaacccacatgtgctaatgacgacatgattaggctcaaaagattcgtctcgttgtttccaggcgagtagggtaccgagctcgaattcgccctatagtag

SEQ ID NO: 150 - DNA, 4946 bp, Oryza sativa
tcaccacccctccggtcgtcgtcggccctccggtcacctacccgacgccgccggtgacatacccgacgccgccggtgacgtacccgacgccgccgacgacgacgccgtgcccgccgccgccgccggcgacgcagaggtgcccggtggactcgctgaagatcggggcgtgcgtggacctgctgggggggctggtgcacgtggggatcggcgacccggtggtgaacaagtgctgcccgctgctggaggggctcgtggagctggaggccgccgtgtgcctctgcaccaccatcaggctcaagctcctcaacatcaacatctacctgcccctcgcgctccagctcctcctcacctgcggcaagaaccctccccccggctacacctgctccatctagttcagccgccattcccctgcctcgccatggatggcgcccaagctcaagctcttgtttgtaagtgtgttactctcttctcccatcgcaaataagcgtcagaaataattttgctatgtgtatctacttgtggatttagaggcaggatttctatccattatttaataaaaaacgtcagaaataattactctctctcgaaaaaaaacagataacttttatacgtgaatcttgaaatggcaaagggtatgtctagattcgtgtgtaaaagtttttttttttgagagaggaggtatatatgttgtctttgatttgatactgatatagtgtgtttttttgatggaatatgcaggttggctactcgatctcggcttattgatgtgttaatgatgagtacgaggtgtattaatttattgttggttttaatttgttagtgtgtggaaacatgagaggatgtcgtctgctagctagctagaggaacggatcaatctgctaacgatagattgatgttcgtattgctgtgttttttttttaatttgtttcaatgtttcagcttaattgcatgcttcctcttcttgattgtgtggtgtgatcaataagacagcaactgttcagaaattgtttccgtcaagatcgtatcctatcaagaaattaattaataatgcctgcagcctgacttaagcgtgtaatcctacatacttccatgtgcggacagtgcatgcaatctgatgtaataatgtgtcggatctaagcataatatgtctgagattaatttaattaacctgttttcttcagacagatttatttgtggttgattttggcactgatattgggagagaacacacgtactccctccgtcccattttaaacgtaactatagatttccgtatctaactttaatcgtcggtcttatttgagaaaatctaaaatctttaaaaaaattaaaaaaaacataagtcacttatagagtactattcatgttttatcatctaataacaacaaaaaatactaattataaaaaaaattttaaataagatggacgatcaaaattgaactcgaaaacttacggttgtgtttaaaatgaaacggacgagtatcactcatagaatagttgtcggagctactccctccgtaaaaaaaacaatcatgagtttaaacctgaacacaatgagttgggttcaggtttaaactcaagattaggttgtgtccagttttaaatttaaaattggggttttttttttctttggaacggaaggagtagctaggagagctagctagcccttggatcgaaaaaatctcacatgcatgacattgtgagctgtgacatattactagcaaggagatctagtatagtcaagtacggtcggatagcgagagaaaactatactgtagagaatactttgacgactgcataggagccggaatgctcgatcgatattctgcattctctggagggtaaccgagaggcatgattggtgcaaaagtgagggcaaagcatgtgcagactccgttggcagtatgccgcccgtgagcgaatactgagcagtaactgagttgatgtgatggacatgtaaccccgtgtcattcttgtcttctgtttgtagtagctctgggctgtgcatgaaacacggcaaatgggcaatggccatatgtgatcttaccttggattttatactgaacagactttgaaaaggctgctcgtgagtgtactggccaatatataaagatagccaactgtgtaaatacaagtggcttgaaatattttgcaactaaatttccatataaaatggtacttggttcttctcacatgatcactagtactcactagtgtgctgcttgcagaaaggcaaggatggaactgcacagttatgagtgcagacatgacacaagtgactaattgagttaaatctatggattactctctgtccccaagagactcaaatcttaagaatgatagacaagcatgtgtgtatacattcatccttacttcttccgtcttaaaaaaaaataaaaaaagataacctaggtggtggtttgacacgagcaacatagcctagatatgtcattgttcatgttgcacaggagaagcatatgttttgcccagtatggaacgattacaccttccaatttccaagagggcatctttgaataatctggtacagtagcgcacaagacacagagaaaagaactcactaatcaaggctacaaggatttcaccaatatggccatcggagagcatctaaagctaaagctatacacacaccaaaatgatctttgcgaacatcagcgagtctcttcatctcttgctatctttcttttaatttatttacctggcggggtttcgatgcggtccttgatgatcttctcaccggatctgccttctcgcccttgctactggtgctaactttgtttggttcagcagtctcaccatcatcttcactatagtcactacctggtttctccttgccaccaccatttttccttgtctttctggaaagggcacctatggcatctctcttttgctttcccctggcaaccctagaagttgctcctcgcttctttgtattcaaattatcagcatcttctggatctgtgtctatttccttcgcatcatcgttctctgccacttgttctgggttagcaatgactactttgctagattgcattccagtcagcttctgcagttgtggcacgtatgctgtagtctaaatagtgagagtacaaatcagagggtagatgcatgaatgttcgtagcactagaaagtgtagtagtactgaagcagataagagcttaccctgccaccagctgttatgaactcaattttctgtcctgcaagacatttaaagtagtgggtaataattaacatgttcgattatacaccatcatatatcagcaaaactacaagcgaacgctttgctcaattttattcaagacaataacgagttcatgataaaacttgaggacaatctcaccattgactttaccaggcttcttgccccatcggtgatggaataaccattccacaggaaagcagtcacaatcagcatcaacttcaacagcatatttcacaacctgaaatatgctttatttcaggcataagttctccgtgattgtacatcagtagaatacactaaaattatttaaaataatgtcaaattacacaacctcttggatgctttggtgtagtgcttcacaactctccctggatagacttgaagcaatctgtaatggatgggttctcgactgaaaaaacaacatgaattcataattaaaatttatgcatttcattcaagctctaataatatttgtattaatacctggtaaagcacctcatctgcaatccaattaccaattcctgatatgaagctctgttcaataaaaaaaaaatcaagtcttctgtttgtataggagatacaaggacctaatcccgtatattgtagaaacaattttgtggagctaaaaactcatattggttttatggtaataaaatcacctgatcgagtagaagagcttttattccaatcttctttctgctcagcgagtccgcaaaactgtcagaagacatcggctcaaagagagcatctggtcctaactcagaaatcgggggtacagtttcgggctgcaaatcgttatttgattagggacatcattagaaaataacatgaaaggaagactctgaagatttagattcaactagtcaaagcacatacatcttcaaacaaccgaactcttgcaaaccgcctcttatcagtgaaggaaaactctaagccatcatcaagctggaacaagttaaatgcattagaaacaaccaacattaaaagagccaacctatgatatcataaaaggacataaacaataagaggagatcaaattttgactaaacaacaatgcctaggcatgcattgcgtgttctattactattcaataaaccttatatagcagaagtaatattgacgtgtttatatgatagcatgttaaccctgagacatggcacgtcttcctttctggctttctggagatcacaaaagcactactgtttgtggcgatttgtcttccgcattttggattagctagtccgctagaggctcagccaaaacatgttttctgagctatatagcctaacaaatcgatcttgtgtcccagctaaacgatgacagttactacctatccatctctctctttataagacccaaccaaagtagtacagtacagtactgatgaacaacaattccatatcccctttagcttataaactgttaattttgatctcacatagcagcaatgtactgaaaaaagatgctgtgacagctaggagatcttacttgaacaaaaaatttggagtacttggagggccactcgtctgtagaactgacaactgatctgcaataattttttgaatcagcatgtagtccattactgtataacaaattccccagcatacaaattacacatgcctcttgtacttggtcacaggaactcccttaatgtagatcgcgcctgccatccctgcaacacacacagcaatttgtcactccaatttaccagtagcaaaaagcaat

SEQ ID NO: 151 - DNA, 3951 bp, Oryza sativa
tttcctctgtgactctgtgctgtccaacaagcaattgtcgaacctcatcttgaccttttgcatcacttctgggtttctgatgagttcagccataatccattgcagtgttatggccggtggctcactgcccccaatgaacatgtcctacacgatacaaagccaaaatttcattacttgtaagcatatattcatggaaaatgcaatggcaacaattttttcaatctattatattattaaaacagttttgaagtgaggcatcacgtctgttgtaaatgctagaaacttcctcattaataaaaaaaatgatcttaactacccgattttgttggtttcagattaattataatggtatagtttgactgatatagttgtatacaaaatataattacatctatagaaatataagttaagggttgtatatgaaatttaagcctatagaaatagaatgtaagagttgtatggtacgccatccgtgtatgagtctgtttttaactttgtttgcttttgaaaatacatatccgcatttgagtcatttttaagatcattcacttttgataatacagaaggaatcatataagaaatctgtttaaaaaaactcacatgctaacctgagacgatcggactcctaaccaggggtggatccaggaacaaaaagttgggggactcaacataccgtgtacaccgatataaacacataatctcagtattaaactatgctaaaatgttattaagagacctttagcacctcctatcttatcaaccacgacgaaaaaattttaggaggaactcaggggggtatccatgggtctggtgggtgttgggggactcaagtccccctgcacccatgttggatcctcccctgctcctacctgcagctcatgattttctatatatatatatatatatatatatatatatatatatatatccaagcaaactctcataacgaattttatcttaactaaaccatataacaataataagattaaaatagacttcacccgttacaacgcacgggtattttttctagtatatatagaaataaaatttcagagctatatattatatctaactctacgtgaattatctagattcgtgcaaactgcagagcaataccctagtttaattaattgacatcactgttaaaaaaaacacatgaagtcgcgaaattccattatttgtgtctatttgcaacacttgaaatttatatatgtttgcaacacttgaaattttcttaaacgctttatttatggattcagggtacttactccgatcgttgatctgatgctttctctggatacctccaggtcaccttctctctggatcctgagaagcacgtcgagcaagtcctcgtcgtcttcccgggacgctctgctctcttggtgctcctcgatgatggcgtccaggtaggccgtcattctctcgcggtgccgtttcatccggcgaggcattgtgctgaggagcacggcgaggcgcgatgacgggtacaggttcggcaagctctgctcgccgaacagcttgatcccgcgctccaccatcgccaagaacgtgtccctgtccttgagcccccgcccgatcatggcgcgcgccgacgagtcggcggcgtaggccgacatcagctcgctgaggttcaccgtcgtctgcgccgccgccgacgccaccgcccggagcatccggccagcctccttctcgcggacggaccggaaggaatggacgcgcctggcgctgagaagctcggcggtgcagatcttgcggagctgcctccacgtctcgccgtagggcgcgaagatgaccccctcggatccctccgggaagacgacccggatcatccggttgacggggcgcgccgcgaaggcgacgtcgtgcgtcttcatgacgtcgcgcgcggcgtccgcggaggaggcgacgacgacggggagctcgccgagccggagcagcacgagtgggccgtggcgccgcgcaatgtcgcgcatggcgcggtgcgggagcgccccggctaggtggtggaggtggccgatcaccgggagtgcccatggcgacggtggtagccggccgcaggcgccacgccggcggcgcgacgaacggaggaggaggaaggggaggatgaacagcggcagaagcaagatgaggtggtggagctgtacaacctccgccatggctggtgggttagcttggatcaaatcaaagctcaaacgattttgtatctaagcaatggagtttaaatgtttgcattttgcttgctgttgctgctcaatagctggctgattgttgggccctgtttaggggagccgcagatttcatattttactggttggtaaccaactttagaaaatcgaaactgctaaatgactgtcgacaaatttttaggccgtcgatttcgctttaagatttgtgctgagatattttgctaccggatctaaaccctcttttcataagctagccacatcatcacatgtatatggtaaatttgttcatgttacatctaaattgcatttcagttatatgctagttacattgtagttacactataattacattgtaattatattgtaactatagtgtaactacactataactatattgttatctctatataaattagatataaagttgtatatattattttaatacatatatgtaccagttattattatagtatagttctagtgaaattatatactatagttagatttaaaagttttcccctcaaaaaacactcgacagttttttaagctagtcccttagaaaatttagagatgctgggtttttcagcttttggattcttcattttctgaattctaaaaaaaaaatttgagtaataatatggactgtttgaggaactgaagattctgggtgtatttagatctcaaaatatttggccaaaaatattacatcaaatatttaaacacatgcatggagcattaaatgtccgatctacatccgccgcccaccagtgccgatggctatggtggaggcggagcagatcggatgaggaggcgggctagggctagggagcctccccacgcaaggcaacccaagaggccatcttttctatttttttcttaaatgattctaactacttgatcgcccattggatcgtaatgtttggagaatcgaacgatatatctttcccgagattatttcatgaattcagtagggtgacttttataccttgtactggacgagattagttgaccaacttgttggtaattaaacgaattataagaacaagtgatcaattaactaagactgtagctagcctcgattaatggtcagatcgatctgcatcaactaatggattattttttgaatactccatccaatctgcatcaacaatcttagcctcaattaactaagactgtagctagtctttgtgcatagaacatcgtgatcactaagcatctaagcccccaaagttaatataagaagtacgctgctaatattctcgcatcccccgccaggtgttaactgccaataccctcatttatacaaatccagctaagcaacgtactacacgtgactagcactaggtgcgacaacagtacgtagcaacgtttttctagtttgagaaaatccgcggaacggtcaggggttttatagctagctccataagatgataggctagccggtctagtttcaaagtctaactccttttatttatttgataactagaaaaaaatatttgtgcgttgcaacgggtgaagattattttaataataatattattatacggtttagttaaggtgaaattcgccataggaattcgattggacatattttttttagaaaatcatgagctgcaattaggaatccgatcgtctcaagctagcatgtaatttttttaaatagatttcttatacgactccttctatattttaaaaaataaacgaactttaaaaactgactcaaatacggatatgtattttcaaaagagaacgaacttaaaaccgg

SEQ ID NO: 152 - DNA, 3297 bp, Oryza sativa
ttccccataggaattcgatggacatattttttttagaaaatcatgagctgcaattaggaatccgatcgtctcaagctagcatgtaatttttttaaatagatttcttatacgactccttctatattttaaaaaataaacgaactttaaaaactgactcaaatacggatatgtattttcaaaagagaacgaacttaaaaccgactcatatacggatgacgtacctgtcatagttacgaataaggcatacttactatcctatgacatatgaaatatacagatacgacataccttcgtatgtacgatatacttccatatacaacaaggaaaatgacaagagactatgaaaattatcctcatggacaagtgaatagtagagccctaccttgaggattgggtttatattatatcgtgcagggtccgtagtctccgagttctacttggagactaaggtgattcacggtataaaagatacatcccctgagggatccagatcatcgaatcatagcgccaataccaccaccatagcctacaatccggaggacgtgaagcctactcaccgggagatctcgtcgaaatcatctcgacgaggggtctcgccgccaatcttgggattgattgttctctattctaatatgtagttttccatatcaatctcatataaactggactagagctattaccttatgaggggcctgagccagtataatacttgtcttcttgttttcttgatgtcgtatcgtgtaaattctcataccaacttaccacaataccctattcatccggtttatgagatttctcgttgacagtgctaaagtactggcaaaaagatattcaatttttataatagtagagataagttctttctctaattttcgccttttttaaaaaaaaatcgttgtgtacctccttttaggtccttgatattttttttgtacgttgccaatccctttactttaggttaggatcaagaagacattattttaggttaagaatcaagaagacataagcttcgctgcaaatcctgtaacgccccaatttccgtatacccttaaaaactatttaataaaattctatgttcaaaagtttggttatttgagtgtatctaggtttgagtaccaaagatctcaattaattcattcctttgtgaactcaaaatcttgaccaaaatattctatcctaaattaaatttctaagattcaaatttcgaggttcgagtcccctcctaaaccattcaaaaattcatacaagaactcatataaagtcgtagaatcattagagttccaaggtcctaagcaaagtccctcgaaatttcatttcctaaaattcctggaaattggaaaatattactattccggcacaactaacggaggaggaggaggaaggggaggatgaagagcggcagaagcaagatgaggtggtagagctgtacaacctccgccatggctggtgggttagcttggatcaaatcaaagcataaaggattttgtatctaagcaatggagtttaaatgcttgcattttgcttgctgtttttgctcaataggtggctgattgttgggccttgtttaggggagccgcagatttgatattcttctgcttggtaaccaacttctgaaaatttagagacgctgggtttttcagcttttagatttttcattttctggattctacaactatggatttttagaaaaatttgggtaacaatatggaccgtttgaggagctgaagattccgggtgtgtttagatcctaaaatattttggctaaaaatatcacatcaaatgtttggacacatgcatggagcattaaatgtggacgaaaaaaaccaattgcacagtttgcatgtaaattgtgagataaatcttttgagcctaattacgccatgatttgacaatgtgatgctacagtaaacatttgctaatgatggattaattaggcttaataaatttgtctcacagtttacagacgaaatctataatttgttttgttattagtctatgtttaatacttcaaatgtgtgtccgtatactttaaaaaaatttggccaaagaactaaacacggcctctgtgagaagctatagctgctaaaagctcttccaaacaatcccttgttcttagtcagctctgcattctgcacccagctagttttttgaattagaaattattgccaaaaggaattatgaaaattaatggaatctttgtgtattctatccagtgtttcataaaaaaaacaatttgttgctagcgtttcgttggttatcagaaatttagaaacaatttaatgaaatttcgaatttaatttgttttaatttatccagattactcagcggtttcttgataggaaccggctaagataactgatggccacagtaaccaggtgatattttaactacttgatcattggatcgttattttgaggaatctaattatttactatgatagatggatgatactcattaattcggtatatggtgacttttatatccctcattgcactaacgagatggttgactaacctatatcggttcctgatttcctacaattaaacgaattgtaagaacaagtgatcaattaactaaggctatagctatagcctcgattattggtcagatctgcatcaacctaatgaattactttcaaagaaaactaatgtcatctctgtgtataataacagcctgatcactaagcatctaagccgccaaagtaaatagaaaaggcatgctgctaacattcgcatcccacgccatactcgcatcccgctaagctacgagctcatatatgatatatacaactagccaggcaactgcacgtacatgataaggattttctatacatggatgtcatgaaacccatcatttacgcgcgacttagatagttataggaaaaagtaacattaattgtgatgttataaatcgatacacaaacgtacaagattagattgatatacaactagagaaataacactactacacgaatgatttttcatggacgccgggcccttttgggcgggccatgagtggaaccgcacgggataatcgagcgaccggcatcgggcggacgcccacacgggaaaatcaattatcccgtgctggcatcttaatccaaccgcacgggataatcctcattatcccgtgcggtcaacttaagtggaccacatagaaaaatcgattttcgcgtgcgggctttttaagtggaccgcacaggaaaataaaatatcccttcctattttctctctcacccacttcaattttttttgacaccctctcttctttttccctattatattcctctcctcccct

SEQ ID NO: 153 - DNA, 2437 bp, Oryza sativa
agcaaaagctatctagacatctagacatgtccgcaatttccaaaaaaaattgatactaaatataaaaaatcgtcaatatgtacgtttcatgggtgatagttattgatattataaatattaagttctaatcatattttaaatatattgattaatatttttatttataagttgcttaaattaatagggaattcactagtaaaagacgatttttgcatatggccaaaaaccgatttccgtagtcagctgggtggctcgatgcaccttggtgtctgcgaaaatcaaaatttatatatgagcaaaacaaccgcatgcaaaaataagattttcatgcgaaaataattttagccaaaaaacaaaaattccaaaaatcaaatttgaaacccctagctcctcgattcatccctgagccctagcctgccaccggcagaaaccatagcccgccgctagcccaatccctagctctttgtcgccgccaccaatgctgtcgtcgtgctcacaagccgtagtctgtcgtcgctatagcagtcaacgagcttcgcctcgccaccctaccaccaatgtcaccctctgtcaccggatccgcgccagggaggacggtggagggccggatccttgtgggggagggcggccgccgtcggatcggtgcgggggagcgcagccgccgctagatccgcgtggaggagggccgccgctggatctgccacaaacgtgcagttatcgctgccgacgtagtagttctatatggctccttaattttcgcatgggcgcaccgcacggtggtctcgttggtccatggagaccaagatttacagcccaaagtttttgggcctgcacaggattgggccaacggggcagcactgcggcagattttagtctcggggatgtagtgagtgatttgaggcatcagaattcagagactgggcatgacatgtctgatcgaattcatgtttcagttctgaaactatggaagacgcccagatctgtttttggagtatcttccagcttgcatccgtaattggtgcatatacgctttcacccagtattctcggagaattgttctgcatagcagaacacttaaaaacgtgaccgtttttattgcaaaattttgcaggctgcaatttaaatgtgactagggacaaatccaaaaaaaaatagtgagctagggatttgaataagctagacaatgttaaatttttggcacactttggcgttctcaaattttgactatatatgatggatgtgttcttactaaactagtgtttgtatgagaagaagttttaggaaatgccaaattttagtaaagtgatgatggcaagagtttgtttagtttgttaccttaccaaattttagtaacaaaagaaatggtagggctgaaagtgatggtggcaaagtgaacagaccctatgataaaaaaaaattagtgagggttttatgggagctctcatggttttattgccagtaggagtctcgagcccccaccgtcccacgctagatccgctcttgactgattgaaatttgcaaatctaccatcgatgtggtgactttatttaccaagttgaaatcctaccgaaatatggctgtgtgtattcttggttgatgcatagaccgaaagttatacttccatttgtaataataataataataataatgataataataataataataataataataataataataataataataataataataatgaaaaccgttgtttgggttctcagtccatttgactgtggatgtatgcatgatcaattacattctaccattaaaatatgcaaacctgaacgcttcaagtaatttcttgatgctccatctaccatccactagcaatccctccatttctgccattccattcactaaccaaagtttaggggactccagagttcagagttccttcaaacttcgcgacaaagtttagcggacttatgtcttttttttacgcgttaagatacaaattttatcttgattttttatcactctttttaaactgataaaacaatatatttcatacaaaaactttctatataaatttttttttaaaatatcagataaatctatttttaggttttaaataaaaagctcaattaatcatgagctaatgcatttatcgttttgtatgctcgtacttaatgttcattcatcgcaagttcgaacggaacgtttagacagatctaagatctgtggttagcagctcaaccgaactacatgatcccctgcatgtatcagctagctatttgggctccgcaaattacacacaaggcgatagaaactaccacattaattagaaggaagtataattatgaattgcatatgtagattgatttgttgtatgtattagatagtttttcgaaacattacaaccgtatgaaaaatataagtgcactcgaaaagagtcccaaaccattagaaccgtatggaaaagagacga

SEQ ID NO: 154 - DNA, 1037 bp, Oryza sativa
agtttctaacttcttttttactgagaaacagcgtgtcttgtgtttatagcattgatttccatgtccatatgttgctggtggttatgtagttattgtggcaactataacgcagatgccaactccgacttcgtataaaatgcctatatttatcctgattaatatcattggtcaatgtgagttgtactcaacgcagctgtagtttggtgtagtagctgcaacaattaagccatgttttcttcaacttcttttcacactatcttccatctttagtttaaagtctgatcgtttcgcatacaactgataaaccgtaaaatgcttatcagtaattaaagaataatttatgagtaaaacttttatatttgtgctaaaataaattataataaaaacccttaaaatcaactataaaattaaattttagccacagttgataagccaaaaggcgaagattgaagatttgatctttatgtgaactaaccaattaattgaagatttgatctttatgtgaactaaccaatttttaatgctcttaattttgttttgattttgctaaaagaagagtttgttattgttgatgctaacttatacttgttgccagaaaactttaggacagttggggcgattggttttgggtattggttatcggtttatggttggccatccgtatcagcttatcagaaaggctagtaatacagtcgacctgttagctataaggttctgtgtagtcttctcttagcttacccatataatagttagctctttacagttaatacagggcaaacttatctctctcacagagtttcttggttcttgtgtcaagtcggctgtaagtttacagcccgctctcctctcttctctcctccacctcagcatttagccggcttgtagcctactattatacttgctctcaggggattgtgatacgtctgctcatcttgaacaatatctagtcaaagtcacatcttttttgcgtaatgtcgcatctttgctgcgtaatggctaatttaatttaaatctgcgaaaaaggttcctgttcggtc

SEQ ID NO: 155 - DNA, 632 bp, Oryza sativa
tgcttagaggtcattagtagggctttattttcgccgtttgtttcgcgtgtagtttcggagcccgaagacccgcagcgcgaggatttcgaggatcaagctccagatctcgagcaaggcaaccacctttgaacatcttgagcctatatttgaaatttaattatgttgtttgaaaatattatgcattgataggatcgcacttaacctgttgtcccgtctgcaaggcagattggcggacctacctaatttgttgcatttgatccttcctttattaattgtgataccatgtccccttgtaaccatctagttgcacctcaatattcgtgcactctgtgcgagtatcgacagtcgccttcaaacttaaaatctgaataacaacttgggtaaaacttgggttttacaaaagacttggaaaaccccacacctgagtcggtacttgcgaactaaatgaatttccgaaaccgcggaccggggaacgtaccgggcgtacggttttccgctcttgcacttaaggaccgtttccttagaatttcatcaaaacataagacaagtgcgaccacatgggtggaatgggacaccccttgctgaataactagcttataagggagcctcaatgcccaaaaacatgtggattc

SEQ ID NO: 156 - DNA, 528 bp, Oryza sativa
ggccacgtggcgtttggggcagccctctccctctaatctcgaccagggagtggccggcggccttacctcggcacgactccccttaaggaaggccacgttgcattgggaggcaacctcctccgactagtcttttggaaagagtggccgccaccccacctcgggcatgacttccttgggaaagggccacgtggcattggggggcagcctcctccctctaaacatgatacccccgggaccatatcaccgacagtttttcattcgtgtccgaaaaccccttccgacatccggtcaaacgttagatgtgacatccaaaaattttcatttcaccaattaaacaagccttaaacggacaaatcttcttcagggaaaaaaaaaagaaaagagaaaaacggtcacattagagcatctccaagagtattgccaaatgccactccaagctaaattatagcccacatatgaaaaaaaaaagaccttaactctctggccaagccatcccactggccaaatcctgctagcagctggccaaat

SEQ ID NO: 157 - DNA, 564 bp, Oryza sativa
ctatgggaagatatgtgttaaaagcatactgacaatatcttgcaccttatcaagaacactagttaatcccaagatatacctgtttcctatacatgacacatcatacatcagttcagacaaacatgtgctttttgaaaagcaacattgatcaactggctgaataagacgtatgatggatcagcaggaaacatagtaggaagtatgaaaatgttcttgttatagataagatgacaaatgaatctgcctcccaaccaaaacagaagaaaaaggatccaacacacagttacatggattaccttgagtggtgtacagggatgacaacttcccatcttttctcaacagactatgaagtggtttagacgtgcagttctcaagagccttaatccatatggtctcgagcacatctggatctcctaagttcatatctaaacaaccgattttgttctgatagcaaagatgagaactggtatctaagctttcgtctttcaagatagcagccccatcatctgcataataaatagctttcagtgagcatgagaaagtgactcagtcatcagagtttcg

SEQ ID NO: 158 - DNA, 669 bp, Oryza sativa
  unsure (1)..(669): unsure at all n locations
atgtagtatcgactcttttataaggcgaattcnagctcggtaccctgtctatgactacgaggacaagatcaacttcgcagtgttcccgtcactgcaaggtggtcctcacaaccaccagattgcagcccttgcgggggctctgcagcaaaccatgacacctggattcaaggcctacgcaaagcaagtcaaggccaacgctgtcgccattggcaagtatcttatgagcaagggctacaaaatggtgactgatggaactgagaaccaccttgttctctgggatcttcgccctcttggcttgactggtatgcagactgtttttgcattcttcagtataattgctgttaatttttaattagtgctattaaacttgtcctaatgttggtttactcatgtaggcaacaaggttgagaaaatgtgtgacctttgcagcattacacttaacaanaatgntaacgggagggnnncaggggggagggaagaggaggggnnnnagggggtaggttagggacnccnnnnnnnnnagaannnaggnaatgaaggggagggaagttgctgccatnnccntnccctcnnnnctaagaggggnaagggnaaagagagaaaaaaaaaaaacaaaaaaacgatgtgtttcgattgtatacccnaaaaaaaaaagtcgtatgtgaaact

SEQ ID NO: 159 - DNA, 681 bp, Oryza sativa
  unsure (1)..(681): unsure at all n locations
gtgtgtatnnagatagtaatcacatatctatataccgcaatacacctccttaccctgagcgagggagcttgggaccatttctatgtacccatctgataatactggtcaagtgtttcctaattaaacctagcacctcangtgcgtgaattgattctaggtctgcctcccttggtggccatatttgtagtcttttattgctgataagctttgatagatttggaaccaatggaacttcaatcttgaaaaatttataaacaatcaaagtgtacatgatatcctcaatagcagtctggcactcatgctccttcatttcagcaatcctcctatttgtagaagtcccaacaaatcaattaatattcagatgcaaatacaatataaagataaaaggagcaaacaatatagactttttagtgccgaatatagatcacctgcagtgacaattatgctcatattatnaaataaggncnnaatanaagggagggaggggatgtggccnnnnnnccagtaatttgtgtaagttggtttttttttgcctaccttnnnttgatncgatggcatgtggtccaatttaaattcgatatggnagcaaagaaatatgtnnaatttnnaaccgttataaaaacaaaaaaaaatattctgttaaataattttgtttgggtgtaaataaacaccataaaaaag

SEQ ID NO: 160 - DNA, 1367 bp, Oryza sativa
aaaagcccatctcaaaattcgattccaattccagttcgtctcgctcgccgccaaatcgccccctcgctgcctccgtctcgcctcgccggcggcaatggagtggctggacgagtacgagaagctggtgatcaggatgaacacgccgagggtggtgatcgacaatgctgtgtgctcgacggcgacgctcgtccaggtatgtacggtggcgcggcgcggcgtggcgtggcgtgggtttggttcttgggtcaatctggtgcgtgttcttgcggcgagggttgctgatttggggatgtgcaggtggacagcgcgaggaagacgggggtgctgctcgaggcggtgcaggtgctcgccgacctcgacttgtccatcaacaaggcctacatctcgtcggatgggaggtggttcatggatgtcttccatgtgaccgaccgcctcggttgcaagctcaccgacgacagcgtcatcacctacatcgagcaggttggtgggtgttcttggtggtttctttgattctggcgcgggtgttcgacggagttggggggttttctgatggcgtagtacatggcttcgttgcagtctctggggacgtggaacgggccggcgcggccggcggcgctcgaggggttgacggcgctggagctgacgggggctgaccggacggggctcatctcggaggtgttcgccgtgctcgccgacatggactgcgccgtcgtggaggcccgctcgtggacgcaccgcggccgcctcggctgcctcgtcttcctccgcgacgaggaggccgacaccgagaggatggcgcgcatcgaggcccgcctcggtcacctcctccgcggcgactccaccggcgccggcggcgccgtggccgccgtccccgccgccgccgtcgcgcacgccgagcgccgcctccaccagctcatgtcggccgaccgcgaccaggaggagcgcgcggcggcggcggcggcggcgtccccgacccccgccgtgtccgtccagagctgggcggagcgcgggtactcggtggtcaccgtccagtgccgcgaccgccccaagctgctcttcgacgtcgtctgcacgctcaccgacatggactacgtcgtgttccacggcaccatcgacaccaccggcgaccaagcgcaccaggagttctacatccgccacgccgacgggagccccatcagctccgaggccgagcgccacagagtgagccaatgcctccaggacgccattgaacggagatcactagaggtatatcgaagccaaatcgacccaaatttccaacaccaagatgcaattcgttaattgatttggaagatgacgctaatgtgttcgatttcttgggtgtttcagggagtgagactgaagctgtg

SEQ ID NO: 161 - DNA, 601 bp, Oryza sativa
agcaaaacccttcccattccatcctttgattcatcaatgctatccatgctcgtcgatgttgcacaccagtaaaagaccacagcgcattttgtacaatgtgctacagtgcccctctcatggatcttaggccctgtttagttacaagaaagtttttccaaaaaatatcacatcgaatctttgaacacatgtatagagtattaaatatagataaatttaaaaactaattgcgcagttaggggagaaatcacgagacgaatcttttgagtctaattagtctatgattagccataagtactacagtaacctatatgtgctaatgacagattaattaagctcaaaagattcgtctcgcggatttcaggtgagttatgaaattagtttttttattcgtgtccaaaaactcctttcaatattcggtcaaacgtccgatgtgatccccaaaatttccttttccttatgtatctgaacacattgatattagtagtagtactaacgtgaatccgcagacagacaaatggacatggcaagttggcaactgaaccacactagtcaattgacttgaatgtacgtttgactcttgcatgtaaacattgcggcaatg

SEQ ID NO: 162 - DNA, 635 bp, Oryza sativa
accctgtgctggcttggcccgggagagagcagggaggagaggcccccgagccgaacggtggcccaaggcccccgacgaccggagcaggccctctgcccgcttgttagacggtgccaggtgcccccgacccccaggatggcccgagggccactgcgggaaggccgcacctatcgccctctgaccccgaggctaaccctgtgccgactcgacccgggagagagcagggagaagaggcccccgagccgaacggtggcctaaggcccctgacgaccggagttggccctttgcctgcttgtccgacgacgccaggagcccccgacccccaggacggccccgaggccactgtgggaaggccggccctgtcgtcctccgaccccgaggtcgtcggcacagaagacgagtgcaccccgcgaggccgcttggacaaagagcgccccagggatgtggcccctagcgaagaggatcggccccaccgaaaggtgcagcggcccgtctactttgttagtgaggcccttcgggacgccaagacccgatacccttaggcccagaagatgctttacgctattctgatggcttcgaggaaactgcgccattatttccaggcgcattgggtcacggtgggtacgtcttacccc

SEQ ID NO: 163 - DNA, 630 bp, Oryza sativa
tagcagcatgatatcaaaacgctctgagctgctcgttcggctatggcgtaggcctagtccgtaggcaggacttttcaagtctcggaaggtttcttcaatctgcattcgcttcgaatagatattaacaagttgtttgggtgttcgaatttcaacaggtaagttagttgctagaacccatggctcctttgccgacgctgagtagattttaggtgacgggtgtgacaatgagtccgtgtcgagcgctgattttttcggcctttagagcgagatttatacaatagaatttggcatgagattggattgcttttagtcagcctcttatagcctaaagtctttgagtgactagatgacatatcatgtaagttgctgataggtttccagttttccgctcctaggtctgcatattgtacttttcctcttactcgacttaaccagtaccaacccagcttctcaacggatttataccatggcactttaaagccagcatcactgacaatgagcggtgtggtgttactcggtagaatgctcgcaaggtcggctagaaattggtcatgagctttctttgaacattgctctgaaagcgggaacgctttctcataaagagtaacagaacgaccgtgtagtgcgact

SEQ ID NO: 164 - DNA, 512 bp, Oryza sativa
caatctatcatggctgcaactgcaagagaacatgcggcatgctgccgagatcaagtacatgatccggcacatttccctgacagacttgttcggatgtaggctcagtgatgactggggttgcataactgcataagcagatcttggatcgggaggttgtgttgcatgattgtgcagtgaattatgactttgaggttcttgctgaacaatttgttttcagtcaaagttcgattactgaagtaaagactgaggttggacaaaggaagtaaaacttccggtctttgcatcagctaaggatatatattaagatgaaatctaaattataagaacaacaacaacaacaaaatatcaggtgcaaccaaaaaaagaataaaacaatagagatgaaatataaattacaagagcaacaaaaaaaaagagcagatgcaacaaaagaaaaacagagatgaattctgaattgttggccaaagattcagcttaacaaaagagagagtgtcctaagatgaaatctagat

SEQ ID NO: 165 - DNA, 26940 bp, Oryza sativa
taagaaaataggccattttaatagttaatttaggctattttggcttcaatccaaacacaattttacctttgccaaaattagccatgccaaaagttgccaaaatttaacattgacaaaaattggtaaggccaatttaggccacaaaccaaaccaaccctaccaaattttgtcaatgccaaattttgacaagttttggcataactaattttggtatggcaaagttgtgtttggattgaagctaaaacagcctaagttcactattgaaatggcctatttttttaggcatatcaaaatttggcttcaaaccaaatagatactaaacattattaaaattgccaaatattggtaagcctaatttaggcctcaaaccaaaccagccctgcaaaacctggacggggccactgggcggggccacggacgcttctacacttggccataacctttggtaggagggtacagcgcgctcggcccatatacttgatcagccgcagcagtgaactgctggttaggcgcatatccttgcggcggatatcccgtcacaaccggtgcggcgggggcctgctgcggctgcggctgctggccgtcgggcttaggctcgaccgccgcggcgacgcgaagcatgatgtaggacttgatcccgaacacggcggcggcgaggctcagcacggccgccctcctgaagacgccgtccttgaggtagtagcacagcggcgccgtgtcgcgcgtcaccggcgcgttccacgccgcgccttgcacgaaggacacacccgcgacgatcgccgcgatcctgtacacgaatattttgtgggggaagatcagatttgcatgcgcctcaacattgaactgtcgattgacaaagagacccgaaggccgaaggtacacacggttgttggcgagagggtgcaattacgtacgaactcgtggaactcaccatgagaagacagagcagacaatgccggtgacacgcctggactcggaagcgcccgcacgaggcctgcagcatccgcagcagccggcgacggaggagacgatgatctgagccaccggcagcaggagcaccgcgcatattcccagcacgaaggcggcgttcgccggatactcgcactcgccggtcgacacgatgatgtcttcgggctgcaacaacgaataaaattgctcatccacagatcacagaattcggaacactagtgcagcggagaatcaagatagatgtgagccatgtgatgtgacagtgtagcataataaaaatcgctgtgcttgttacggtgagttttttctcctcggcgatgaaccccaggacggcgctcgccaccgcgaacaatcctaccacggcggacacgacgaacactcccgtttccatctctcttcaaatgctgaaatgcctatgtctctccctgtcgtgtcgtcttctctctagcctctagctttgctctgagatgagaagcgatgctgccatacacagtatttatactgagcgtctcgtgctgaagctattatttctatgatcattttattctgaatttgtgctagctaatacctgtgcagacgtgcagttggtctgtttcgatgattgcgttgaccctagaaaacataagattcatgagacagctagtagtagcattctgaatgctagctagccagctcgttaacgctgccatctggcatctgccggcgcgatgatcgctcgagttctataagcatgctgcctaattaacctaggacaaacataaacattatgagctgaaaaagacacgcagatataaacgcatgaactatttctttggacaaaaaaaaagaagcaaactggggacaagcctgataacataaataactgctagaactgaacagcatggtgtttatcttataccaacttgagttgacactgacgaggtgacaactactggttaatcatgatctgattgcttggataatatagtgatatagtttatcagtttaaaattattccccgcaattcctgcccatgttcttgaagaaactgaccacaaagaacatcagttggaaacttggaatgtgcaggtagctagagcatcgcctgccgttgagtcaaagtcagctcgaaactcaagacgtgcatccgtcaactctgaggctgtatataggcgaggatggattctaatcttgcccgttcgtccgtttcttccacgtaactaaatggttatattttttttaaaaagtaataggatagattaatacataatatatcactctacaaacacttaaacttaaatttaaatttctataagttataataaaaacaataaattaaactttaattagtatatatatttacagacaatttgttttttttataatttataaaagttgaatttaaacttgtatgtttgtggagtgatatattacatactactaatctatcttgttattttttaaaaaatgtattttataactatatatttaacatgtaaaagataggtgaacgtctaccgagtgctaaaaaggggtccgaatgtttgcagttgcagagcgtcctgattagccggcggcttcctcgacaatcatctggggaagtcagtcaattagtgcctgatcagagagacgctttgcataatgaacacaaagaacaaaatggtcatctctaatggttaaacgatctgtttaagaaaaaaggtcagtgcttcggagatctgttatattctatcactgcctgttcacttagtgccaaatttgaaccggcataatactgctcatagttttttttttaggaaaagggattatattacccaactaaagagtcttcacaaacaaaatgtgagatgaaattagatttatcatccggccaaaactcaataagagcgaaatggcctataatctagtggttacaaaagtcttagtaacaccttagatcttaagtttgacttcctgtataaacgaatttttcaggatttaatactgcagagtatcctcactcgtctcatggaggcacgggaggttgagcgggatcctgacaacaacgacaccctcgaccggagcaactactgttggatctggcggcatgggcctcgagccctctggacacatatagccacgattgcctcaggtgcctggatgatgagttgatctgtaggcatatggtactacttgttctttaatttaatttgttcttgaatgttcttaaatttgtgataatcaattcggctgtgatccctcatgttttttccttctatttttcttgcaaagttgatttggcatacgatttacttgcaaatgttgcaaatgtgtgtaaacatatgaattgggcatcaatataaatcattttgactttcttttttttttctgaaaataggtatcagtgattgtagttgagcaacatggccgccagcctactgttggttaaaaaaccggcaacgtacgtacgatgccgtttttgaactgttagtgatggccttctgtttgttgatatatagtgtgatcacggttgactcacgtgatcttctgtaacataaccccaaacgaaaaccatacaacgatctattatattattaaaacagctatgaaaggagacaccacgtttgctgtgggggttagaaattcccgcattaatcggagaaaaagaaaacaagagtccaattagaaatacaattaaaattagctgaaattcagaattaaaaatacgcaatatggaaagaggagttcatataggaacccaatacgtgattaattaaaattcagaataataataaaataaatatcaaaattaggaaaagaaaaaaagaagaattcaagtaggaatacaatttataaataactgaaattcggagttaaaaataagaaatattaaaagaagaggacatccaaaaatccaatacgagattaattaaaattcagaataaaaaataaaaaaaatcgaaattagaaaaaaaaataagagttcaagtaggaatacaatttaaaattaacttaaattcggaattaaatataagcaatattgaaataagagtacatataagaacccaatagtagattacttaaaattcagaataataaataaataaaaatcagaaattaggcaaattaaaaagagagttaaagtaggaatacaattatgaaacaactaaaattgaaaataaaaatatcaaaagaacataataataaataaaataaattctgaaattagaaaaagaaaaaaaagatttcaactaggagtaaaatttataaataactaaaattggtgataaaaaaataagactattgaaagaaaagaccatctaaaacacatgacaaaattaattaagtaataggcctatagaggagcaaagtggtggcggttgatgagacatctaaaaactattaataaaacaccaaatagaatcctaatgacgattaaaaggaaggacgacgggcatgtcgtgaagcaatcagtcagggacttctagaaagtaaaaaaataaaccccaatgataatcatattttatttttaaaatctcaattacaataaaaaagagaggcagcgggtgggtcgtataggagtacgatggtagagccgccgatggttggtgggtcttctagaaagtaaaaaatgaattccaacgatagttatgttcgatttttataatcccaatgataataaagattacgcggcggatatgtcgtaaaggagtatagtggcagcgtttgacgagatttctaaaaattataaaaaaaacatggaacccaacgagacaataaaactctaaaaactataaggttcaattttaaaagttcaggcttctaaaaagtaaaaaaaataaaccctaatgataattatgtttgattttaagatctcaatgataataaagaaggacggcaacgggcgagtcgtagaggagtacagtaacaaagttgctgacgttttggcggaacttcaggaaagtaaaaaaaaagaaacttctagaaagtaaaaaaatgaacctaaaaaagaaacccaacaggacaataaactctataagtttttagatccaatttttaaaggttacaagaagaatgaatagaaacagtggtagatcgagcaagctaataaaaaaataatatgacagaagtaaggggtagcaactgatgtgtcttttaaaaactataaaattagaaacacgaggatgataaagtttggtcttttaaaatcttaagacaacgagataactatttaataaattttaagtaaaatcatattagaaaatatataattttatatgggtgctagccgtgcaattacgcgggccacccagctagttggattttaattaaactctcaaagaacatcccttgttatttgcatgtcactcaaatacttataaacaaattaaaaataatctaagaagatttcttaagatgtgatatatcctttcacaaacatgcaagttaaaattctatcctttgtaagttgtaataaagaaaaaactatagctagttaagatgtattcgtagttaaattcttcacgtttgtaaaatgatatatcacatattaatctattgggttaatcttttttaaaacttttttcataaccgtttaagtgacatacaaataacgatgacgatgagatatttcctcaagagtttagaatggtttcccaaatattcatgaagtgagatgctatttggaatatatacatatacgtgtattttacatgagagactctttacagcaagtcagcaaccgggcatatataataattatttaagtatatcacgcataggttcactgtcacgtactgacttacagtgctacacctgagcatcccctggaggaggatgaggaggcaacggctgatccggcgcgtgcgatccgacttgagcaggagcaggaaaagcggcagcgacctgcggctgcgggttcagtgctcgtccgtcccctccttgctgtggcggcgccggcggggcagaaacaggaggagacaactgggcggccgggtggcccatcgcgatcccggccgccggcgtcggctgctgctctcccggctttggcgtccgtactgcctcgttgcgttgcccgcggagcgtgacgtaggaggcgatcccgagcgccgtggcggcgagggccagcacggccgcgcccgcgaagatgccgtccttgaggacgtagcactagcacaccggcgccgtgtccctcgccacgttggcgttccacgccgcgcccaccacgaacagcacccacgcgacccccgccgctatcctgcacgtacacgtacggccccacgcgatcagctacgtacgcacgaggtgatcgatataaccaaacgggaagcggatcctctgactttggctccaaagtcacggttgtgcagttagcattgtatcaaccgttgaaacaatgagacgacgacggtgacacggtggccggcttgtgggatcggcggccggttgcatcatgtaccatgagacgacggcgcagacgatgccgacgatccgcttggtctcggacgggatggcgcgggacttgcagcagccgcagcagccgccgacggccgtcacggtgatctgcgccatcagaaggaagatggccgcgcagatccccagcgcgaacgacgggttctgtgggtacaggcactcgtcgccgatcagcaatacgtccgaaatctgcaacaaatcattccccgtttgtcacgcatgctcactggagtcactaatcactaattacgctcatcagtcatcacatgtatatcagagaacggagatatctaaagaacatgcatgcatcttagcgcagtatgctcacaatgatctttgtgccctcggcggagaaccccaggatggcgctcagcacccccaggggcccgacgatcgccgacacgatggccaccgtcttgtccatttttcccggccaccctcctccctcgtcttggtgcgtttatatacagagctttttagctagctcgggcacactactggagaagtgggactttagttccggtttgcaacccctttattcccgggttgcaaaccgggaccccgaatccggtactaaagatgtccaaaataatcgggactaaagatccatgaattgacatcacaaattcatctatgaattgacatcacaaaatcatccgcaacttgacagaaacattaaaaaatcatccacaaatttacatcacaaaatcatcaataaatacacagaaacatctaaaaatcattcacagaaacatctaaaaatcattcacaaatttacatcacaaaatcaacccaaaaatcaacacaaaatcatcacaaagtcatcgatcccctccggcttgcccgccacctgccacctcctctccgtgtgcgccgccgtcggctgcctcccttcggcgcgcccgctgcacgtgcgcatccgtgcgcgccgccgcccgtaccgccgccttccctcctgcctcccgcgcgcccccggccatctgccgctgcttgcgccgacaacgtcgaggggaagagggatcgatgaaagagagtggacgagaggagtggagggaggattggaggaagagtgtagaaagaagataaggaagagagagagcgcgagagatggggatgacgcaggaatagagatatttattcccgattggtatcatcaatcaggattaaagatctatctcccggttggtgttaccaaccaatctttagtcccggttggtgttactaaccgggactaaagatcaaaaaatacctatggctttaaaactgggactaaaaatgtttttacttcccattcctacttaaaccgggactaatgatgtttttacttcctgttcctactcgaattgggactaatattatttttacctgacccagcaaagataacttatgcagtagtggcacacgctgatcgctgatcgcatttcgatcgaggcatgcggccgtaatttctccgtggatatccgtttaagcaagtttggctgcagcctacaggcactatggacagctgcgtctttgtttacaggtttacaccgaccctgccggcacggtaacttgtatctatatggctgcatcgataatttgctgcgatgtgcttacaaacatactagactggagcaaatattgagatatcgacttggagctcaattatttctatttgaacatctacgttccgccttggtagtcggcagatcttgacatggtttttggatgtttggtcctattaattccatgttttctttgggggtactaattccatgctatattgttttccttagttcactactaaagccgttattgtcgcagctgctaccgccgtcgctgcagccaaagccaccatcaccaccgtcgctcccgccacttgatgccagccaccgccatctccgctcatgctgtccccaggcggactgagcggatctgccactcccgtggcatcgtggtagatccgcttggtatgaggccaccgccacttgccattcctgaattgggtggatctgctgccctcgtaagtgccagcggtggatccgcttagtccgaggccgccactgctgctcccgtcgtccagtccactgctcatcgtcgcaactgcctagcctgagcctgaggctggaccgaagtgggagggagagaggggaggggggaagtaggggagatgagtgggaaatgggaagagaagagaggagagaaaaggggagaggagagataaaggggaggtggggaggccagacgcgctgagagaaataaagagtggacgaggggttgttgccgaactgcacacggaggagagaaactcttgcttgtgaaaatccatttttgtagcgggacctcttaagcgaaaataggctatttacgaaaattgatttttgcaggcgggccttaaccaaaccgaacatcacccaaatatttttacatagatgtttctttagcttgtctaagataaaataagggatgcggcgtgtagtagtgagtcaagatgaccggttggtagacaggctgaggcacatattggtggcccaacgtatacatgctactagtgtgatatcgtcggaaaagaaggatttcatgttggttgtcctagccaaagcatggtcaacccgtcgccgaagcctccatggctgatgagaacatcacctcctttcaatacgcatgaggctaagagatggagacccacctcgttatctaggagcaggccgcattaaaatcgtctcctagcctcatttagactatgttttcaatgttctacatatgtatgaaaagctaacgagaacacctttccaatgggtctggtctcacgtcaagactccttataagtctatgggaatcatttaagcaagagagcgtccagaatctgcccaggtgctgcgtcaccgtctttaggctcattgggccgagtatcgtgtcggagtccattagggacgtatccagggggttctaggtcgatcctagaacctatttaatcaatagccgtcattgaattagggttaggttttgctttgattatatattctgtcattgtagtttcgctgctaaatcgtttcatggaatcctaacttgtgagattcatcttaaattcgcaatatattcagattgcatcttctactctcttacctatgttcttgattcgcttgcaagagatagtcttattggcgaggtcaacagttgtttgactcgggtgataaccaatggaggggtggtgtgctaattgcgagtggttcggtcatcctgattgaagccttttaatcattaacgtcgagtttccacaatcgatttattagcggaagatcgggaccctaatcctcatcaatggcttaatgggtagcagcctggctgacacaaaaaatatgagatatgtgtggacggcctgtgatgtaagatgtttacaatgaatttgacacctttatagagagtttaaatttgaaaacataatattatatcctttctaactttgatcatatttttagcaaaattatttagagataaaaacgagtgtaagagtatcaacaggttttattctaccacgcggtaggcccgtctaaatatacttggccaaaaggcccgcaacccgatggtatggttcacggcacgaagatttggcccgacctaggcacgacacgacccgactgttatctggctcgtgccagcccaacccgaccaatgggtcatgcctgggcctcttcctcggcatgataggccggcccggcacggtccagcccaacgattagggaggcaaaatatacttattacagccatgtaaggcacgactcaaagaaataagggacgcaaagtgcacttatttccaaccatataaaacacggcccaagagatgagggaggtaaaatagacttattctaaggcgagcacgatgagctgcttgtgcattcataccagcacggtacgacccgcgccttattgggtcatgtctaggctgcatttatagcctgtgggctgacccggcacgacataaaaagtatgccgggccgtgccagcaaccagcccgacatgctttgagccgtgccctaaagtatgccgggccgtgccctagatggggctgtgatcggaaacgatttggtatcgtgagatactgatacctcgagatactttttattgaactgaagcaaacctcgtacaaataatttcagattccgtggcctgtgcagcatgagaaaatcaaataaaacttaccgggagatcgtcccgccattgtcgacgaaagaatcaccatcgctagcagcagcagaatctggagcaagaaacttgtcgtgttcatcttaattaattatagctagctaatttaatttgtctaggaaatttgttgtgattcagctttcagaataacgaagcacaagtgcaggacaaagtcgattagaggaatttttgaagtccagggcatcgacagagatgggcaaaaccacaacatgctgcagttcagtgccattgtgccaataccagggatgtttcgagtcacttgtttatatgatggatgtatttttcagccggccaaactcagggtcaactggtggattctttggctttaatttgtggcgttcgttttccgtgcactaattaaacagttacggcgacttggcagcttaactattttcttcgttgtcattctaaaaaagggcatgtaatagtcggcgactaactgtactactactcccttcaacccaaatatttagagtgattataccgtacttaataaggtatcaagagtttcccccgtaatatttggtaactccggtattaacaggtactatcaaatttatactaaaaatttttatacatctcactactacataaagatttttctgtacgaaaagccctatctttcacacatcttttatgaaactttaggacatatcgggcagaaaaatctatatcaattattttgtactaatgagcactataaatataagggatttcttctataaacatagaagtagtaaacaaccaaacgtacgaagaatgccaatgatcacatacggggagtagacaactaaacatatgacgggtggcctaataactatccatctaagtgatatatataccacatagtgaatttttgactgacctgtgtactgaatcaagagcgcgttgcattgtggtggattatgactctacgctgacaatgacatcaacctgccacttcaaaatgcctctaaaagttgctttatggaaacagtcaaagtatatgagctgaacacacccacagtttacagagaaattttagtccaaacaaacaaagttgtgtcgtcactggtgaccaatataaccagggattgattctcttctgcatcatttggctgtctatacttgtgaatctggcggcggcgggaactgcggttggcccatcgcgaccccggccagcggcggctgcttggccggcgcctcgtcggcctgcctgcggagcatgacgtaggacgtgatcccggaagccgtggcagcgagtgccagcacggccgcgccagcaaagattccgtccttgacgacgtagcagtcgttgttcaccaccgcgcccatcccgaacagaaaccacgcgatccccgccgctatcctgcatatccgctcccacgcacgctcgatcagtttcggcatgaatcacggttcgtcgagtataaccacaccgtaccggcggtgatatcggcggtgactaaccatgacatgacagcgcagatgacgccgattatccgcttggtctccgacgggatggaccgggacttgcagcagccgcagcagccgccgacggccgacacggtgatctgcgctaacagcaggaagacggccgcgcagacccccagcgcggtcgcggggttctccgggtacaggcacttgccgccgaccagtatatcggtcacctgcaacaacatcgttggccgtcgtcatacacactgataccactactcgcgcatgcaccgcagcaagctcatttttgcacatgttgtacaaggaaagacatcggtagtgtgcttacagtgatctttgtgccctcggcggagaaccccaggatggcgctcagcaaccccagggacccgacaaccgcggagacgatgatcgtcgtcttgtccattttcccggccattcttctcccaagtcttcccaagccttgccttgtgtgcgtgactgcgtcggtctttataaacagcgaacgagctgccccacttctacgatgtcaccagatttacgccagcacgcgattgggaggaagctggtaacgaaacaggcttgcttaggcaaaagttggcaggggctgttgacagatgcgggtgtctttgtttacatcgagcatgcagccggcacggtaacttgtatcgaccaatcaaattgctgtgctgtgcttacaatttacaaaacggtacgttctattgttattcccaagaaaagcgatgttcacgaattcacaagccgacaatcggttttagcatcggaagagaattctcacagtaggagagctaagtgtgtatatcagggaaaactctattcatccaaaagatattccctcatttttacatgtcacttaaaagttatcaatttttttttaaaaaatagtatgatagattaatatgtgacatgtcacttcataaacatgcatatttaaattcaacttatacaagtagaaacaaaaataataaatttgactacgaataaaacacgtaattcatggtcatatttgttatttttgtttcgaattgtataagtcgaattttaacttgcatgtttgtgaaattgatatatcttcataattttttaaaattttttgattacttttttaatgctatgcacaaaacaaccggatgtcggacaaaaaatccacttccgcatatcggctcaaataatgggatggtttcacgttactcggcccagccgaagcatagttgggccctgtcgagccaccacaatatggactttgtttcggcccactaaacgaacattactttgtttcggatggttcattcctcatgattgatatcggacggtgcaaaagaattgtggtgatgtggaagtgtaggaaagcaggaaaataccattaaattacactaagtggggatgatttgtatagatttataggattacttgctaatctatgtgatttgtcttagcttttaatttcactaagtggcgatgatttgtataggtttataggattacttgctaatctatgtgatttgtcttagcttttaatttaggtgtgatcatcttcttagaggaggggtttatagattcacaaccccagatttactcaaaacacatactccgtaatcgtcgataggttttaattaagaccttaccaaattttaatggtgttaggtgagtggaaggttttaaatctatcaaaattttttggtagagatcgataaggttccatcttttctaatttatttacatactaaatttgaataatggtaattgttgatgggagcaagtactacttcaaagtgataattatttaagataaagtttaaatcgtactagaaaacaactattttaggatgatgaaagtacatgccaaatgcgttgtacgagaaacgcaacatcacaaatcacaaaccagctcgtaaaatgggtgtgtttagttcacactaaaattgaaagtttggttgaaattgaaacgatgtgacggaaaagttggaagtttgtgtatgtagtaaagtttagatgtggtggaaaagttaaaagtttgaaaaaaaagtttagaactaaactcggccatagtcacttaatttccaaacttaagaaagctagcatgtactactacacagtacgtgcatgtatctcatatacacagaaagcacgacacaaactttatgactacaccctttggttcgagtcacagggtgacaccatgacatatatactgaggtcacggtactacacctgtgcgcatgggaaacgttgctggttcggcgcctgccatccataatagccttgagcagaagcaggtgccgcgaattgctggttcggtgcttgcccgtaccacccaccttgtggcggcaaagtagccggatgagcgaacggcagctggttcggcggcggcgcttgactggcaccgattccctgagccggcacaggaaccagaagaggattaggatacaccggctggaacgcgatgaccatcgggaccacgatcgcggcgtgggctcatcatcatcgtactccggctctggcctcgtgcggagcatgaggtacgtaggaggtgaccccgagcaccatggagatgaggaccagcgtagacgccctcgtggatcttgtcgcaatccgaatcctcgaccgcggcgtgcaggagcaacacaaacacaatcaccggcactatcctgcacgcaacgcaaaaaacgcggcgcttgccgtgtatgcatgtgacgtagcaacgatgcatcccatgatcgatcagagcgcgtgtgacgatgggtcactcaccatgaggtgatggcgcagacgacctgcaccgtctcggagaggatgcagcagctgcggcagccatggcgacgtgtgttatcattaggaagatgaccgcgcagatgcccagcttgaccgctgctgatctcgacgagccgtggtcaacttaacactgatcactactaaaaaataatttttagcaacgttggtcttttatttttccagacgggtatgaccattagagccaaatagccgcctacaaaaatacaaatcagagtgaaacctgctgcctgcccgcgaaaatccattttcgcaaacggaccacttaaacggtccgcctgcaaaaatacatttcatttatgcaagcggatctcttatgtggtccacctgcgaaaatacatagcgaatataaatagaggctacataccctagattttttctaagtcctctttctctcgcctctctcccggacctctcccctcccctaacctctcctcctctccccggcgctgacggcagcgtagggtgcacggcggctaccgttgaaagcggcggcggaaggcggtggacggcggccggcggcgctcccctcccttgctccctcccagatctggcctgaggggggcggggggagggcggtggccacgcgtgcggcggcggcggaaggcaacggctaccggtggaggcggcggcgaaggccggcagctaccggcgggaggcggaaggtggtggcgggcagtggcgaaggtggccggcagcggctctcggtccctccctccctcccagatctggcctgaggggggtggggaaagggcggtggccggcgatgctcccctccctcgctccctcccagatttggcctgagagggggcgggaggagggcggtggccacgcgtgcggcggcggcggcagcgggaggttggcggcggcgggaggaagggggccatgacgatgtcagtagaggaggaaccgatggcctggtcagcgcgcaaggagaggagcagccggccaagaggagcaaacggccaagaggagcggcggcggctctgggcaccaacttccttccccccagacgccggcggcggaggagaagccgacagtggcggcagcgcagacagcaccggccgctccactcccaaagctggacggaagaggggaaccggccgacagtggcaaaggcagcgctcccctcgctctcgggcagcggcaccggacggaggtggagagccgtcggtcggagggggatgccggcgccggcggcgtcgccagcgggtagcaccggatttttttttgttcccctgctttatttttgcaggcgggccacggacccgcctacgaaaatcacctattttcacagacgatgggatagcggtggatgactcccccgcctacgaaaaccgttttttgccgcctgtgaaaactatttttctagtagtggatgccgccggtgtccagaaacatcacgaacgcgatcaccaccgcaatcctgtactatcacgcagtatggtgcacacacatacgtggcggagtggcgggcgagcggcggctcctggcgcagagagaagataaaaccgaaagggaagaagagaaaaaagagtagagaagaagattgctgactaggattgtttactccatatttttttttcttacttacatgtgggctctacatatttttttattttttctgattaggatgccacgtcagcgaaaccatgcatctatactacttggaacttttttttgacggttttatatagttaagggatacacatttctggtattgcagttaggagatctcagacagactcggcgtacaattgggggaccttaggtgaacttattcctttattctaccacgcgattgaaccatgtaaatatagttgtccaaaaaaggcccgcagcccgatggtatggcccacggcacaaagatttggcctggtctaggcacgacacgaccctgtcaggctcgtgccggcctgactcaaccaatgggttgtgcttgggcctctttctcggcacgacaggcttgcccagcacggcccaacccaacgagtagggaggcaaaacagatttattccagttatataaggtacgactcaaagaaataagggacacaaaatgcacttattttcaaccatataaacacggcccaaaaagatgagtgaagcaaaatagacttattctaaggcgagcacgatgggctaatcgtggtttcgtatcggcacgatacgacccgcaccttattgggttgtgtctgggctgcatttatagcctgtgggttgacccggcacgacacgaagagtatatcggccgtgccagcccgacatgctttgggccgtgccctagatgtgcctgggctgaggtcgtgctgggtggcccatttggctgtctatacatgtgaagcctgcggcggcaggaactgcggttggcccatcgcgaccccggccagcggcggcttcttggccggcgcctcgtcggcttgcgttcggagcatgacgtaggacgtgatcccgaacgccgtggcagcgagggccagcacggccgcgccagcaaagattccgcgcttgacgacgtagcagtccggcatggttgcccccttgccctctatgttcaccaccgcgcccaccccgaacagaaaccacgcgatcccgctatcctgcatatccgctcccacgcacgctcgatcagtttcggcatgaatcacggttcgccgagtataaccacaccgtacctgcggtgatatcggtggtgactaaccatgacatgacggcgcagacgacgccgatgatccgcttggtctccgacgggatggaccggccggacatgcagcagccgcagcagccgccgacggccgacacggtgatctgcactaacagcaggaagacggccgcgcagacccccagctcggctgcggggttctgcgggtacaggcactcgccgcgcgcgccgaccagtacatcggtcgcctgcaacaacatcgtttgccgtcgtcatacaccgataccactactcgcgcatgcaccgcagcaagctcattttcgcacatgttgtacaaggaaagacatcggtagtgtgcttacagtgatctttgtaacctcggcggagaaccccaggatggcgctcagcaaccccagggacccgacaaccgcggaggcgatgatcgtcgtcttgtccattttccccgccattcttctcccaagtcttcccaaggcttgccgtgtgtgcgtcactgcgtcggtcttcattaacagcgaatgagctgccgcactactactactgtcaccccatttacgaaaactagctgggtggcccgcgcaattacgcggctagcatctatataaaattatatattttttaagtatgattttacttaaaatttattaaatagttatctcgttgtcttaagattttgaaaaaccaaatcttatcatcgtcgtgtttctaattttgtagtttttaaaagacacatcagttgatacctcttacttatgtcatattattttttattagcttgctctatctatcgctgtttctatttattctccttggaacttttaaaaattggatctaaaaactattagagttcattttcctgttgggcttatttttaataatttctagaagtcccgtcaaacgctgctattatactcctctacaaccgtccactgcatcttctctttattatcattgctattttaaaaattaaacataagtatcgtttaggttcattttttttactttctagaagtttcgccaaaacgtcaacgctttgtcactgtactcctctacggctcgtccgctgtcgtccttctttattgtcattgagattttaaaatcaaacataattatcattggggattattttttttttaccttttagaagcccgtacctttaaaaattgaaccttatagtttttaaagttttgttgtctcgttgggttttatgtttttttataatttttagaaatcccatcaaacactaccatatactcctctacgacccgtccgccgcataatctttattgtcattgggattgtaaaaattaaacataactatcgttgaaattcattttttactttctataagaccgaccaaccatcagcggctctaccattgcactcctatacgacccgtccgttgcctctcatttttattgtaattgagattttaaaaatcaaatataattatcattgaagtttattttttttactttttagaagtcccgccaaccgccttgactgattacttcacgacatgcctgtcgtatttccttttaatcgtcaataggattctatttggtgttttattagtagtttttagatgtctcatcaaccgccaccactctcctcctctataggtatgttacttaattaatctcatcatgtgttttagatggtcttttcttttaatagtcttatttttttatcaccaatttcagttatttataaattgtattcctagttgaaatctttttttcctaatttcagaatttattttatttattattatgttcttttgattttttattttttattttcaattcagttgtttcaaaattatattcctatttttattccgaatattatttaatctactattgggttcttatatgtatttttatttcaatattgcttatatttaattcctaatttaagttaattttgaattgtattcctacgtgaactcttattttcttttcttttttctaatttcgattttttatttttttattacgaattttaattaatctcgtattggattcttatatggactcttctttcaatattccttatttttaattccgaattttaattatttataaattttattcctactcgaactcttcttttttctttttctaattttgaaatttattctattattatttcgaattttaattaggttcctatatggactcctctttccatattgcatatttttaattccgaatttcagctatttttagattgtatttctatttggactcttttttttctttttctccaattaatgtggaaatttctagcccccaagcgaacgtggtggctcctttcaaggctgttttaataatataacatagattgtttaagccggacgttcggcacttggaaaaaaaatcggctcaccatcccatctactccactcgttctctttcaactccaccagccacatgctagccttatctcttcaacttcccaatttttctctctctagctctccctaacttcctacctagcttatctctctctgcacaacctcaccagcgacggagaaggtacgatgacgacctcaccggcgctggcatgccccacaactagcttcgaggctacggaggaggtgcgaccactagtacaataatgatttttccgtgtggtcggaatcagttttctcatgcggatcttccaatggtctagaacgaggtatctgcgaaaatcatgattttcacgtgtgggcgcccgcacgggaaaataaaaaaatcaaaaccggaacactaatccagctaacgccgccgccaccaccgtcgtcgtcaccgccttgcccgaggcctgcagccgtcaccattgtcgtcgtcaccgccttgcccgacgcccgccgccgtcaccaccgccgttgtcgctgtcaccaccgccgtcgtcgccgcattgcccgaggcccgccgccgtcgtccccgtggtcgtcgacgatgaatccgacctcgccgcggtggcaggcgacggatctggcctccccacagtggtcggtgatagatccgctctgccgccaccaccctaggcaggggtggatctatagttatagggttggtgtcaggcgacaccgacgactttcggcaaaatctatagcgaaactgcttattcatatactataacaccatgatctaagtataattagcatactatggcactgatagacgcgttctgacaccaacgaatcgattttctggatccgctactgaccttaagcgatgccgatgctgataccaccgctgatgctgccgccgccatcgatgccgctgcctccgccgctctaaccgctctaaccgatgccgccgcctccgccgccatagccgaggccgatgccgtgacgccgtcgccggtgtttgatggtattttggtgatatgcaaggattactcgtatttgccaaagtaagcaaacaatgtgaaagttatatgcactagtggagctggctctagcttgtcattctgtacgtgatgcatggccatgcaaatacatgcacaggcagaagcatacaccatgccctatatatacttggttaattagtatgtatatgcgcgcacgtgtataaactaaaggaaatcaagagctagtcatatcccatatgataattggctggtgaagcaattacgtgcatgcatgcatagcaatgcacaaacatattatatatatggtcctcaattaatggccaggtgacactggtggagaaaccatctttcgtcggtcggccgatttccacaatagtcccggatgcaataaaaaccggggctaaagatgatctttagtcccggttcaaaagggtaacgggcatatttgatctttagtcccggtttgtgttaccaaccgggactaaagatcatctttagtcccggttcgaatgctgtcaggacctgtcaggcccccccgggatctttagttccggttggtagcaccaactgggactaaagatcttaactttagtcccggttggtaataccaaccgggactaaagatcccggtgatctttagctccggttggtgctactaaccgagactaaagatcttaactttagtcccggttggtaataccaaccgggactaatgatcccggtaatctttagccccggttggtgctaccaaccgggactaaagtcccacccctatatatatatatgtcttcttcctcctccagctgcccgagcaagcttcaaaatttcttcaaaaaagaggggaggtcatgccaaaatttctattgaatttattttggtgattacatacaaatcggaggtgcctaaaaggtttgcaacttcatcctccaatgtttttttttgtcatactacatttgcacctatgttttgcacactttttttgtctccaaaatttagttgtaagttgatgagagagaaaatgtgtgtggggaagaaagaatatatagaaatttagttcatttgctaaacaaggttttataaaatagttgagaaggaaaactctagtgaaagttaatattaaataatagaaaacaaactaaaataaaaattaaaagaagtaaaacacattaaaattagtttaaaactttacaaatagtttttaagaattatttggtgtaatattttatgatttttgtatgaataaagatatcttataattattgtatgactgtcattattgtaagaataattatttgtgtgcggtttttttgactcatgtagatggatcggcaatggatgtacgctgaccggcggtccaaagagtttattgacggcgtgcactattttttgagagtggccgaagctaacgggcaaaggggttttatttgttgtccatgcaataagtgtaagaatcagaaggagtattctgcatccaggactattcatttccacttgtttgagtcggggttcatgccaagctataattgttggacatcccacggagagcaaggtgttgaaatggaagaagatgaagtggaagacgacaatattccggactttgctcagtatgttggatttgaaggaaatcaaacgggcgaggaggaaatagctgctgatggtaacgacgttgcggatgatcttggtcagatgttgcaggacgccagggaagactgcgaaagtgaaaaggaggcccataaattggacaagatgttggaggaccacagaacttcgttgtacccaggttgcgagcaggggcagaaaaagttggataccactctggagttgttgcaatggaaggcaaaaaatggggttagtgacaaggcatttggcgatttattgaaactcgtcaagaacattcttccggggggaaacaaattgcccgagacaacgtacgaggctaagaagatagtctgcccgttaggactggaagttcataagattcacgcatgtccgaacgattgtatcctatatcgcggtgaggagtatgagaacctagaagcatgccctgtttgcaaagcactacgatacaagattagacgggacgatccaggagaagttgacgggcagctaacaaagaagagaattctgctaaggtgatgtggtatttccctataatacccggctaaggcgtttgttcaggacaaggggaatgctagaatgttgcgatggcacgctgaagagcgtcaacaggacgggatgctgagacaccccgccgatggttcgcagtggcgaaacatcgacagaaaatttaaagaatttggaaaggacgcacgaaacatacggtttggtttgagtacggatggcatgaatccttttggagagatgagcagcggccatagcacttggcccgttacgatgtgtatctacaacctcccccctggctatgcatgaagaggaagtacataatgatgccgattattattcaaggccccaagcaacctggtaacgacatcgacgtgtacctaagaccactggtcgaagatcttaaatagttgtggaagaaggaaggtgtccccgtgtgggacgaggacaaacaggaggagtttaacctacgagcgctgctgttcgtaaccatcaacgattggcctgcacttagcaacctatccggacagtccaacaaggggtacaaggcttgcactcactgtatggatgaaacagaaagtacgtatcttaagcactgtaggaaggttatatacatgggtcatcgtcgattccttgcagcaaaccacccggtacggaagaaaggcaagcacttcgaacataaggccgaccaccgtacgaagcctaaacatcgcagcgggaaaacaatgtttggtatggttaaagatcttaaagtagtgttcggaaaggggcctggaagccagcatatagagagcgaagatggtcacgcggcgatgtggaaaaagaactctatattttgggagttaccatattgggaattcttggacgtacgccacgcaatcgacgtgatgcacctcactaagaacctttgcgtaaaccttcttggcttcctaggtgtatacggaaagtcgaaagatacactggaagcacgtaatgatctgaagcatatggaacaacgcggcgaccttcacccggaaccaaaggagaaaggaagccattacttgagtccagccagctacactcttagcaagacagagaaggaaagtatgtttgaatgcttggagagcataaaggtaccgtctggatactccacgaatatcaagcgaataataagcacgaaggagaagaagttcacaaacctaaagtctcatgactgtcacgtgttgatgacacaactgctaccagttgtaataaggggtatccttccagacaatgtccgggcaacaataacaaagctatgtgcattcatgaacgcaatttcgcagaaggtcttcgatccggatagattagaagcccttcagaatgaagtggtgcaatgtctcgtcagttttgagttgatatttccaccttcatttttcaatataatgacacatctgctttgtcaccttgtgaaagagatccgtattctcgggcctatgtacctacacaacatgttttctttcgagaggtacatgggcgttctgaagaagtatgttcgtaaccgtgctcgtccagaggcaagcatcgccaagggttatggaacagaggaggtcatcgaattttgcgtagaatttatcgaagaccttcgcccaatcggggtacctgaatcacgccatgaagggagactacggggaaagggaactctcggaaggaaagcaataatgacggtagacaacaatttattccgtaaagcccatttcactgttctgcaacactcttcattggtagctccttacatcgaggagcacttggctctagttcgcgccaggaacatcggtaagtccgatgcatggattacacggcatcacattgatactttccccgcgtggctacgacaacatctcatgggtaacgagtcgatcaaccaacaacttgccttcctggcgaggggaccgtctgggtcgatcgcgacattccagggatatgagatcaatgggtacacattctacacgagagcccaagacatgaagagcacgaaccaaaacagcgctgttcgtgtcgatgccatgggacacgatggaacaactgccacgtattacggtgccatcgaggacatatgggaacttgactatggtcttctcaaggttcctctgttccggtgccaatgggttagattgactggtggaggcgtaatgattgatgacagtgggatgacaactgttgaccttaacaaggttggatactcggacgaaccttttgtccttgccaatgatgtaacgcaagtctttttcgtgaaggacatgtctagcaaaggaaagaagggcagagggcctgatgagcctaagcgtcaagtggttctcccaggcaaaagaaaaatcgtcggagttgaggacaagactgacgaggattacgatcagttggatgggcaaccccctttcacggtgacgattgaccctagcatcctcctatcaaatgaagacaccccttactcacgcagcgatcacaaggagggaacaatagtgaggagaaagtacgtgcggtcaaccgtcaccgccgatgtaatgccgtaattattgtgtacacgatgtaaactattttggatgtattgattatccatataaatcaattgatgtatggcatatgttaattacgcacgattattagaggtttcaacaagtttaaatcatgtatatgttagttatatgtgatacttacaatttttaaaagttttaaatcacacaggtggcaatttcatatgtatgttaattagagtttttaacatttaatttactagcattcatatgctaattataattgactagaggatttttaaaagttttaaatcacgcaagtggcaatttgatatgttaattagagtttttaacatttaatttactatcattcatatgctaattataattgactggagaatttttaaaagtattaaatttaatatatttttaaaactatcattcatatattagagtttttcacaatttaatttactatctttcatatgctacttatatatgactattcgaatttttaaaaggtttaaatcatgcatgtggcatttacatatgttaattagagtttttagcatttaatttaatataattcctacgctaagtacatatgatgattacaatttttattaattttaaatcatgcagtatgtacattaatatcttaattagagtttttaccaatataataatatcattcatatatatgctaagaatatatatatatatatatatattggaatttttattaattataagtcatatatttgcttattacgatttatccacttaatttattacagacaaaaattatttttcgaagtaattgtcatcaatctttgtactttaaataatgttaatgcattaacttctattttataaacacatatgtatgcgaaaatcatatgcagggctataatcttttgtcccgggtcttaaccctaaccgggtttaaaaataatttccaaatagcgggaaaagatatttactcccggttgttgagaacaaccgggagtaaagatccctgggttactaccggccgggggcgaccacggggtcttaagcaacactgcaaagtataggggcggtcgatctctttaagcctgagttactagacgacgctgactaggggaaaaacgcgcgctgacgcccgcgtatttcgccgaagtgtggagcgtggggtgctggccgacggcttcggcttcttcggtgccgacggatttttggagtgagaggccgcggatctcccttcatgcatgttgaactctcccatctaaatctctatcggccgtcgtcaacaccgggggctttgaacgccgacagatttggacggcgggcaatggcatcagcgtatggcaaacgcaacgccgccgacggcggtggcacgcctgcgctcgctttcgcgacgagcgcgccatggccgcggcggcacggccagccgcacccg

SEQ ID NO: 166 - DNA, 824 bp, Oryza sativa
  unsure (1)..(824): unsure at all n locations
gggaatgagngtgcacgtagatcggctncttgcagnagtccatcagtcatactcgatcaaagtaaaagttatctccttagaagatcaggtcaagagagagagagcacgccattacatgacctagggtgtccggggtcagggttctctttgtgcccgtgcgctacatttctagttaataaaaagtcagaatgcagggtagatatataaaacgtagaataaaaaacgatccattgagttatgtagaaatcacgctgaccatgcccatatcacacatcgctgtttttacgagttgctcctgttggccgtagcataaaccgtgtgcccattgaactgtgtcagcgtgtaaccgagctctcgtgagacctctctatatataaacacgagacgccaatcttgtatcagccgcgaagagaaataagagtccgatatgggtaagatcgaagcgcccgcccgccgccggcctgaaaggaagaacccggggggccccccccccgcgtgctcgcgattaaaatggacaagacgacgatcatcgtgtccgcggagggtgggtccccttgggttgctcagcgccatcctgggattctccgccgagggtgcgaaacgcaccaaggcaagttcttgctaacactagctacatattatctagactctagtgggatatatatgtttaccgatttttttttttgaacttgatgactactgccttagagattatatatgtgtttaatttcccagcgtggcgaactcgacctgtaccactttgtactaactcgtcgaactcatcgtcagaaggggtcgggctgggtgtctgcggggccatcttg

SEQ ID NO: 167 - DNA, 572 bp, Oryza sativa
actctagaggatcccctgcctaaacttatcccgcggtcgctcgtccctaaaccaaaaaagggtaaaacactgctagatagaaaacaaaaagaaaagaataaacgtgagaccaaatgggctgggaaaaagaaaatttttcaatgggcccataggacggaagaattcttaatgggccgaggcctgagaagaatccgcttctggaagtctcgaggcctctctctctctctctctctctctctctctctctcttctcccccgagttgccgttcaacttccacctcttctctctctctctctctccacacgcgcagctttttgcttctgcaattctctctcctcccaaatcgcgagctcgtcggaagctagggcctaccgctccgatcagatcgccgcgccgccgctgctccaagtatggatggatggttccgttccttcacgagatcgtacgtgcgaatccccccccccctcctgttgctgttagtgttggggtatactcgtgttccgcggcagttttggatcgcgttgctggtagccctctcgatcgtgttagctagtttaaggttgctagattt

SEQ ID NO: 168 - DNA, 619 bp, Oryza sativa
aacacaaatttccaaagcgagatagacgatgattccaaaagagaaaaggtagaggagatcccgaagattgtttcctctcaattgatttcaccggaaacggaaaggatcggccgaatttggaaggagacggcggcggcttgcgctagggtttcgggcggcggcggccggaggtagactacgacctgacaagcgggcctcacctgtcagcgagcgagggcgcgcgcgcggctgcggcggactgggccgacttgggccggggagagagaaagagggttttgggccgactttcggcccaaagccaaaagagacttttaaaaacatttttctatttaaattattcatgaaatgcaattccatttattaaaaatacttccttagctcaaataaatcccagaaaaatctaggaattatagaattaagcaaagtatttaatgaaattttatctggccccattttatattggaatttattaattaaaattagatcttctcttctaggcttttaaaataaattctaataattccaattaaacaacaatttatatatttacgatttttagggtgagacatctcctcaacggggattaggaaaccggcaagtttccgaacctttgtgaaaa

SEQ ID NO: 169 - DNA, 568 bp, Oryza sativa
ccaaagtttcccctttccactactaagttttttttctcattctttggtccataaccttccaatctttgttactcaacttcctaaaatgccttttaatcccccaagatttttaaaaaaaaaaaaccccccagcttacaccgaaaaatactagaatatcgatcataaccctcatttgcctggccaaaaccaaataactccaattttatgaaagttaattttcaagccagataaattttcaaaccccaataagatcaattttagattctttgcttgttgtaaatcttgctccaagaaaatgatagtatcatctgcatattgcaacatagacaaaccatcatatactaaatgagggattaccccattaagaaaatcactatctttagcccttttaattagcaaagctaacatatcagctactatgttaaagagaattggtgataaaggatccccttgtctaagacctttatgtgtttgaaagttgtcaccaatttgatccttagctttaataccagcatgtcccccttggataaaagaggatatccactcacaccatttgggagagaaaccc

SEQ ID NO: 170 - DNA, 620 bp, Oryza sativa
caaaacgaatcggatttggttcctgtgcagttcttggtattactgcaacttaggcggtcatattgtggctgtaggatgcaaatccaaaggcccaaatttaataggacactgtttattcagacaatccagcacaaaattattataacaatcatagtggcaattaaagcgtgtaatgatgcatctaccaaatgctaaattgctaatggtgggatattccagataacactagaatgattcagacaggccaagcctcccaaggttttccatctcaccagcaggtgggacccaccccgttttgctcccagccaatggcgtcgcgaggcgcgagataaggctgcaaacctggagcacacactcgcctccttccatcgctgatgcagataagccgcgatcgcatccaccgttctagaaacgcagcgacattgcactcaccatctcagaaattgcatccaacagcagctgccatagttgcaagtgagctagagctcagagaagaggaggaagaagaaggcgtcaatggcgaccaccatagctgcgatggccatgcttaagccgtccaagatcgtggcgcggtcatcgccggcgccgtcggggagcggcagggtgcctagcatctcgct

SEQ ID NO: 171 - DNA, 555 bp, Oryza sativa
  unsure (1)..(555): unsure at all n locations
agtgagtatcggcatttttatanggcgaattcnagctcngtacccactagaagacgctgggaacctcttctcgtgcgggtcgcccaacggcagcgtcagtttttattggtgttgagggaccaacctaaaccgggcctcggtcttnncctgggtgatgtggtggatcgtgagggaaacatanacgaaacccggacacgtcctcccgtttggggagcanaggatgctccaggtgtggccggccaccttgaactttgaggactcgacgaagttgcccaccatccgtgcatgttagcgatccccgtgtaaccgtcgatcttgagcatatggcatccggtggtcgccgtggtgctgaccgtctacacggtgacatcctcctccgttggcaccatgagatccatggcacctgggtcgtcacaannnntnggtagggggaggntaggagaggaggggggtgagnccccagggggggatggggggtgggggnncntgaggnggagggggggggggggggggggggcggccggcctgggcttgtgnnnttttttgtttttcttc

SEQ ID NO: 172 - DNA, 630 bp, Oryza sativa
ccgcaactacagaaatccatccaccgtagtgccaattctattaggccctgtttagttcaaaaataaaaaattttatgctaccatatcgaataaattggacacatgcatggattattaaatgtaggcaaaaaaaaccaattacacaaattacgtgtaaattgcgagatgaatcttttaagtcttattctgccatgatttgacaatatgattcaacagtaaacatttgctattgatggattaattaggcttaataaattcgtctcgcagtttcctaacggaatctctacgtttaatacttcaaatgtgtgtccgtatatccgatgtgacaaccaaacccaaaaattttccccagttaaacaaggccctactcccttcatctcaaaatatagctacctttaatatatataatttatcctacttcacatattccttcatctcaaccaactacaaccattttctatttaatttcatcatatacttctttatcttaatcaaccataaccttcacagtttctatcaaaaacaaaaataaaacacaaccctcccatttaattttattgccctctccttaatcccttcaaaaaaacataaaggtatgggtaccgagctcgaattcgccctatagtagtc

SEQ ID NO: 173 - DNA, 625 bp, Oryza sativa
acaaaatccttatgaacagggaaggaattgtgtaacagttaacaacaaaacagaaggggacgagtttattacaacatggcactagaaacatatttcatacttcaaatatatacaatcgcaaaactgcatagctctttatgtatttctttaactaaatgttgtatttaataaaaacccatggtagcaatacatcaaccgatcataccaaaaaatctgcagaatatcaattaccacatctacgcagtcctgatttacataattaccagtatgaaacaaacaaatagcagggcacatttatccaatcatatggatacaatcatcgaccatacagatgaggatacagaatcataccgttaccccatctgcacaaagtacacttgttttccctaatgatattcacgcaaccatgatttccacaactgacatgaatgaatgcgtgatgcatggaaaccacatccaacccagtaacaaacataccggatgaaatacatcccaaaaagcttggaacagaatgcacctcgagctattgaccaagaaaacaaatccagatctagcaataaccgcagatctgaatccccatcaagaaaaggtagggggggtaccgagctcgaattcgccctatagt

SEQ ID NO: 174 - DNA, 613 bp, Oryza sativa
agagggatcctgcacaccgggtgggtgcagcagcagcacatcctgcgccaccgcagcgtgggctgcttcgtcaaccactccgggctcagctccgtcgtggaggggctcgtcgccggctgccgcctcgtgctgctgccgatgaagggcgaccagtacctcaacgccgcgctgttcgcgcgcgagctccgcgtgggcaccgaggtcgcgcgccgcgcccgcgacgggtggttcgggcgtgaggacgtgcgcgacgcgctggcggcggcgttcgccggaggagaagacggcggcggcgaggagaagaaatggcgggagttcttgatggacgacgccgtgcagaggaggttcgtgcgggagttcgtggcggagctgagaaggctcaagggctgaaaacggaacgtcacgcgtcgttaatcagatcgacagctgtcacaactctgaagaaaatcggactctgttctgaagactgtgaagagaaggaatcaacggctgtgattgcttgatactgcatcgcgggtctcgctctagggagtactacatccgtcataaaataaaataagtgcagttttgcactggttatatccaacgtctgacttaacgtcttatttataaa

SEQ ID NO: 175 - DNA, 683 bp, Oryza sativa
atacaacaacaatagatatcataaataacatcacagagtttcacaaatggtacatgaatcatgatgcaatcgactgcatacatacgcagtccaaataaggttcatccaaaagatacaacgaactaatcatcaaactactcgtcaatctaggtaagggagggggtgtctcgcatattatccaaaaaccatctgatacgagatcgaagcttcaaggagtccgtcagtctagtcctccagccatccgcaggatcccggggcaggtagagggtggtcactggcacgcgcaaacctgagtccccacggctcagaggtagtggcccctggatctggcttgggcctcttgcccggaggtcgtgtgctcttgcgagcagtgctaagggtgcgagggcctccaaggaaggtgatgcggggaacaggggtctcatcctctaaaggatcagtgatgtctggctcgatctctggctcggtgtcggttccctctgtctcggagtcgacctggatcggagtctccaaactggaacccagctgtggagaaggtgtagggatcagtggagtgtgcaccaactccggaacaggtggctgtgccgctgtcgggtccactaggtagggcgttgactcggtagctagcatactagcctctcccagaagagcgtggaacgccggtgggtacggcggggtgagga

SEQ ID NO: 176 - DNA, 1705 bp, Oryza sativa
attttcggcataaatagtactgttgttttgcccagaaaatatatatagagagagactttatacattcaaactttatatatagaaactttatagatggaaactttacataggaatatcttcgtaccaaaatttatgcagataaaattaaaacaaataaaaataaaacatccagatggacctggggcaaaccacatgcatggcatgcctgctcgatgggccttccgtggaaaacatgcaagcaaaaagagaaaacactaactagaaaaaataagtgagagcctgtgattaatcaaattgttgctcgtatttgccaaaaagagaaactaaacaatcccgtatgtagtttgttgtgccaaaaaaggaactttaaatctaatcttgcgtggtgagcacgagcgattcgctcattagctttttttgacaataaggtggtcaagattttatattttctcctaaaactagggtggcttggttctacgaatcttttacccataattcaccaactcactcttacacctacattactcattcatcaaatccgacggacgaaaatcatccggccaaatcaaatgatcgctgcggcgtagggataacccgggcgaaggaatcgcgtgatcttttccctttccttccgtgcggacgcgatctttccttccacgccaatctgcgcgatctcctcccctttccatttcccttcacctaccaatctgcgctcatccgcgcgcccagcactccctgccgtgcgccatcgacgttcctccaaacagtgaagatcacatccccttctccaccatcaggcgccgtcgcattctccgccacgaagatcatcgtcgtctcaagcgccgttgttgatcccctgccgccagagcgcagcagcgacgacgacggcaacagtagccaaccagtgcagggggagacggcactgcgtgatcctcgtcctgctacagatatattgcagtgtttttttttcagtttcttaagatctcttgttcaacaaattctaattcataaaagttaacaagttttttagctgatcaaccgttgctttctgactctttgtttctttgaacactgatgttttgattcctctcttggagttcatggagataaacgggcaggtaaggtattggatcagccatggtcaggaggtaatggagatcctgcgagctgattcgaagtctatttcttatcgattggagtgtcgacttcagctcctgaatgaacctgatctttctgcagcagtccatgaggtaactcctgttttcttccaggtttattagggatgcaggagtgcagcacgacgagaaggaccgctgcatacgagatgctcgtgacaatgcctcacagcaagatgatactcataactttctctgacttttcttcttttgatatattgctgggagataaaggaaacttttaatgttagacatacgctgccactgttgaagtgaaatgataccatccgtcgtacatatatgggatttctaatgttcgtttcctatgtaagcaaaggagtgaacaaaaagctggtgtatgattactctaccaatacctgatctagacagatagcactatatgtaagcagagatgcatgctctgatgcagttgattttttatatttataatgtggcaattaaggttttgccactcgatgtctatgatatgtggtctctcttgtgtctatgacatatgggtccagtgacaa

SEQ ID NO: 177 - DNA, 561 bp, Oryza sativa
tgtgtacctttgtagatacatgccggatgtatctatgaaattagtagatcaatttaaaaaaccaatctatcaattaccttgtcacgtactcgttcgatatcatgcgatctgacatcttttggtacgtcgcgtatcttgaggcttggtcgatctcgagagatcgaattgttgatgacgatggttccgatctcgtcgggagatgtacttagacaggttggatctccccacagctaaagtcgtcgagtagcttgttgtcggagagtccatctcttaaacccatctcgtcgaaatcctgaagcaccaaaatccccctacctggtgcgccactgtcgacgtttgatgtcgcgattccagtatttgcatagtatggggatcgttggtgctagggtatacgcgagactgaggtaaaagagacggagacgatgatttttatacaggttcgggcccctgaattgtcagataataaccctacatcctgttggccgaagccgatattgctcttattcaccataatcacaccagtacaatatttggggtagcctatctaactgttgtcgacat

SEQ ID NO: 178 - DNA, 594 bp, Oryza sativa
ttaagcacaaaatccttttcacgaagtggcacttttactagttctgaaccatgaaatgacacttttcctagttaagcaccaagtcctcttcatgacaccgctgcaagactttgtccaggttctccaagcattgatcaaaactctttctatagatggataagtcatccatgatgatttccatgatttcctcaatcatgtcggagaagatagacatcatacaccgttggaacgacacgggtgcattacacaaccgaacgacatccgctggtatgcgtacattccgtaaggacattgtaacatcctcaaattttaaaactaaaatttgactgcatcatgctggcttttgattaatttagtgtgttttaaaaatctatttattcctaagtggttcaagtattacttctttagaaccctactaatttaccctaattataccctttattccgaaccttactaaatttgagcaaattctctcaaatttcaatctttagattatttccttaatttaccctaatattagtaaggatttgctatactccaaaccatagtgaaacctttccaaattcatagtttaaattcaaatcttctcaagga

SEQ ID NO: 179 - DNA, 624 bp, Oryza sativa
  unsure (1)..(624): unsure at all n locations
cgcacccgggcgccgacgccggccatcttccgcgccagctgcgcgaacgggctgatgtggccgaacgccaagaacgggaacgtgaccgcgtgcaggtctccgtctgcaccgccgccgccggccgncgtngccaccggcgccgcaccggcgcttcccatcgtcactcacgacgaacgtggattgcaatcgagggcagtgaacggagacggttggcgaggactttggcattggttctcgcgactttaaaagggagatggagctgttcggacacagtactgcggcttctgttcggacacaggactgactcgtgctcgctggtcctacctaaccgctcggacattnttgctgttcttttttttttacttactagcaaaaatgcccgtacattttgaaaggggggaaggaggagggnnnaagcgggggggggggggggggggnccccccggggggtgggggaattttggagaaanctnaannttaacctgctaagtgaggggctaanntttctaanaattttacaaccttcnnccnnagtacggggtngnnnnnnnnaaggagggggggggtggggcggggtannancnnntttataattttaatagaaanccaggagggagggaaaga

SEQ ID NO: 180 - DNA, 556 bp, Oryza sativa
  unsure (1)..(556): unsure at all n locations
tttttgtatgcacattactatagcgcgaattcgagctcggtaccctccttgagaagaggtgaatttaaactatgaatttggaaaggtttcactatggtctggagtatagcaaatccttactaatattagggggaagtaaggaaataatctagagagtgaaatttgagagaatttgctcaaatttagtaaggttcggaataaagggtataattagggtaaattagtagggttctaaagaagtaatacttgaaccacttaggaatcaaatagatttttaaaacacactaaattaatcaaaagccagcatgatgcagtcaaattttagttttaaaatttgaggatgttacaatgtccttacggaatgtacgcataccagcggatgtcgttcggttgtgtaatgcacccgtgtcgttccaacggtgtatgatgtctatcttctccgacatgattgangaaaaggggaaggggggggggggtggctnnnccgncgggggggagggggggggggaatgttttnaanaagggctncaagggggggcagcggggtcatgaaaaa

SEQ ID NO: 181 - DNA, 569 bp, Oryza sativa
  unsure (1)..(569): unsure at all n locations
attgttgagtcgcacgatccactataggccgaattcgagctcggtacccttcgttactagaggtgtaatagcgtgttacatcgggtatattatatagggtattgttatgggatgtnnccccactaataaaaaaactggtggggaatctgccagtagtgcgcgagaaaaatttattaagcctaattaatccgtcattaataaatgttttactgtagcaccacattgtcaaatcatggagcaattaggcttaaaagatttgtctcacaaattagtcacaatctatacaattagttatttttcagcctgtatttaatacttcatacatgtgttcaaacgttcgatgtgatagggtaaaatattttagggtgggatttaaacaggcccataatctaacttttttattattatgaacaaaacaaggnnnntaattgaggtacaaaatgtgccttcttttctctttnanctttaggggtggagagggaggagggccccccncaaggtggatagtatagtgaaanctttttttnnnnnnnttttttaggtgtgagaacatgccaaaatcatttttg

SEQ ID NO: 182 - DNA, 644 bp, Oryza sativa
  unsure (1)..(644): unsure at all n locations
ttttagagtcgcactatccactatangccgaattcgagctcggtaccccacccaccccaccaatccccaccagatccaacggcccagatctccccctcacctttatccaacgcctccccttcgtcttctccctggagtagtaccccacctcaccccgagccttccactcccccttctnctcctcctcccttctttttacccacccaccctttngnccncgcaaaacccatccaagaagagcttccccccgccacttccattgcgcttctccctgaaaaaacctctctcggcaaggaatacaaagtgaaagacctcttccaagccgacttccgccccctccaaaaccaacttccccaaggtccaaagcccgggcctcattgcgttccccccccaatttcgccccttccaacccttccaaaatattggaagtaaaggaacggncccctcccttcccacccnnanccttacgagagaggaaagatccnccccccaagagaaaagaagctttttaaattntnntncccccnaacccccatntaaanctagtagnaaagaataagatatatttttagtnnnnnnngggacgctgttgtttgtatttgtataaaaaaaaattaaaaaattaaaannccccctctgaccta

SEQ ID NO: 183 - DNA, 726 bp, Oryza sativa
agtagaataccctcgtgaacctcttctcgtgcggctcgcccaacggcagcgtcagcccgtattggtgttgagggaccaggctaaaccggacctcgggctgggcctgggtgatgtggtggagcgtgagggaaacatagacgaaacccggacacgtcctcccgtttgggtagcagaggatgctccaggtgtggccggccaccttgaacttggaggactcgacgaagttgcccaccatccgtgcatgttggcgatccgcgtgtagccgtcgatcttgagcatatggcatccggtggtcgccgtggtgctgaccgtcgacacggtgacatccttcttcgttggcgccatgagatcgatggcacctgggtcgtcagacaacatacggtggtgttcgatttgtttgtaaagtacgttggtagggttcagttaattaaatatatggagaagttaaggtagatgtcggcctgtagttcgtctcggataagagccattttttgggactgaataagtattactactacatgttggatatcacggatcgttgcaaactcttcaagtctctgtccggttcgtaaacgaacaagggggagatattactgatttcttaaggtgctatgaaaagctagtaaaaactaatgtgttaatgaaaaaaacggatgaatatgaaaaacataatattctgataggaatgtaagtataaaatagaggattgcacaacacacggaaaac

SEQ ID NO: 184 - DNA, 1908 bp, Oryza sativa
cacaaaaaaggaaaatcatctagattttttttacctttaaaattacatccaacaaataccaaaggatttgaccaaatccatatttattaatatataattttaatcaaaattacagtatacttacatgtcacatcaactgaatttacaaatgtaattttagttatataggcctataactttatatttcacgacgacgatgatgagagaggcggtatcgctcgccgaacagctttggccgtactgccggcggccagctcgatcagaggccaccctggcaccgtgcttctccaacatcgcgcgcgggcgtacgtaccagccggccggcgagcttcatgcaacgttcgatgccgttcacattgcaagctgcatggatgctaaaacgtatcaaatgccagaaaaaaaatcacacgagagatggatagcaaaaccgagttcgatgggagtagactcaacttcggctgtgtctcgtgtttttttagtaagtttacctgacgtctctcaattatccacagagcagcccaacaaatcaggaaagacattcaagaaaataacttcgtttttcagcctccttgatgatctcattttcttcctcttctcctcccctattgttgtcccctctctatcgttatttctatttcctaagaatgtcgcttcatatctccggtaacagttcacttgtaagctctatgtaacctactaatttcaccccctctaatgtattcggcaataatcttgccgctttcacctaaaaaaactatacgctgagtatatctgagatcccctaactgcaatatcaaaaatgtgcaccacggactatgtaaaacagttcaaaaaaggtcccagattatagatggccaaacgggccacccggcccgacacaacccagatacaaccggtacggcacgacctacatgtcgggtcgtgtcgtgtcagcccgcgagctgcacacacagcccaggcacgatccaataagacttgggccatgccaggccggtccgaaggcatgacaacccatcatgtttctctataaaataagtctatttttcctccctcgactctttgggttgtgtcttatatggctaaaaaataagtctattttgtattcctcttctctttgggccttgtcatatatggttaattaagtctattttagatccctctactattttcttccaccgtgccgggccgggccagcccaccgtgccaaggcatcagccttggcacgacccaactgtcgagccgtgcaagcacaggcccgacaaatagtcgggccatgcaatgcttgggctgggcgatcgggccttaggccttatggccatctatagtatagatacctggtttcgctgacgtggcatcctagtcagaaaaaaataaaaaaaatgtaaggcccacatgtaagtgagaaggaaaatgtgggccccacgtgtcagcatcatcttcttcctttcgctgacgtgacatcctagtcagaaaaaatttaaaaaaaagtaagtggggcccacatggaagtgacaaaaattataggcaaaatttgctacaggacactgaaatattgcggtctttgctgtgagacacccgaagatcgtgtatttgctggtggacattgtaaagaagtggtaattagctgctggacactcctcccattattttattatttccggtcaaaatggagagagaaagagttgtgtaagtactaaaatgcccctggacacgtactgttcttcctctctctctccttttcttttccaattcttcctcgcgacggcggccggcccgagccgggatggctcggccacggcggggcggcggcggcggcgcatcaccggggttcaccgccgacggcgatcacgcacggcggtggcccggcgcacaaatgaggtcggcaaagcttggttgtcgacgatggct

SEQ ID NO: 185 - DNA, 6390 bp, Oryza sativa
accaagagtagggtagagagagtgggagagagcaggagaagagataaggtggagaataaggatgacaggtgggtcctacattttttttcccacataagcgtctagtcagcatgagtggaccgggtcaaattgccacgtcagcaaaaccaggtgtctattctgctataggacctagactggacggttttgtatagtttaggggtaaagatatctggtattgagaataagggatgtcaaggtataaaattgagggacgacagtgaatgtatagttaattaagtactagcttcatttcatattattcgtttgactttttttctttagttaaacttctttaggtttgactaaattttataagaaaaaaatagtaacatctacatcaccaaattagtttcattaaatctaacatttgatatattttgataatatgcttattttgtattgaaaatgttagtatatttttctataaacttggttaaatttaaagaagtttggttgagaaaaaagtcaaacgacttataatatgaaacaaagggagtattaggcttaaaaaaacttgaaaatttgattaatatgattttcacgacaacttttctatagaaattttttataaaaaaataccgtttagtagttttcgaagcgtacgcgcggtaaacgagggagtaaggttgggaacctcaaattgagagcacagcatcatcatttttggatgggcttggtgcgcatggttggatgaactacgaatgagtttacttggaaattttttcatctcgacgtcgagtttgaatcgtgttgacaaaccgtaataccatatacaatagattcttaacttgtaatactggagtacttgagatcctatagcagtattgtgcttggtttcaactaatgtggcgagttgaatgtggtcaacctggccgagttttgcgtgggatccacatgggccccacttgttagggcccattctctctctacctatctctattttttttctctttcgctcttcatttgtaggctggcgccgcccaacatcatgtggtcgagctagaggagttgctttggcaggtggccacagcggcagtggcactccccctctctctttcgccctttgctcgatgatggttgcgtagggcagcggtggtgcttccccttccccgactaggtcgggcttgcaacgacgacaaccttctccccgtcgagctcctcacccatcactgtagttggtgagctatagggtaagatagacttaaacctagggccttatcactttacagttaaaattaaccgtacaaagttttggttttctcaaaatttggggaggtaacaatccaaacattgccaaaaattgctccactatcaaagtttggcaattttagaatcttcctctcacaaaaaatttaaaaaaaaacaaactaaacatagcctacacttgttaactttaccaaatattgataaatttggtactgtcaaaatttggcaatgttgatatttaggcatcaaaaagtgaacaacccgttccgatgccacaagcccacaacccacctcaccctgccgaccatgtcaaaccaagcagaagcttccagagcaaggtgcccgcggcccacgtagcccacgccgccgaacagcacacagccgcaactcgcacgaacccccgggcatgcctgaccttgtgcggcggcgaccatggctgccccctcgccggagcggagccctcgtcgccggggaccgactccccggtgctctgcgtgcgaatcgtatccctcgactaccacatggcgccgcccctccccggccggattcgacttctcctacagccacttccacggtgcgtttccctccccgccccctttctccacccgcctctctcgagcccccgtttcgccccccttgtgctatgcctctgcaccgcgcccacgtcacgtcaagcggttgatgagtttgatgtgtggtggatttaggtgaaggaggtgatcaggctccactccttacttgcctccacatccatctggtgcgtagcagcttctctgatgagtgcttttttttttctctctgttgatattacggatgagctagttttggtcgtcatgtttggttgcagcttcaagctttcaaccgagtgcgtcgcgtcctttcaagtgttttgagtgtgagttacgctgtgagggtataatacatttgtgtttgctgttaggtagccatgcgcagcaactaatcctcctcatgtattacacggtatctatgcccaacaattgatgcccatggagggaatgtggcaatgtgctctttgttgatactgtacgcgcaccaaattcgaagtttggagatccaacttcactttcgaagttcactaaatttgaagccctcttatcctgcatgggcttaacattattttctatacacttggtgtttgcttgtaatatatgcaatatttacttctgtgtgcacttgatttttgttttttttttgttttggttgagtttggacatgcatatgatgattagctctattatattttgaattcatgtttttgaatgaatacagatatacttcaattttttttatatcgcttctctatggaaagttgctcacactattccattcatcattagttgtgccaactagtttgtaaacgtttgctgttttttgtatctccttcaatttctgtctgtgccttgcacagaggaccttctcataacattgaaaaaggtaattcattatttgtagttatgcaaccctgatgtatcatgtatatgctattactgttacttttgcaatttggtacatggattgttctattttgaattgtactgctgattttctatctacattacctgaaaactttttgctgatgattttcatatctacatcacctgaaacttgaaattgattgttatttattcatattctaactgagccttactgctatctcacaaactttttagacactaattcctcttgtatatggcagttgcacaccgctgttgcaattttattgacttaattaattaattcgtgatttgaaaggtcacttcttcatctgtcgaaagcttgccttgtatgcatctgcaacacatttagataacttaaacagtaggctgaaccctttgtatgtgcatgtggctcggtaagcatctcttagattttgtactggtgaaaagggcacctgtgtctagaaataagtggccgttactttttcttaaccaaatagcctaaatgtgttattctctgcaaatggtagaactgaatactgatgctccctgattaactgttgcttgtaatgtcaagaacatcgcttgatgacaaggagaaattgatatgtctctttcctgccctttctctaggtaattcatatataattggggtctatcaagtgaccttgagaaagctttgcaggtatttgtgatgtccagttatgtatccataactttattgttttctaaaaagtattttggctgctatggatgtttgaaccagttctagattacctgttctttccttcacacctagtgtttccatgaacatattccatatgattaattataaatcaaaaccaaacaaagtatttactgaaatcttcacaaaagatatactgagttgtggaacacagtaactgcatcctcgctgtttcctttgctgtgcaatttctgcctatcagtgttcatcctgaaagattatattaggttctcctttaattaattaattttgatttatttctgtatttttttccttcagaactaattcttgatttcttagcattaactcctattttatatttattgtctagcttctccttgtcaatattgaaactgttgtactcactatatgtttctgtttcagtgtcctaatagtttatcagtaaatatactgaccatttattactggctcaatgcttggtgtgagtatctaagttctgatgtcttatgattgttgcttccacctagagtttgcaaccatgatatattattccaattctggacttcaaggtagtctatgtaaaatggtaaaaatgcaaaacttccttcatttgttctgtgttggagttatcatgagaaaaatctactgatttgttttgtagctaattggctatacataatgcctatgcatatattcttgacaagcattaaataagtcagtgggaattttattggtgttccgtgatatccttaatatttgttgatattgaatccaactattgaataccatgttgcttgtttaaaccacaatttcatgagaaatcatctactgcacaagtgcacattctgctgcagcccagctattggtctgttgaccccttctgcttaatttatgaccttggtattttccaaatttccagtagctaaacatgtctgacaggaggaatatagctgttatacttctagatttttttttctttcactattttttggcaatggtactttgttttattatcccctctatttcttcttaattgttactagtattgtttatatttcactgtctcggagttacaatttggaccttctctgctatagtttaacatccaggtatatccattaaactattatattacagccggaaggtcagccagggatttaatgaaaaaaaatttaaaaaagccttcatttagtgttgacatattaatggtcaaaccttgcagaattttaagggtagttctgacactgaaaggagtatttattgaaagagagagtggtaatagatatttcaatattattattggcttttgttcattgcgtatgtttcctttcagctttacattaataatgactacacttgtctgctgtaggaaactagtatttttacgtgaaagatttgatttcaaacgccttctgttgcatgccatttcacttgaaaaatgtgcattgtgtctcagtgttgcatgtgtatgttgctttattttcatgatgtgaagctgtggattcattctcctagcaacatgaaacttggcctctagacagttatgccatctaggatcgagtctgttctctgtacagactatcatatgttatagtaatttgaaattgttcagtttatcttgtgatcttccttgtaaatacactttactcttctcgaatgggagtattttaaactatttcctgtggttcctgattttgagatgcttggtttcaggatggtgctgttcttaatagagtattccaaccttatgagtctcacattccctatcttcttcactttttggtaagagcaacacttagtttcttttcatagttgttgtgaactgcaagaacagtatttcattttgtctcttatgcagtcttaacataataaataccacagtctagcttttatgatatatagtatattgatatttgagcggctggagtgccaggatattaatgattgaattgaacctgtgaatggagaagaacaaccaaatgatcaaatatcttaccgcagttctgtaaggctcgatgagagtagttcgctgagcaataatattcctcagcttgatgggtcatctgatgaaaaccaggaagttccacaagaagatggtaagtataaaatcaacaggaaaagtgcaggattgcctagttactcatctcctcaaagtagttgaacttctctggtgctctttgccacctcccattaaaaagaggtcagatgtaaatgttgatggtcatgttaaaacctctccagacggtgcgatgccaactgagaaggaaccaagtgtttctttcatgagtagaactggaaagaactcccatgctaccacagataagactggcagggaatcttttagtcgatcaggtgaacatgacccattgtgtgattctgtgagggtctgagagacttgatgatgaggaggaggatatcttttcagtctgaacaatcagaagttggcaagtctggagatgcaatatacatcatttgtaaagagaatgaaattgtgaattccgagggactagaatggcctgattcatccagtggcctttcaattcataaatgtgtttttctggcagtgaatattagcagatgacctttgcacagaagcctccaatgaagaatgaagtattatgttgtttggagggctcttcagcaggtagtgagctgcctcagtttaagttaaagtggtatttatttatcatggtcaatgtaagttccacaagtgatctttattttatcatggtgaatgcaattcatttgatgtatactgtagttgttgctcatgtaaattttgtagtagttttgatgttgttgttaacgatctaatatataaataattgtattagtgcctacgtatgattatgtaacagatgttcattgttttctttcagtttttctagcattaggcttttaggtcctttgccatttacatagcttagcatgtatgcaaaaatagtactccctccgtttcacaatgtaagactttctagc

SEQ ID NO: 186 - DNA, 1359 bp, Oryza sativa
ggtcagcagcccgctgctccagtgcggctctctcggcgcggacgcattcaagattgcggcgcgcctgctcctcctgcgccgcctcgcgaagtgacaggctgtccgccagccgtttggtcgtggcctcagcctcctcgagagctcgctcccgctcagcgagtgcgtcctcgcggagacggagcgcgcactcctcctcggcgtaggcggcctcgtgcgccgccagcgtcgcctcccggagagcagcggcggcctcgcggtccgtcaagcctttctccacggcgccggcgtgttcttccagcgccatagcacgggcctcaagggactcctcgcgccgccgggacgccgcctcagcctctgttacccgccgctctcgggcagcggcggagtcaaggactccctgggcggcgtcgagcttttctttcagctccgcctcccggctggcgttttgaaggcggagggcgtcttgcgcctcaatcatcgtggtggtagcgatgagggcggccgctcgctcctcctccacctcacgagcgatctccgtcagcgccgccttccgggcttcaagctccgagacgtgacggcggtgagctttacggcccacctccaccatggcgtccaccgagcgccgcccctcctcaacgcgtgcccatgcggcctcgagctccgctcgttccgcgcgcagggcctccacttgggcgctgaacccatctagcaccgcggtgtttgcggcggccaaggcctgcagaatgggctcggcgctcagcggggcgacggaagatgaggagaagagccgccttggagagaaggcgatgcggctcggccccccggagaacgtgctgggctcggggatgtcccccgaacccgtttgatcctgggcgtcgcccggggaggtgggcccaggcgatgtgcccgcggcctcgtcgcgagcctccccggaggctgtcgcctgagggttgcccgaaggagtgggcccagttgacgcgccagcagcagctgttgcctcagcctggcgagcccgggcggcctcctccttagcggcttcctcagcccgggcggcctcctcccgagcagcttcctccgcttggcgaatccgggcggcctcccgggcggcctcttcagcttcccgaaggcggtctgcggcttcacgccggtcagattctcgcctccgctcctctgcggccgcaggatcttcggcctcggactggccggacttggggtggcgggaggaatgcgacgggacatcgctgaagcagaagaaaaaaccagaaaacgaacaaaatgagtaagaaaaaacttctttttgggagaaagatggttgcaatgagagtgagacgaacctgcgaaggggtcggttgaatgacc

SEQ ID NO: 187 - DNA, 633 bp, Oryza sativa
tactgtgccatccggctatacgtggtgaaccaagtgttctaggacaacttgatttaaaaaatgttgtacaggctgaccaccaggcgttgccaacccggccgatgcacctattgaaccttggtgctggattcgactgaatgatttgctgtcttaacagcgtctgctgaatcggctgcaaaggctgttgccttggtggtgtttgctgaactggttgcatgacctgttgctgaattggttgcacaacctgctgaattgggggtgtctgctgaatcgactgctgctgtattggatcaacaatagattgaggcggcagaaacgtggcagcaacctgatcttaggtcagctgatttgcaacctgcccgccatgctgtagctgctctctcattaacaaccgagggttcactggctggcctgacgccattgctgcggaacaagtaggagagttgacgccagtgccgtcgactgagatgttggtgcaacagagggaaccgcttgagttgatggctgaacatcggtaatcaaagaccgataatttggaaagacaccttgcaaataaaccgggcctacagcctgatgctcagctattgaaccatcggctatggacttcatcatgtttgataaggtattgactaa

SEQ ID NO: 188 - DNA, 10548 bp, Oryza sativa
  unsure (1)..(10548): unsure at all n locations
catgtatgcaaaaatagtactccctccgtttcacaatgtaagactttctagcattgcccacatatatatagatgttaatgaatctaaacacattcatttagatgctaatgaatctagacatatgtatgtggttagattcattaacatctatatatatatatatatgggcaatgctaaaaagtcttacattgtgaaacggagaaagcattatttatttgtttgttatcatttgccatttacacagcttatcattatttattattgttttccctctagaacagtttggactatcaaccaaatgaaatagtataccactataacttactataagtacagtgctattctgttaaaacttaatctttcttgaattttccggtatcatcattcacttcatatcatttaaaacacattatattttctctgttaatccacattcgctcttctgctatttttcaacttctaaactgggatttatcgatatccctctgtttttcaatcagaatgctgaagcgaataagcagaatgaatcatttcaacacatggaaagtagcgagttttcattggatacatggggtgttccaactcatttccaaaatgattggtcagccctatatttgctaacacatgcatttttgccaccccgtgggccagtggctaacctaacaatcttgttccattagtgtctccggtatagattatttcctgcacagtcaatttaatgaccatgtatcgatgttgtcacacactgttatcttaggccatttcaactgtagtgagagagtgtctgttgatcaggaacgagcaaacaattctactctttcaccatactagcaaattacccatgccatgctatgccatgggataaaaaatgaaactgctttgctgtgttattactacgcagcatttgggtgtttttcccccttttttttgttttttcctaattggcggttttctggagaaactgtttggttttttctagagggggtggagcacagaattggttgggtggagaggaggaggacgatgactcccttttagtgtagtagagatatgggaggtcctactttgatggacgattctcttgcatccaaattggctttggagcatagccctacaacctttcctaatggtacagttatgatggaaccagatctttccaaccaagtaatgaaaaatctactccctccgtttcaaattataagtcgttttgactttggtcaaagtcaatctactttaagtttgaccaagttttagaaaaaaggtagtaacattttcaatccaagataaatatattatgaaaatgtattcaattatcgattaaatgaaactaattttgtgctgtaaatattactatatttgtctacaaacttaatcaaacttgaattagtttgactttgatcaaagtcaaaacgactaataatctgaaacggaaggagtagctgattggcatgagttttcccagatcttaggaagagatgagaaggataaactaacacctctcagtcaaattggattccgtggtcctactagcactggtagtggattacaattgactataagtagcatagtggttgtaccacattcttttttcttttgttcctgacgtacatatgtttctttttgttaattcttcatacaatgtaggtgctaatttactgttcgtggaaaaatctatgtctgcaaccagcagttcttttttgttattattaatcatgtcagtttgacttgctctatccagtgaaaagaaaatgcaaagttgaattaccagtttatcacatgacatttatttcattaatacatgtattaacagaaagcagaggagagctgcatcctgatccacgatttcgtgtcatcaacgctgtatcgctggctgttgaggatgatgctgacaacactactgaaatcatgtgctttatacgtggaaacaatgacagttcacacaggaggaggttgtgtgaaatcactcaaatcttggaattgtttgttgttttacttttccgtttcttcttgttttggcactaaccagtcatcttttcctttttaatcaaaattccattctgtttaattttgtttttctcaagcaacatatatcttaatgagtctacagaatctcaaggaattgaactgtcctaatcagaagagttgtgtgcttgtgttaaatgtgaaatttagtacattagtatgtgagtcataatcctagttcaacaagagaagtctgcatggacatcgagtgactatggtggtgactgctacagtgcagtagcaactgatgtcatttgacgagagtactttggatcattacttttatttatgggtctgttaaggatttgatatggtaccatcaaaaacacatttgttgcttccatgtgatgggcctttcatatgtgctgaacatatcctatgcttctggacttgaagaacaccatataacttcgggttcttttatttagaatttgttggatcataaaccacagttttactgttttagagttacactctcatgtagccataattgtttgttttcagctaaggaacttgtttgattcttttttaagggctgtaagagttcaacctgttgtattgagatgtctttattgtcctttttcttgtaactgcagaaacctggatagagttgccggttgcgacataaacgtatttccttgagagacagaaacttttaaaccatcttattaatgaaatatgttcaatcgatccagatattatagttggatgggagattcagttgggatctttaggattttttgctgaaggagctggtataggcttactgaaaagaatttcaaggacaccaccaaatcagatgaaacatccacctatgaacccagtggaggaatcttgtcaggagtttcctggagcatcttcagctgatgatgttattgatgatgctagtgagagcaattggagtcatactcatgctagtggtatacatgttgatggaagaatcattctgaacttatggcgtctcatgcgtgcagaaattaagcttaataattactcccttgaggctgtagctgatgaagtcttgaggaaggtaccattagtaccaaccaagatattgaatcgatggtttgcaacaggtcctggacgaggaagataccggtgcatagaatatgttaacaattgatcttctctcaaccttgaaatattaaatatacttgacctggtaaatggaatcccccacatttatcgtgctggtacatcatcaagatattgctatttgagatttcctttgtatttctagttgaaaacttttatcaattttgcatcttctccttaacaatctcctagccacgatttatcacacagaaatgcagttggttttgttgacatttcttgcacaagctacttctaaatgttgttcttctatagccatttttttccgacaaatattacctgaccatgcaggtaaagaggacatctgtacttgcctgtgtatttagtattgatttcttctctgttctttcacgaagttctctgtatcgtgttgaatctatctatgctcttgagattggcccatacacaaaactaccttgcaatttccccaggaaattaacaggtgaaatcactccctaacatattaagatctcttcagatatatagtttctcgttcacatttaccacaaattctggaacatgtcctagagatgatgttatggattctactggcaggtaacaggcttgtattgtatacatgatttctttgtgccaaagatggccttttgcccatttggtcagcagggatccaaaagaagttactacctccgttttatattataagtcattttgacttttttactaatcaaaccttttaagtttgattaagtttatagaaaaatatagcaacgtctttaacacaaaacaagcatgttattaaaatgtaatcaatattatattcaataaaactaaattggtgttatcgatgttgctaaatttttatataaatttgttcaaacctaaagaagctttactaagaaaaaaaagtcaaagtgcaaggaaaaaaaatatttaggacacttttcaagattttgatgggagtgctattttaagcaccatgaaaacttaactttacctgtgcatagaaacaaaaaaaaaaagggactccccctgcgtcgctctcgcgcgggcggctcggggggcgaaaaaccctagccgcccgcgcctcctctcaatcccctacctcgccactgctggagcttgtcggcgcgaagccggtagctagcagggaaggtggcagcgaggacttctcttcgtggcgcgaagtggacgggacgaagacgacgaagctccccgccggcgcggtccgaggaggccacgacagcaaggtggggtgaggcggcggatcggcctttccctcgcctagatttgtccgncggcagcgggaagaagctttgggcaaggttgcggcggggttgttcgggttggccgggcttggttcgcaagttgcggggggaaggcccaggcaagcccacgggaagggggggaaaagccaagcttgccaaggggggttcattggttgccttggcggccaagcgaagcccaagacgcagcgcccgccccttgggcgcggtgggtctcctcggcgtccaggcctcggtggcggctcggcgtggtgaccggacagtcgggatgccgccgcgatggccaggtgagatgcggcggccgaagaacaggggcaccggcgggtggcgccgatccggagcggctgcgccactagcggccagatggcagtgcaaagggagctggcagtggtgggtcgtcttcctcattgccggtcggcaccctcgcccttcccggagctcctcctcttctttgcagggagtttctaggttggattgaggtggccgctcgtcaacgggggaagctcatgctgccgaagcaatgtcacctagtcccgggttctcctaaagccaaaactgacgaggcggccggtgggtggtggaatagaggggtcctgggccaactctcaggggtggtggttagctgaagtcggccgacggaggggcgttggtgcggtgtggtggatgctatgtactgccatttgtctgtgtggtagttctgagttggtggatggcgatctgcagtcaaggttatagggtaccaggcgaaagcctagttcggtggttcaccgggccagcagcggctacgtcttcgggcgtcgtaacctccttgggcgttgtcaagggttaccatcttcctttctcgacgagcttctttaggtgaaaactgttagaataggtgtcgaatatacttcctatttggttacagttggacttagagttgtaataggtgttaggggatggagttagagtcagactctgtaacccatcatctctcttaaatagagagggaggcaccacaatgtaaccatggcgactgcaatgtagcgtagacacgcagggagatgatgacggcgtggccatgaactcgtagcggctaggagctatattggttggggaggagcgcccataatcagagccccggggatgtaggctttgggtgaacctcgttaacaaatatcgtgtgttcttgtgtcatcatctggcatgtcttgggtgatcaatgactgaagcgatcgggaaggttagtcgtcgttccgctatatcgactaacttttataacaaaaaccacatctttttagatgggtgatggcggcatcctgtatgtcgtgaccaccgtggtggcatcgttttcggagcgtcatctatgtggtacaaaaaccacatctttttagatgggtgatggcggcatcctgtatgtcgtgacaccgtggtggcatcgttttcggagcgtcatctatgtggtgttaccataagcctagcggtgttcggccatacttagcgggggtcgtttagtgctaggtttcaccctcagcagtttgtgcttgggtgttagtgcgtggtgtgtggcaatgcaccttggtacattttaatgttttttcttataacttttactccttaatatactcggttagcctccttcggtccttccggcgaaaaaaaaaactttcatgccgggcatcattttatccatctgtctatcttctggtttgttactcacataaagttagaaaattggatctgttctttgctacaatttaattaaatatgaatgcctaaaaatatagattccagtattttaagtgttctgtgcaacttcgcaggttgcttctcagccagtcatggaatgcttgccactatggaaccagagtcaggtttctgctctgacccattgaatccttttatccctccatgataataagcatatacttgggtaaagttttttccgtcatagtcaagggtacttggtgtcagctcatattcagccagatccacacggaagattgctgactccaaaatggttcctttacgtgcaacctgaggtaatgcttttcttgggtgagctaaattgttttcaaacattacagttactagataaaaccacgcgcattgctacaggaatttaaacaataaaaaaataacatgtaagataggtagataacattatattaagtaaattgatatggtttatgataatttaaatttaaatagtacgtagaatgatgattcaaatgtaaaaagtaagatgatatgattttatggaagaaaaaaagtagggagataatttgaactgtagattaatcttctaagggctaaaaacaattgatgtgatatgacttaattaaagggaaaaagaagaaagataatttagaccatagattaatcatttaagcactacctaagtgaggatgaactatataaatatataggatatcataaaatataacaaagatatacattgaaacattatgtgaattatgttggataataatttaacatgtttgtatatgaaaagctcctaatttataaaactataaagatatagcatgtttgcatgatgtttaaatgtgatgattattagtggatgatgatgtggcatcttgttaattagtatatgaagatgtgacatcttgttagtggatgatgatgtgtcatctttgcatgtttaggttaaggagtttgttagaggaaaaaaaggagaaagataatttggaccatagattaatcatttaagcactaagtgaggatgaactatataagtatgtaggatatcataaaacataaagatatacattgaaacattatataaattatgcggaatgataatttaacatgcttgtattttaaaagctcttaaattataaaaactataaaattataggtaatataacatgtttgcatgatgtttaaatgtgataattagtggatgatgatgtggcatctttgcatgttaaatttaaggagttagtgggggataactttatagtaagatactaggttaggattacatggttttttatttactttgttatagggcatgcctagcatcatatctgtagactgtagctcatattcagcggtgggtgaagtgaccgaaaatcttgggaaaaagtacattgaaggtccctcaacttgtcatcgagttacaaaatcgtcccccaaccacatttatttgatcatttgatttgatgtcgattcttctccactttatggttattctctgcaaaagattagtaatcctaatactagtgaaaagttattattctaacttaaatatgcattgcaagtataactagttttcctctattttggtaatattaacggtcgaaactgattgcgaacgatcgtcaataaggtcgaacacccgagcggtggagtggccgttgccggaggtgcgagcggagtcggcaacttgacccaatggctcgtcttgtggccgccgagcgcttggtagaagctaaaggacttgccgtatacggagcacttgaactccgcacctaccggtgctggccccgtcgtcgagagaggaggcggcgcctggacacggtggtggcccccgcgggcgagcatgagaaggcagagcgcgaggttctcctccgatcgctggcggcgcgacctcttccgcttcacccacccctgcggcaggtgcccgccctcctccccgcttgtggcgctgctgcttgtcacgaccgctgcctcctccatctcgtgctgctgctcctcctccttaagcaccgcggcgtggagcgcttccgtctcgccattcgagacaggccgccgccgtcgcctcctcctttcctgccttgccttgatggcctccgccccagctgccgcccgacttgccgagaagagtgagagagagaggaggaagagagagggtgctgacgtggccacgcggacatacgtgggtcccacgctgactcagccatcacataggacgaaaccgggttcgaaaccatcaaagaacataaagtgaatggtttttgtaagttgagggaaggctctatatctgggtttgtggttggatgatgattttgtaactcagatgacaagttgaggggccttcggtgtaccttttccaaaatcttgtgctagtaaatgggccaaaagggtattcgtaacaggacggcccggcccatatgcaggaagaggaatcgtcttgatgtctcctcagtcctcaacctaaggatacatttccccgtctcctcgagaccttcgactgcggccccaagcgccgccgatccccatcccatcccatccatcccgccttcgccgcgccggaggccgctggtgttcgtccacctattcccgccgtatcgcatccatttctggtgagcgtccaatcctctttctcatctctatttctctctcacacgcacatttgctcgcgttaacccttgtttctctcttctagtagagcattgcctgtgggggacaaaagtttcttttttgtttaaggtattcggaatcaaatcagtctccggttcgtaaacggattagcggtgcgtattccgattcgattccgattcttagacggagtttttttagtttaggctttatatatccagcaaattggatgtaggctttccccagctcatgttaaaccttgaggttgtcgctgtgcagatacaaaaagagtgaagggagggaggggcagatccagatcgagaggaagcaaatgtcatcagaaataataatgtcgtccaagaggctatgcagagagtcagatgacgaagacgaacgccattgcagcagcagcacgaacacgaagaagagggcgtgcagagagtcagaggaggaagacgaacgccattgcagcagcaacagcagtacgaagaagaagagcctgaagctgggtttggttcccttcagctctcacaaccacaaccacaagcagcggcacctgtacctggtgctggacgactgggaggcaggatacagcatccacaaggttgtcgacgacgacttcggcgcccgccctgccgccgccgccgccaagcacaacccgctcatccgcatccaggcgcagcacgcctactcaaggttcttcgctgcccacggcaccaagatcattgccatgcatcccgccagcttcagccctggcatccctgtgttcgacacccggaccctcgagatggcggtgtaccctccccctaagagcagatccatcatctgtccacccgtgtatgcctccgtcggcgacaggctcgtcacattcgtccaccaatatctcgaggtgctggggccccatccaccacgctccgccgccgtcgacgacgacgatgagccagagccgccaccgtggtcctggaccaccgtggagccactcccgcaattccactccggcctcgtcaccggctacgccttgcacccggatgggcgcaccatcttcatttccatcgaggattgcgttacgtttggcacgcgtaaatccaccttcagcttcgacgcggggcgcctcgagtggacccgcgtcggcgactggatgctgccgttcgagggccaagctcactacgaccgtgagctggacgcctgggtcgggatctgccgctacggtgaaggaaccgggcatctctgttgatgcgacgtccctccttcgcccgccgccgatgctgcttgtaccaccaccttgcctgcctggaagttttgcaaggaggtgatgttcaagaagggcttcaccgggtactggggggctacgctcgtgtacatgggcgacagcaggttctgcctggtggattgccgggtgcctgatgactgtgacgtccgcaccaccctccgtgtgctcaccatcacctcctttggtctcaagtatgataaggccggtgaactggtcaccactcggtaccgtgcttacgcatcgatctcataccagattgctggcaaatttaagagactcgaggatcctatagcattctggatgtaatttatttatgatcatgcaaaactagttagtagtatcaggtgttattgtcctactcagttttattatatatatatgtgagcatgcaattttggcataacctgttttatatatggtcgccttgtcaatttggtccatctttgtcagcactgtgttttgctgtaaactgcttttccctcttgtagcacaatgcttaaaaaactgggggaaatgaatccctataactttacaaagtgagttatgtctgatgcctaatcagtacattttgcc

SEQ ID NO: 189 - DNA, 7498 bp, Oryza sativa
caaaagtttcaaaagtaattaagctcaccttatcttgctaccggccttctgaacaccagattttaggaacctattttaaaagacactgaataagcaatcttgtaaaatcagaggaagcaacttcgatttagcatacctgttgctaaacagatcgagtgatccagatatcaagacccgagcattgtttcttgcctgcaaagggacatattaggcttcttaaattcatcggaaagctacatactggtgatcacataaaactgatgagatacaaatctttgcagaccattggtctagcagtcaatactcaacaatgaacaacggaatgattactggccaagaaaactgtttcgcttgtcctttcacttttaaggaaataaagtaagcaaaacccataagcatcgacaccaggtggctaacactaatgtaaactaaattatttgttggccataaaaggaagggttgtagacttatgcagaactttacaggaaaccatttaactgaaatggattgatccataaatatggtttagtgtcttatgttaatattttgtcaaggatagaagcactaaaccaaatctgagcaacaaattccatagcatcaagcacatgagacaagcataaatcctgtacctgcataacagaaaccagtgatatagccgaccctgtgagagatggaggggaagccaacttagactttgggtttgctgagtatgctgacggagaggcggataagactttcaggacctacatatatttaaagaaggataaatgaaagattatagttaaaacttcctatccatagtaacaaaatagactaatagaggcatgcaattttttggtaacaaaatagaaattaaatgacttaccaagctgttagatggattaaccgcatgtccaattccccgaaataatacaggggcctagtaaacagggagagttattaaaagaaagcactacaagtacacattgtaaacaaaaaacagaaaaggtacccacacattgtgtcataggacagcagtggaaaatgtggtagaaagctttttgaatttaatttgacaggcactcgtgggcacaatggacagcaatgaaggaccaaaattgttcccatgacagccaaaattctactgactgcaaatactgtaaatattcttgctactgaataaatccaaaacagtactcagtccatgactctcatgctcattattcaaatatatcaatggtgatcaggatttagtctcaactcagctccaactacagtttattacaagaaagtaataaatatataaaaaattaaagagcagaacggttgaaagacatgagtcttttttgaagtattagtaccaacctcaattttctttgaccccagtatcacatctgactggatgaggtcatcaccagcaatcaaagtatgatcaccttcagcatcagtggcagcataattaatgtgatcaataaccattgcctctggatcctggcaccatccataaacacatgagactgagggaaacagagacaacgattgatcaaattaacaagctttagaaccacaggtatatcttacctcatcaaaatcaaccccacactctgttgcaatgcctcggataagatcagaggccgaagagtctgctgccaggatcatatcatgaccagcatcgatgaattccagaattgaattttggtccactgatcctccaaaacctgccagtgaaaagatacaaacattaagacttcgcaggactgaggctaaaccaaaactgaagcatcacgagcagagagcaaagcatttgcaacttaacccacagatttaaccagccacaaaggagcaaaaatcaattactctgtagcacagcagaattgaaacgaacttgactgttacaaccagagcaatcaaatcagaacacaagtaaatagcccttgcagtggttgatactgttacaatctcatttttccactagagctaaacaactaagcataacctctacagaaccttactacctaaatccttccagttggcgtagaattcaacaccccaaaacccaatggatggattgagctacccatcagagatcacagaattccactactcccaaaacacagatcggatcagacgaacgacctctctactctacggatctaacgcaaaaaccaacccatagccacagatcggatcaagccccatccatccacgaactgagtcactggatctcatgagcaggggggggataatgagggagagagcgtgggggaaaattaattacgcggggtggagggggcgaagaggacgaggccgtcgtagaggtactggccgtagcggtggagtgagagcttggggtcgtcggcgaggcggaagtcgagatcgaaccctcgcccctggagcgacgcgaagaaggccgagtgcgacgaccgcaccgccaggtcgtccacgagcaccagcacccgcctcccccgcggtcccccctcgtccgccgccgcggcggtgacgacgaggagggcgagggcgacggcgagggcgaggtggtggtggcgcggcgccgccattgctgcgagatctcgcggcgtggggaggttttgtttcgcgtggggtttgggagaggaggcgacgacgacgaggaggacttgaggacgcttggaggggggagagggagagatctgggccgtccgatcgtgcgatccgacggcttccaatggactggatcgaagtggccgtgtgcagtgtggctgtctggtctaggtggtgattgacaatccggccccaccgtcagtggttgtttttgtttgcattttcatcctgaaggtttaagggtctgttcagattatgtcaaaatgaacattttcaaaattttggtaaattagtaacattgtcaaattttagtagaatgtgctcgattcaatattatcaaaattccatagacattaccaaaatttggtaacaaactaaatataattacatagttgacgattttaccaaataatggcatggtttgaaatagtatcgatctgaacaagccctaaatcatcgttctttttgtttttttattataatctcgtgtgattatttattggatattttgcttaagctctttcttagtacgtaggataagacaatctatcatgccgtgaaattccaaattggaatttgatagtcacttcttacagtggaaaaatagagaggatattttgctgaatttgaaatcaaatgatgaaatgtgaaaaaagagaaagccatcgttagaagttgtttttgttttcattttcatgagattaattcatccattgttcttttgattttttttattaactcgcgtgattgtttattagatattttgcttaagcttttaaattttgtttctttgtacaagagaatctatcatgccaagaaattccaaattgaaatttgatagcagtttcgcgaaaaccgattggaatagtaagccggggtttaaaccaataaaaccattatagattcttatgactatttctgtacagtatttttacaaagggaggcatgtaggtaccgtatcatatgaagataggcttaagctgtagaacaccatatgatttccaattcaacgtcaactattagggtcagctcagcacccagagcaatctcaaaaaattgtattctgaataatgagcataatatccaaactgaatctgttgacagtggaattttccagttaatccgttacaaaactaggaattcggtattactaacataaatcacatcagcatggattacaccatctactctctctttgcctaccaaagaacaagtggtcatgatagctgcaattgcctgcaaacagttacagcaaaaacaccactttctctccacatgggtaatcaccaggtcaaactatccacctgaagatgaatgcttcatgttgtagcctgaagaagcccgaacctgaattttctttgagctgccagaccagagctttagtcggagcacaagcggtttcttcataccagctcctgatccttgaagctcgacagtttcgcattctcccggtcacgcttgaacacaaggtacaaggggctgtagaacaggacgcagacgccgaaaggaacaatcatcattgtcagaagtcccctggagagcgcatacgctccttctgctgacccgttcgcaaggttcacagtcttgctgtcatagccatatatcttctcggtgaccaagccgacagcgggagctgccagcgaggcgaatgagccctcgaatgcacggtcgaaggcgtagatcatggtccggtgcttgggagggactacctccgcaaacatggggttgtttgcagaggtggcgcaccagcttatggtgatgcccatgaagaagagggtgacggcgtaggcggaccagtaatcaaccgactgcgggatgaccgtcaggaggatccacgagaaagggatgcccatgaaggcactgaactgagcacacatgacacgtgcagaatctggaaagtgtcgcgagaggcgatctgctatcacccctccaaggaaagctccagttgcgcacccaatggcaaacaggctattcaatgccgccgagctgttattgtcaaaacctaagaggatttaaacatcttgacgtcaaattgagggcactgtaatcatttgagtgttcaaaataataatcaatttgtcatcataccgatgagttcaaaccacattgtgaagaaaactatggcagtccatggcaatgatccaattattccttgcaggacgatgatctgaaacgtccgcaccttcattacagatcttgttgctaccaaagaatccctccatatagaaggaggtggaagaacatctttgctggccaaatgtaacctgggtgatgaaataccaatttatgctgtcatactgaagtgcatatagtattgttcacagttaccagctgcaggttttaattctaatattgtgcagtaattagttcagggataaatccattgcacgcttacccaaagcacaacgaatgcaaatttacaattgatgagctacgcacaacgaatgcaaatttacaaatttacaatgcaatctacccaaagcagaccatgaatctagaaaggaaaagcgatgtaaaattccaatagaatctgatccattggataaaaaacataggatggcccatttatcctagtgtatcataaaaagaaatcatattgttaagctcatctacaaaataaccctgttctgaaatgaaattcgaagcagattaaaatcacgcaaacaaagaaagcgttataatgatttcatatcctatatgacaaaatcataatgatatggagatactacttgagatgatttccatgttactgtattgaactccaaaagatctgttgaagaattttattcttaaaccctttttgtaaaccggacttgagtggtactttttatcaatgatgtaacacaagaagatgatacggaacgaattaaataacatagataaaagtacctctcatagtcatcgtcgtcaagaagatgattaccagggatttttcttgggtcagtcgcatataagtacacaagaatgccaattatcaaactgacgagagcaaccataataaatgcaacacgccatcctgccaaaccccaatagtcatttccagccatgattgtggctagaatgctaccacctataccacctactgcaccgatgaggcttagtaaaccaaaccctgcgccacgtgtaccatctttgtagctgtcagcgatgaacgactgaagtgccggtattacaatagcaagtccaaggccatttacagctctccagaatgcaacctgccggaaatgctggctaactccaacagcccctgttgataaggcccagaagacagtccctattgcaagcactgttgggcgatcatagtgaagggagaggatacctgccaagggagatgctatcgacttcagaaagttcattagaaatgtaaggtatcccagatcagcaggaccagcattgaacgctgcactgacttccttgtaaactgccggaggagattctcatcggcacgctccataatggaagccagattgatgaggatgagagatacagagaaaccaaaaatattctttgctctgcaagaagggaaagactagaaacggttaattctatattacgcaaggtaagtttccctacagtagaaaatgtaattgtgtgcctcaattttctcaaccttcattcgaaccatctaatttccaactggatacagcacaagcattggaatgacatagccatgagtccatgacatttgcattttgcagtttgaactttgaactacagatagaattttgaaatttaagctgcacaaacctgatgtctcttgacatgaacctagaacatggcactagaattgaagagattcaacagaaatggagctactttgctgagaacacgatggtggtctggcttttttccaaatgagcaagacatagaaaagtccgacagatctagctcaaatatatcaaattgtgtttttttttataaaggaagcttttattaatctcagacgattacatccaattgtgtacagaattgcttgttaagttcattttacatgatatggttccacatgtaacaacttgtcagaaccgtgaagcaatcttctgtaagatggaattaagtcttgtttgtaacggtggaacctaacaatggaaaaccagaacttaagaagaaatctgctcccatatttttttccattcgaatgaaagtgggtatccactcaacacccaccatatgccacataacctaagaccaaacaccatctgaagtgcgcggcatatcctcaacaccttttctctatccaaattgcgccagcaactagctagagcttgccttttttttcattgcccactagctgagaaaaaggtgaacgatagtggggtgaatgtcaatgccaagtccacttgcagtggtacttcatgctggcatcaccatgttccatgcctaccggtcaacgaaacactgaagcttcttccaagatcttcctgtgccttttcctctcagaaaagataaggtgaaaaagattaaacttggtcacatccattcttgttcttggttaccaattcctactgcagtctagccaccgacggcattgcccatacatgaagccattagccatggatctgaatcaaaattctcactaatcttatcctacttgacccgatataaaagactaaaagacgaagctttgctgcgatgcttgccgatgtaagcacatggcatatcacccaaaaagcatttcttgagcttcttgtgctcgatctggtaccaaatacccatatataacatcgagaatcctcgtttgagataccaaatagcccgtatgtctaagaaatgccaaaaaaaaactaaaaagaaagaaaacaaaagcaagctataaacaaatccttctcatttcccatttcttgttttatttgaatcaaagcatcaccaagattccaccacaccccagcttcacggagcattgctttcccaacaaattggggaaaaaaaagaggagcat

SEQ ID NO: 190 - DNA, 557 bp, Oryza sativa
atgacacatttatcactgccagccgacatattcaacaaaatgcataaaggaagtgcacttttattaattctcctgtactattcttaaaccgaacagtacaccatttattcaatacatgaagaacaaattaaaatgattttgcaaatcctcacatatgtatactatttattacatggaattcaaacatataaataaaacctcaatatttatcaggataatgttgccacaagtgctccactaggtcttcacgtagctgatagtgagtttcgtcgtcccttatttttttgtgcatctggataaaattatcaagatcaggtatttcatcgtgggacactctgacattttctcctccctctgggaaccgttcttcccaatcaacttctccctcatcttcaataatcatgttatgcatgataacacaagctttcatgatgtatcccagagtcttttcatcccaatgtcgagctggccctcgaacaatggcaaatcgagcttgcagaaccccaaaagctcgttcgacatccttcattactgcttcctgtgctttggcaaaatat

SEQ ID NO: 191 - DNA, 1601 bp, Oryza sativa
gggacaacagttcacatgcgcttccaaactcaccgaattgcttatgttgttatgattctattgactatgaaagtttcaacagctcttcatcaggcaagattgaaagaaaagggggatggttggaagattctagcagcaggagtacaatttcttgttatcaatgatagtggtcgtcaaaggtgctctagattgcgctacaaaaatatggttctatgaacttggaacccccaacactgggtttacagcacaatcagtgcatggatctagcacacatcagcctcaggtaactcgtgctctctcatgagttatctatttgtggtacaggtacacaaatgagaagatgaagaaggctcccatctgcaacaaagagggaaattatataaagagctaggtcatgacttttacaaacatatatgtaacttttacaaaaatcttagtaattccagccaaggaaacaggtatacaaatgagaatatgaagatgctaccatctacagaagtgacaataactatgtccatctaaaatgtaaggtcaagaaaaactcatgtctattgaaatgtatcaagtatatcttactgttgaaaacgacgcagcatagtacggatatgccgaagttatgaatctttcatactcattatgcctgtaagggcgcactggaatctgcaggagagaaacaaatggttgaatgcagttttacaaaggtcgataattatcgcaaaatgcatatgctttgtgtgaagttgtaaaaaaggaaagcatcgtggaaccaacctgcttagaaagagagagaccagtatatccaagcctctggtactcaactttgaactggaaaactccataaacatctggaactttgaaggatgttgaaaatacaccctgtattggcatgaaattttattttaacaaacagcaagctaaaaacaaacattaatgcaatactgactcatagtatctcataccttcttgtcagtcgacagtgtcttcagaacataagggctcatcatgtaaaactgaacttgaacatcatcagcaacatacggcttccagctggtcccagaccattcgtagatctcaacagagtattccttcagggaatcatttacattagcatgtttaacttcacagtgctcaattgatataacaggcaaagagttaccaagtcatcattgatgcggtacatgccaggctcatttgtctccccaaccttgttatgcttgacattcactgcctgaaaagtgggacatagcaaggttatgacatcattcttatttataatttctgttgtagaaacaaacatattcaaaacaaagaaaaatgtgataaaggtaacatataacctttagatggcccctctcatggaagacccatttgcttgtttctgtcacaaattgttcatttccagctttctcatgcctgcaccaatatatgacaaatatataaagttaatatcatttccatttgattgaggatatcatacaaccatttttaacatacaaagcataatatgacaaacattaatacagtgacaaaagttacaatatgctttcagtttcaggtatgtctattcagaaatatgcagcactaagatctgcatatattga

SEQ ID NO: 192 - DNA, 1740 bp, Oryza sativa
gagagtttgagtaagctgtatcctgacctctttaccaaagtggacaagagtagacttgtttgtgatgcttgtgagtttggcaaacatacacggtctacatatgctggaattggtcttcgtagttgtgaaccttttatattaatacattctgatgtttggggaccatgcccagttacttctgtgagtggattcaaatggtttgttacctttattgattgttatactcgtatgacttggatttacatgcttagacataagaatgaggtccttcgttgctttcaagacttccacaaattggttaccaatcagtttgatgcaagggttcggattattcgaactgacaatgggacggagtatattaatagtgagtttgtgtcatatgtctcagatcatggaattattcatcaaaccacttgtcctggagccccccctcaaaatggtgtagctgagaggaagaatcggcatttgctagaggtggctcggtcattaatgtttcaaatgaacgtacctaagtatctgtggagtgaggcagtgatgacagccgcataccttatcaaccgcatgccatccaggatacttggtatgaaatcaccagctgaacttttacttgggaagcgagaatttaaagttcccccaaaggtatttggttgtgtttgttttgtgagagatcatcgaccttttgttggcaagttggatcctcatgcagtaaaatgtgtctttgttggctatgcatctaaccagaaaggttataagtgttgggaccctattgggaagaggttatttgttagtatggatgtaacatttcgagagtttgaaccttattacaggagtcgaggagaccttgatcaatttctagaggagttctcaactgtcatcgagatcgacagtcgagagggggagatagttgaggttgatgcacataagcaaggtgatgaggatgtggttattgggtcaattccgagttttgttggtgatactattgagaaggttgtggacattggtgagaaggtagtagacattagttgtgacaaggatgagggggtagttgtcgggacaatcccatgtcctctggagcgtgtggaagtacaacaaactgaaatgagagtatatcaaagaaggaacaagaaccaagttgataaggtgacagggaaggagcaagtgcaccagaggagccaaattcagaatcagggggagagaagtggtgagcctatgcaagagcaagacaaggagtcacaacagctgcaacagtttgagtacgcagtcccagattcctcctctagcctctctccaacaagttcctccctccttgagacaagtggtaacatttctcctacctttgaacaagtagagttacctcttgcacaacgtagagaaactagatctaatgctggaagacctcctatacgccttggttttgaacaccttagttctagacatgacattgcaaactatatctcatactctcatatttcacctgcatataaagcattcattgcatcattgcaaatagtgcctattccaaaggactagagatgtgcaaaacaagatccaagatggaaggatgcaatgaaggaggagttgcgtgcccttgaaaagaataagacatgggaacttgtgaaactaccaatggggaaaagagcagtgggatgtaaatgggtatttacagtgaagcaaacccctgaagggaaagtggatagatataaagcaagattagttgcaaaaggttatagtcaaacatat

SEQ ID NO: 193 - DNA, 2504 bp, Oryza sativa
  unsure (1)..(2504): unsure at all n locations
taggatcttgaggtacttgaaaggaactcctggtaaggggttgtggtttaaaaaaaaccaccacttggatgtggaaggatattgtgatgctgattgggcaagcagtgtggatgatagaagatctacatcaggatattgtgtatttgtgggtggcaatgttgtctgttggcgaagcaagaagcaggcggtagtggctcgatctaccgcggaagctgagtatagagccatggcattgagtttaagtgagatgttgtgggtgaagaatctattgttggagctacggttgttcagaaataatactgtggtgcttcattgtgacaacaaatctgctatcaacattgcaaacaatccagttcaacatgaccgcaccaaacatatcgaaattgataggttcttcatcaaagagaagatcgatagtggggctcttagactacaatacattaaatcttctgagcagctagctgattgtttaaccaagggattaggtcctagtgagagtgagtcaatgtgtaacaagatgggcatgattgatatcttttgcccatcttgaggggggggtgttgatgtaatatgctcttgtattggggacctgcttgcatatgtagctaagtgaaatagtgtgtgtgtggctgtgaacaacacaccagaaaaaatccccagaactgaactttattgcatctcacctttctcttttgacacattgaatttgcgtactgttcttttttagttattacttattagctcttaatgtgttttatattacctcatttagttgctcttacaaagatatgtttaatgaactgattataaagtaaatgcttgtaacaatggagcactcttaatgaactgattataaagtaaatgcttgtaacaatggagcactcttgttaatatggatttccattcaataaattcaatttaattttagaatttaagcaacgtgtcaatctcacattcatgatagaagactagaaccagatgattgatatgtgatttttggattttagttgcaggaaacaaaatgactaattcttttgatggtttattttgtttttctgctaagacacttttgtttctccaggaccagcaatcaggatctctgctcatctatcctggctacaaaacaaatgagtgttcccagaacagctttggaaagatgtatgttgtgattattgtgttgaatttttcttaatctgtagatgctataactgaaggcttagtttctgccagaagctacaccctatagagtatagataattgtctctttgaagttactttttgttcattttattacagtctgctaaactcctatccatcagaaattttttgttgggtctgattataacaccggtatactttttgtttaatattttattagggaatcaacctcatcattttttgctgcttatgatgacagatgtgaagaggaaatccgtactgtgtgccatgaaaaagtagaagaaagctnnnnnnnnnnnnnnnnnnnnnnattagtccgaggtaaaccactatgataaattttgatatgttttctcttttttatcagagcaaataagctatttcagtttacattaaaatgatcttaaccagtgtacatataaatatttagtagggatgagagcggactgggggtcaatctggtacccatcgacctattccagtccaattaagtgaacttagtacccaatatgaactagaaaaggctttgtggtgcatggagtcgccaaccacctcaaccttgagaaaccccctggtcaagacgggtttagagatcaaaaccaattagcggagccgatttagacgaatagggagaaaaacccatatcatgggtggagcggaacgttttcaggactaacctacaaagagtacttgcactcttgcggcgaagacgaataaatgaaaactttcaaaagtgtcggtgccccgggccctatttggataagggcccaggtccccattcctcgccaactgttgtcctccacttccgtggtttctgacctggcaacgaattatagatacatatatgtatgtggtagaaagtgatttttgtgggcccctgtgtctcatgatcctggggaaaaggggaccctggttcccgtttctccaacaagcacaaaccaacgaagatagacaaactaggctaaaagctaggcaaaaagtagatgctttattgaaagaacgattcaattagcaaattgcgttgttgtacattgtgtatctcaattgaaccagccatgacccttataaaggggttggtcaggccctccacaggaccctctccacgtcccactaggtgtagaaaccaattaggactcgaaaaacctcaacccaagcaaaaaaatcccgagaaccgatgaaactagactcagaactggaccctgccggtcttatcggctacataccgccagtcaaactggccccacaccgttggtctgatcggccctatggcggcggtcagaccggcttcgcgcagcaagccgggtcctctacaaatttgaccatat

SEQ ID NO: 194 - DNA, 4705 bp, Oryza sativa
actccatcgaacatacttgatgagttgagggtttccctgtaataataactttgtattattatatattttcataaaattatgtattgttaatttcttctcccaccagtacgtgcgtaaaaaatttattgctagctaatcattagccccatttgcaatgatagaattctaaagggggaaaaatcattcgatttaaataatagagaattaccgatgtcatagttgtccaaaacacgatttttcttcctacgtacgtgaaagtaacttagtcacgaagaatttgagaaaaataatttacaccgacgcaatcgcttgctcatcgacgacaacctacaagtaacaatataacaaatagtgaggaaaggaaaaatataaagcagcattcaatcagtcaacacaggtgttctagccatatatatgcaacccatcaacatggggaatgcaacaatatatatagcagcctagctagtcttcaaaatgatgaagcccacagaaaatgcacacaagcaaacaaacgatatctcaaaatataaaatcaccagatataagacagacgctcccatacctgaatttttgtttcttgcaagaaatcaatgcatgatataactgtaacacatcaagttgtctgaccatatcatatatcatcatgcatgcacagcctaattaaatcttacacacaaagaaaccaaaattggagaaatcaaattcctcctctcccaggggcaaaataggaagagagatatttctttttgcaagaagaagaaacagttacaaaatctcatggaaacttacacctgtcccttggccattttgatcaccatgtgatgtgagtccccccacttacattaatctcatgctaaaaaacaaacagataaataaataattgccattgccatgctgccacgtgtcatgggacacgtcacctcctcttcctctcccgcgagtatataaacccctcgctcccctctccttcctcccgccatctatctccctctcttttgaggagggcaccgccatttagttaattagtagttgttaattatcttcactaaccttaattaccctcacgcaaagcactctctaatcctcctcggcgctcgcataatcttgtatccctcatctcagattatcatcacctcgccgtgttagaaaaaaggtactatgtttggttgatttgtaataattttcttggttggtggtttggttgatttcttgattagtgtgatgctaattgttttcgtttgaagggagtaagttcgttttatcgtcggatttggtgagagttcgccggagtagaagaagatgacggtgacgccgcagatcacggtgagcgacgggaggctggcggtgcgggggcggacggtgctgaccggcgtgccggagaacgtgacggcggcgcacgcgtccggcgccgggctcgtcgacggcgccttcgtcggcgccgacgccggcgaggccaagagccaccacgtcttcaccttcggcacgctccggtgagcaatctcacagaattaatttcccaagatttctacaaatttgtcttcgctgcatttttgaattcacagaattttaaagagtttttggcatctgaaattttgcagggaatgccggttcatgtgcctgttcaggttcaagctgtggtggatgacgcagaggatgggctcctccggccgcgacgtcccgctcgagacccagttcatgctcatcgaggtccccgccaccgccgccggcgacggccacgacggcggcggcgacggcgagccggtgttcgtggtgatgctgccgctgctggaggggaagttccgcgcggcgctgcagggaaacgacgacgacgagctccagatatgcatcgagagcggtaagtaggtcttaggatacaaattggatgaaatttgtgtttgaaaattaaatttagacgagtttcggtgaaattttccaaaactttggatgaaatttgtagtgatttggacgacgtttttggggcaggggataaggcggtgcagacagagcagggcgtgaacatggtgtacatccacgctgggaccaaccccttcgacacgatcacccaagccatcaagtatgaatttctctccgctgtccccatcactaaaattcctactcgtactacgtttcaaatgaaatttacacatctgacacgtctataaattctaattctaatgtttgaaatttgaaaatgatgcagggcagtggagaacgaatgcagacgttccaccacagggacaagaagaaggtaatactaccaattccttttgaaatacagttctttcttctttttttttgaaatattgagaaccgatttgatcatttttgtttgtttgatggatcgattttctgttcatgtcacagatgccgtccttcttggattggttcgggtggtgcacatggacgcgttctacaccgacgtcaccgccgacggcgtcaagcagggcctccgcagcctcgccaatggcggcgcgccgccgcgcttcctcatcatcgacgacggctggcagcagatcggcaccgaggacgacgacacggacgaacaccccgccgtcgccgtccaggagggcgcccagttcgccagccggctcaccggcatcaaggagaacgtcaagttccagagcaagaacggcggcgccggcgaggacacgccggggctgaggatgctggtggaggaggtgaagggggagcacggcgtccggcaggtgtacgtgtggcacgccatggccgggtactggggcggcgtggcgccggcgccggcgatggagcggtacgaggcggcgctggcgtacccggtgcagtcgccgggggtgacggcgaccagccggacatcgtcatggactccctctccgtgctcggcctgggcctcgtccacccgcgcaaggtgctcgacttctacgacgagctccacgcctacctggcgtcgtgcggcgtcgacggcgtgaaggtggacgtgcagaacatcatcgagacgctcggcgccggccacggcggccgcgtcgcgctcacgcgcgcctacaaccgcgcgctcgaggcgtccgtggcgcggagcttcccggacaacggctgcatctcctgcatgtgccacaacaccgacatgctctacagcgcgcgccagaccgccgtcgtccgcgcctccgacgacttctaccctcgcgacccggcgtcccacaccatccacgtcgcctccgtcgcctacaacaccgtcttcctcggcgagttcatgcagcccgactgggacatgttccatgtaagcatcaaccccttcgtgtccgacgccggcgccatttcttcttcttgcttcttaggtgttcgatgtgtggtttttgcagagcttgcacccggcggcggagtaccacggcgcggcgagggcgatcggcgggtgtccgatctacgtcagcgacaagccggggaaccacaacttcgatctgctcaggaagctcgtcctccccgacggctccgtgctccgggcgcgcctccccggccgccccacccgcgactgcctcttctccgacccggcgcgcgacggcgagaggtaacaaacaaagatttcgaaatttgtgtgaaatggtttcgaatttgggttaaaatttgatggaattttttgtagtttgctcaagatatggaacctgaacaattgcggcggcgtggtcggggtgttcaactgccagggcgccgggtggtgcagggtggccaagaagacgcgcgtgcacgacgcggcgcccgggacgctcaccggcgccgtgcgcgccgacgacgtcgacgccatcgcgcaggtcgccggcggcgacggcggaggctgggacggggaggccgtggtgtacgcgcaccgggcgcgtgagctggtccggctgccgcgcggcgccgcgctgccggtgacgctcggggcgctcgagtacgaggtgttccacgtctgccccgtccgcgccatcgccgcggcgccgggcggcgccgccgtcgcgttcgcgcccgtcgggctcctcgacatgttcaacgccggcggcgccgtcgaggagtgcgccgtcgatgccgcagccgccgtggcgctcagggtgcgcggttgcggccggttcggcgcctacttctcgcggaggccggcgaggtgcgcgctcgacggcgccgacgtggggttcacctacgacggcgacacggggctcgtcgccgtcgacctgccggtgccggagcaggagatgtacaggtggaacctggagattcacgtctaggatgctgctgctgccacgtggcggtgcgatctttgccctctggtgttcgtggctgagacattcccagccgttggatcattgccattgatggtttgcagcagagatggacggaccgatggagagattgtgatgtgccctcttacgacttgcaacgcggtagagggagtatgctttgctacatctaaaatgaaagaagaaaattatagtatgcttttgtcatgttatggcttgtaaaatgcaataatatgatgtaatgctatggtttatgtattattattagctgataaataaaggatggtgctccttaaaaatatatttgcttactcgcctgggtacttcgaggtcttgaagccctccaaatgatgggctcctttggaacggggatttcaaaaacacatgaaaaaacataatgtaggaatttcatgccatggcaaatcctataggaaatgaatccttaggtttttaccaaaattattgtttgg

SEQ ID NO: 195 - DNA, 585 bp, Oryza sativa
ggtttgatatcaccatgaaaaatgcagcggcgggaatgcgagtgcatgtaggtaagagctttcgcagagccaatggcaatatccagccgtttcagcagcgggagagcgcaccgctctgccccatgaaggacgctctcgaggctaccattagggacgaactcgaagaccagcatagggacctccacctcgaggcaacaaccaatgaggcacaccaggttgtcgtggctgacttgaagttgcaccgtgatttccttcacgaactcatccttgccacgagtccgcgatatgctcttttcgatggagtacttgacggcgaccggctgatcgtcgtgggttcccttgtagaccacaccgaaggcgcctttccctatcttgttgcttttgttgttagttatcttgtccaattcctgctttgtaaagattttaacgctcgtcttctctagcatttggccaccattacggtcatagcaccctttaagcttccatttcttacgtaagcacacaaggaccaaaccaaatagcacaacaccggctatcactgcaaatgcaaacaaaccaattaaacatataagtaactaggtgatt

SEQ ID NO: 196 - DNA, 660 bp, Oryza sativa
ccatgataaaaaaaataaatcatagaccaattcttgttaactaggcatttccataacagaatcagctgattacttactgtttcgccatccgtgaccattacagaagcgcttgcttgcctccctatgtggcctgtctccaccagtatctgggaaacaaaaaaaaaaacaatagtctaattacaactattctcatgccgtatcaaacacctgaaccacagaaccagataagaagtgtaaccaagtttcagtcaaataagcatgacaatcagcacattgtttttgaagttttacggcatcctgagaaaccacatttcgaattgcgcacacagcgttgcattacagttcactgcgcagaaatgttggagctcacgatgacgcatttcaaattccaagcacgcaggcagagcagtgcgcctcgattggaacaggagaaggtgggtgggattactcgtggagggctcacgtacgtggcggtcgccgacgggaatcttcgtggagaacttggtcgggccgccggaggtgctcgcctcctcggtcaccacggggggcgcctcctcgcccacggaagccctaaccctagcccccgccgctctccttcgcgcgccaccgcgacgcgaggtggaggcgctcgctgctacacggcgggggcgggggagcggg

SEQ ID NO: 197 - DNA, 933 bp, Oryza sativa
atcgatccatccaaaacggacggccgagatcgagcggtccacggcggctcacagcagacagaccctgatgacgtcagcggtgacgtcatctccggcggcggctcggcggctcgggcgcgcaagctcgccggcgaacgacggcgcttcggcacgaacggagggcaccaggacgtagagaacgttgcggcgaactcaccggtgaccaaagaagcggcggaagagcagcggacggcgacggcggcgcggcactagggtttcgggcggcggccgatgcgaggaagacgacgactccgacaggtgggccccacctgtcagcgggcggacgcgcgcgcgagcggcggctgttgctggactgggccgactgggccgagggagagagggagagaggtttttgggccgtctttcggcccaaagccaaaagagacttttaaaaacctttttcaatttaaattattcattaaatgcaattctatttattaaaaatactttcttagctcaaataaatcccagaaaaatctaggaattatagaattaagcaaagtatttaatgaaattttatctggcccattttatattggaatttattaattaaaatttgatcttctcttctaggcttttaaaataaaatctaataattccatttaagcaacaatttatatatttaggatttttagggtgtgacaaacctacccccttaaacagaatctcgtcctcgagattcggaagaactggcaaacagatgcggatgagctgacttcaattcatcttctcgttcccaagttgattcttcttccgagtgattactccattggactttgcaaaaacggataactcgatttctgggtcttctctcatctatttccaaaaaaccgattggtttctcaacataaggcaaatcctcttggacttctatctgtttaaaaataacttctt

SEQ ID NO: 198 - DNA, 619 bp, Oryza sativa
ctactatagggcgaattcgagctcggtacccctcacaatttattatgtaaaaaagaacatatgtaaaacaacatttagaatctcaccagatcctgatacataagtaaaagatgaggagatatatagtctgaaacgagaacatattatttcacaatgggtactgcacttccagtgggaatcatagatagtgagttttgccaatacttttgagatttatgcaaacaggggacaagagatgcacggctaacactcacctcgtcaacacggatattgtagagtagaatcgaagagtcatccgttccaatagctatgatgttattgtcatgcgggtggaatgcgaggaaagttgcagagggtggaggtgctatgaaagtagtcatggtctgtgagtgattccacaaaatcagttaagtaaaaaaaaggccatgatcgatgcaactatgaaataaaaaatattttccggaagtagtcatgacctgtgagagatcaatcatgaaattaccagattattgtgttacatgactgaagaagacatacctttgaatttaacatgttgaacaacgaaactttggcaccagatgcaaaaattagatagcagtcatttttggatagtagactg

SEQ ID NO: 199 - DNA, 500 bp, Oryza sativa
taggtttgcagcaattagggacaagctatgaatccggtaactttttcactagttggacaacgcctcctaaacaaaagaaccgtgccaaacttttaagtgatcattctctatttgaactaattccaattcttctcaccaccctgtatatgtaacttcaatttcgggaactgagaaattgctattacactttacagggaagcaaagcctgtgggatttgcagagagataccctgctcttgtcaccggtttctttttcttcatgtggtatgcttactcacctgagcgcactttagaatttacaattgcaggtgagcgaactgagaagttgctgcctaatgtggtttagctattgccaattcacaatatgattttgtaggtattttctgaacgtgatatttaacatccttaacaagaagatcttggactacttcccctatccatagtacgtttgctttatatgtgtgcctccttttctttttcctttcatgtgacaacatgcat

SEQ ID NO: 200 - DNA, 582 bp, Oryza sativa
tagaggatcccccttgatatgatactcaacgtaagcactggaagacatgagttcagctgttaaactctataagcacagcgtgtcaatccttcgtaccttggaaatagcatccaaagaggagcaatgtgattatgtcagtgcatggtacagtatgcttctgtcctgtgcccaagaattgcagcatggtgcgatgatttggcaggaatcttgtcatgcaaatgttggcgaaacagtaatttctcaaggtgggactctgaataatgagcagagctgtataatttgttttttcggtaatcatttgcttgcagaaagatgatcaactaacatgccttctgttggttgcacaggtgctcattactttattgctcttggggagatctacagagttgcacagatcttacatatatccatgctatctttcaagccttgggttcttgcagatcctggaatgttgagtaaaatgttggtttgttggaacagctgcgttaattcatggactagtggtttaggaatggctcttacaatggttgtcgacagcaagaacttacatgcagggtaccgagctcgaattcgccctatagt

SEQ ID NO: 201 - DNA, 931 bp, Oryza sativa
  unsure (1)..(931): unsure at all n locations
tttaggtgacactatagaatactcaagcttnnnncacatggagatgggccattcagggttttggagaaaatcactgacaatgcttacaagatagatcttcccggtgattacacagttagtaacacattcaatgtggttgatttgtcaccattctttggcacggaagaaacagattcaggacgatttaaatatgaattttagaagttttgagctatttaaatgaatttctagaattattaccgatttattacgcaataattatttattttcttaaaggaaaaataaggttattgcgtcaacagtgggacggttgtggatcgagtccaccaaatgcgggccccacgcatcagccaaaggggaggggcggtccaccgtggactaagtccatggcggcgatcggccacgcgggcacgcacccgatggcccagatcggccgagggcggctgggcggcgcggccgggcaggcgcacacggaaagcggccagcctgccgccggctagcggcgacctggcccaatagcgccggcggcgagcagcggcggcatgagcggggccgagagaaggcggttgaggcggggagggaggaaggggacgcatcgagcggaggtggcggctgtgtggcaaaggagagcgtcggcgttgaggggttggaggcggcacccgtgggtcgacggcactggcggagttccagcagtgatttccaagggcggaggggtggacggggcgcggcacaacgttgctacgccaacggagcaagcggcgcggtccggggtggtcgcggtcaatggcaatcgtcgatcggaggcgacgaatgcggcggcagcctctggttggcggcggaatcggcactacagcggtgtttcgcggcgagcgagggacggccgaggtagccctcggtgcggcgaggccggaggttgtggcggcacagcacg

SEQ ID NO: 202 - DNA, 549 bp, Oryza sativa
ggatccccatagtctagcctgaaaaaaaatatagggttgactttcatacataggtaacaagttaaaagtctaggagaggggccggggagactcaatcggtgaatagtaccctctccgtattcgtaaaggaagtcagttatgacaatgtttaagttaaaccttgggagataaatcataaataactctcaagttgttgagtttgaaaacgtaaaaattatatgaatagatttgtcttgaaaaatacttttataaaatcatacacatatcactttttaataaatatttttatagaaacaagaagttaaagttgtgttttgaagaccatgtcactgtccaaaacggcttcctttacaagtacggaaagagtatctaggttaaaaaaaatattagggtagattttcagacttctatataagtaaaaagctaaaaggtctaggggaggggagaggggagagtcaatgggtgaatagtatctagtttgaaagaaatagttagggctgattttcagacttccataagaaaataagtgtggtggtagactatttcctg

SEQ ID NO: 203 - DNA, 7374 bp, Oryza sativa
aatgagatgtttacctcctctatagtaactgctactcgaccacagctcgcatttgaaatacccgggggcacattccagcttttcagcctaatgggaatagggttggtggacatgcagactttgtccaaaatcgtgcaggagtgaggatgttggaccaacagaggaacatttatctgggtcaggcaggagaagggaatcagtacgctgaggctgtcctcaaggggccaagattagaaatccctctgttcagtggagaagatccaatagattggcttaagcagtgtgagaagttttttgagattacgggtacccctctggatcaatgggtgaatttagcggtggctcatttgaatggcagggcattgaaatggttcggaggaattggtctgccatggcaagtgatagcttggccacaatggtgcagcatggtctgtactcgattttctgctgcgagtgaacatgaggcaattgagttgttccaaaatgtgaaacaatttggaacaacagtggagcaatatattgacaagtttgaggattatgtggatttagtaaagagagaccacccttatctccaggagcaatatctgaccagctgtttcattgggggattgagagcagatattaaatacgatgtgtgtggtcagaaacctcaaggcttgcttgaaacttactggtatgcaaaaaaattatgaaagggctgctaatgccagaaaaatggtgggaaatttcaaccgaaacaggaatcagaatccacttggaggtaatcaggggcggaatgctaaccataggggacaaaacagaggtgagggagataggagagaggaaaagaagtgctggttctgtaaagaaccttggtttccaaggcaccagtgtaagattaaacaagcaattcacgctttgttagaagaagatgatgggcaagaagataaagaaacaagtaatactgggggtgatgagaagagaagaaagaaactgaagaatctgcaacttcagaaaatgagtccccaaccgaagagttgatgtacatttctcaaactgcagtacagggtacatccaggccagatacattctcagtattaatcaaaatcaatggccggacagctgtagggttggttaatagtgggagtccccccacattcatggatcaggattatgcccttaggaattcttatcccttgaaaaatactgacacaaagaaagtagtagttgctggtggtggagaacttaagactgatgtcatggtgccagacatcagctatgagattcaaggagaatgctttactaaccaatttaagttgcttcctctcaagggatatgatattatctggggtgctgattggatctataattatagccccatttcgctggatttgaagcaaagaattttgggaattacaaagggaaacaaagtaatactcttacaagatttcactaaaccaaataagcactttcagatcagtggtaaaagattggagaaaatgttaaagaagggggctcttggtatggtgatacaagtcaatgtcatgtctgaaactgtggaggaagaagggcatgttatacctgaagacattagtgacattatacaacaatttccagctgtgcttaaagaaccaaaggggctaccacctaagcgagaatgtgaccatgtgattaatttacagagtggggctgtaccacctaacatcaggccatacagagtgccacattatcagaaggaagcgatggaaaatattatcaatgagctgattgaatctaaggagattcaaactagtgatagtccctattcatctcctgctgtgatggttcgcaagaaagatggatcttggaggatgtgtgtcgattaccgacaattgaatgcacagactgttaagaacaaattcccaatgccaatcattgaagacttgttagatgaattaaatggagcaaggatattctctaaactagaccttcggtcagggtatcaccaaattaggatggctgagaaggatgttcataaaacagcatttagaacacatcttgggcattatgaatatcaagtaatgccattcggtttgacaaatgaccctgccactttccagtcacttatgaatcatgtcctagcaccattcttaagaagatttgtgttggtgtttttcgatgacatattaatctatagcaaaacaagggcagagcatctggagcatgtgaagttagtaatgcaagctttgcaagacaaccatcttgtaatcaagcttaaaaagtgtgcttttggacttgcaagtgtgtcttacctaggacatgtaatctctcaggatggggtggctacagatcccaagaaggtggggaaaattaaaaattggcccacacccaaggatgtcactgatgtaaggaaattcctggggatgacaggatactaccgaaggttcattcaaggctatggtaccatttgtagacctattcatgacatgctgaaaaagaatgggtttcaatggggagcagatcagaccacagcttttgagactctaaagcataagctgagaaccagccctgtcttggctttgccagactttgatcaagcattcaccatagaagcagatgcttgtggagtcggcattggggcagtactaatgcagggagggcgacccattgcatttttcagtaaggctttgggacccaaggcagctgggcaatccatatatgagaaggaggctatggctattcttgaagctcttaaaaagtggaggcactatgtgttgggcagtaaattgatcattaagactgaccagcaaagtttgaaattcatgatgggtcagagattggtagaggggatacaacacaaattgttgctaaaattgatggagtatgattataccatagagtataaatctggaaaagaaaatttagtggctgatgctctgtccaggctaccacaaaaggaagctgttgcagacaggtgtcacccaatgactgtggtgatacctgagtggattgtggatattcagaggagctatgaaaatgatgtacaagcacacaaaattctcagtttgattggtactgcagcagatccagatagagaatataagcttgaagcaggattgctaaaatacaaagggaggatctatgtgggagaagccacggatatcagaaggcaattgatcacaacctatcattcatcttcttttgggggtcactcaggtatgagagcaacccaccaccgaatcaaaatgttgttttattggcatgggatgagaggggaagttgaaagattcataagagagtgtcctacttgccagatcactaagtctgaacatgttcacattcctgggttgctcaatccattagaaataccagatatggcatggactcatattactatggactttatagaggggctaccaaaatcacaagggaaagatgttattctggtagtggtggatcgtctgaccaaatatgctcatttcatagcattagcccatccatatgatgtggagcaggtggtagaggcgttcatgaacaatattcacaaactgcatggtatgccgatggtcatcatcactgacagggaccggatttttactagcagtctgtttcaggagattttcaaagcaatgaaggtcaagctgagatttagtactgcttatcacccacaaatggatggacaaactgaaagagtcaatcaatgcctggagtcctaccttagaaatatgacgttccaagaacctcacaaatggtattcatggctggcactagctgagtggtggtataacaccactttccacaccgcaattcagatgactccgttcaaagcaatgtatggttattctcccccacaaatcaatgaattttcagtgccatgtaacatatcagaagaagctagggtgactattgaagaaaaggaagcaatactgaacaaactcaagaatagtttggctgatgctcaacaccgaatgaagtattttgcagataaaaatagaactgaaagaaacttagaagttggggatatggtatatttaaaattgaaaccctatagacagtctgcatttgggatcagagggtctctcaagctaagatccaagttttatggaccattcaaggttcttcagaagattggccaattagcttataagcttcagttacctgatgatgctcagatccaccctgtgttccatgttagtcagctcaagaagcatctggggaagcatgctattcccatgtccaatttaccctcagtaggaccagatgggcagattaaaacagaaccactagcagttctacagaggagaatggtacccaggaaaggagttgctgtgactcaatggttgatattatggcagaatttgtctcctgctgaagccacatgggaagacgcatcagtcattcaagcaatgtttccatcgtttaatccttgaggacaaggattgtcttgaggggaaggtaatgtcaggattgagaggaattctgagatttcagaaatattctaagtctgaaaacctgaagatgcagtttgaagtctgaagatgatgtgcgaacgggaggaagcagagttatgaagatccaacggtctgcagtgattccgaagaggtatcgcaggatcctaaccattcacatgttgtcggggaccactgtagtggtaaattgttgttttctctgaattggtgtgtgtgtgttcagtggcaaagaccactttggaatccttatgtactcctattaaaactattggcttgtggccaggagggagataagaaaaacctcattatcatttgttcttaggagtagggtaaagtagatctgggagaaacgagttcttgcggcgaccacctattttcttcccgatttactctgtttcgagcgaacaaaggagagagagaggcgtccatttccaggtgttttcagctctgatcctgacatcccccttcctccaccatccctgccccatcctaactcaactcccccttcctgctgttgggccagatttgcccgacgacgacgaagaggcggccatggcgatgagctcagcgcgcggtgacctcggggtgccatgtgcttatgtgtggatatcaatcactatgtttataacataattaattttgatgctgatagagtgataatgctatggtgtaaacaatgtggtctaatctaggttggcaggattaattggttagatcctgcgccacgaatttctgagttatatttctgacctgtaagcaatgggaagttttatttctgatctatacgcaatgaagttctatttctggcttgctatggtgtaagcaatgagggcaagttttatggtagatgtgactaccacatctaattttatacatgatatacatcattaaattaagaggtgccatatataataggttgtctctaccacacaatccccaatatatctaacactctcacatttttttttagataaaggatttatataaaacccggcttctacatccccaagaatgtacacagccaatcaagtccatacaagagcactaaggctcctcccattacatgggttacaaaaacatacttaaaagtaacataagaagtaccaagttcaactaacatgccagctaacaagacaaccaagcaaactcaacaaacaagcttaaacaacagtgtaagcttcaattctccctctgaaattccagccataattagagaagaattctaagaccctcatctctaacaccttgcaataatttttcaacatgttgccatcctcttccttaagcaacaaagaccaaagtcttgcccagtgtgtccctctgaaaattacctgcataaaagagtaagcacatgatccattaaaaaccacatcattcctacttaaccacaccgcctagcacaacgccgctatgcccacaaaaacttgattttttagcctaatgttaacaccacttagccaactaccaagtaaatgagacatattgtgcggtgggcagatgccaaaagtgaaatgtactacgctccacacatatcttaccatggggcaatcaaagaagaggtgttgtattatctcatgagacctacaaaagcaacatctaaggctacctttccacctcctcttagctaaattatccttggttaaaatgaccccctcttttaaataccacaagaagatctttattttcaacagaagtcttagcttccaaataaaagattgccttggtatcacatttccaaacatgagttttttatacatcgagttgactgtgaaagttccatttttactagcatcccaagtaaacctatccttttgccctctaaggtttatatcaaccacgttagctacaatctcatgccatgctttcaaattatctcctattatggctctcctaaaggagacgttcaaaggaaccctctccaacaccttagccaccaccacattcttatttcttacaagattgtacaacgatgggtatcttttctctaaagattggtttccaagccaacagtcttcccaaaatctgatttgtaaaccatcctgaagtttaaacgagccaaaagagctaaaggtatgaaccagttttgcacccaaagaggagagcatactctctttcaacctctatggctttgccaaaacacaacaattcgctcttatgaaaattaatcttcaagccagataaccttttgaaagcacttagtacaagtttaagatttttagcatcctctaggtcatgctccataaaatgtatcgtgtcatctgcgtattgaagaatggaaagaccatcgtctactaaatgtggaatcactccatgaatcttaccatgctcgcttgttctctgaattaacactgccagcatgtctgccaccaagttgaaaagtaaaggggagaggggatccccctgcctcagtcccttttttgtttgaaagaagtttcctatctcatcattaactttcaccgctacactgccacctcttaccacttgatcaatccacttacaccacctaggctcaaagcccttcattcttaaagtttgttgtagaaacttccaatcaaccttatcataggctttctcaaaatcaagcttaagaataacaccatccttctttcttttatgcatctcatgtaaggtctcatgtaaaattatagctccttccataatgttcctaccctttaaaaaagctgtctgagaaggctttatgattttttgggctaccaacacaatcctatttgccaagacttttgtgaatattttgaaacttacattcaacagacagattggtctatactattgaattttctttaacttccttttggtttggaagaagagtaattatcccaaagttcaaactatgaaggggaagcctacccagatggaattcgctaaagatggccattaagtcatccttgattacctcccaaaacacttgataaaactccgctggaaa

SEQ ID NO: 204 - DNA, 1220 bp, Oryza sativa
acccctctgtcttccttttcaaaatgtttccactaaccataaaatcttcccttacaaccacccaagctcaaatttgaacagaggtggttaattaatatgtgttccttatcccgagtctaccagcaatggtgtatggtctgagagttctctactcagtgtttgactgtagctagtggattcttcaactcccattcagtactaactaacaccctgtccaacttctcataagttggaatttgtaggttgttagcccaagtaaacttgcgaaccgagagttcaatctctctcaaatttagactgtctatgacagcattaaacaagaagggccatttgtcgttatatctatcgttattcttttcttgtgggtttcttatgatattaaaatcccctcctattaccataggtaaagaatccctactacaagcattcacaagttctgtaagaaaagactccttatattcttcttgagctgccccatttaccgccactatgcaccattgcacatcatctgtcttatttctcacatggaatttaatataaaattccccctcatcaatactagctatatcgaaaaagtccaaattaattcccaacaaaatacctccagctcttcctcttggtcttgtccagtgccataggaagtccctacctcgacatatttttttaagccacgagtctgaaaagttgttcttacccgtttccaatagagcgataaaatctagcttttgctccttagaaatttctgagaggaatcttgatttagccaagtctttaagacctctgctattccaaaataatcctttcatggtgaacctcttttatttttagactttctccccaccttaactcgccttcatttatttttctttctccatttcttaacattatgtttcctcataagcatgtcggagtcacaacttaggtgacaatcatcctcattcatcaactcttccactaagccaccacataagtgatcaagaacctggttgtctaactcctcgttttcagaaaaaacactctcctcgacccccccccccttctaatacaacagacttctcaagatttgcactattgaatctaacaaactcagactttttaaaattatcaacagattctatcattaaatctctagtggcacctaggttcactcctatgtttcttaagtcatcaactacatgcgaatgagaaaaagaaaggaacgaatatttaaactcgttacc

SEQ ID NO: 205 - DNA, 784 bp, Oryza sativa
gatgtgcaatggtgcatagtggcggtaaatggggcagctcaagaagaatataaggagtcttttcttacagaacttgtgaatgcttgtagtagggattctttacctatggtaataggaggggattttaatatcataagaaacccacaagaaaagaataacgatagatataacgacaaatggcccttcttgtttaatgctgtcatagacagtctaaatttgagagagattgaactctcggttcgcaagtttacttgggctaacaacctacaaattccaacttatgagaagttggacagggtgttagttagtactgaatgggagttgaagaatccactagctacagtcaaacactgagtagagaactctcagaccatacaccattgctgctagactcgggataaggaacacatataaataaacaacctctgttcaaatttgagcttgggtggttgttaagggaagatttttatgggttagtggagaacatttggaaaaaggaggacagaggggtaacaaagatggaaaaatggcaaaataagatccgtagtctttgtcaattcctaagaggatgggcgaagaacgtaagtgggtcatacaagaaagaaaaggtgaagttgttagccttgactggggatttagataaaattgcggaaactagacttttgattagtgaggagttggatcgtaaaaatgctatgaaggatagattggcaaaactgctaagagaagaggaattgaagtggtatcaaagggctaacactaatagagtattagaaggcgatcg

SEQ ID NO: 206 - DNA, 3566 bp, Oryza sativa
ggctccggccacggttgggtcgccgttggggaagtggggatggtgcggtggagattgggggaggggacggcgacacgtagaggagggggtcgatgacggcggcgggcgaggtcggaggccgcgcggtcgacgcgctccgcctccgtcttcaccgtcagtcgctcgagctcgccgcctccaccgcgaccacctgagctcgctccaccgcctgctctgccgctgccggtggcttcccaagctcgctccgcctccaccgccgctcgagctcgctccgccttgccgcccgcacgaacgaggtccacctccgtcgccggctgggccagctgagagagaacttccgtcgccagccagagcgcgcgcgcgtgcaaggggacttggagggatacgtatgacatgtgggcccagagaatattttttattttctttgctgactgtattgccatgttggcaccacgtgtacaaattcaagtaaaccgctaacagtacttaggggggttatttgtccggtatgaatacttgagggtgtaaaatatctggttttgttgtttagggggtaatttgatcgactgcgatagttcgtaggggtaaaacgtactttttcctccccaaatcgccaaccgtgtgtgcaaacatttgctgcgcagcagcttgatttcagttatatatgaagttagcaaatctctgtgagcttatttcgatgatatatctgttcctgtactcgtttttttttaccctgatatatatagctaccataacaaaagagcaccgaattggagttgcaaacaaaatattgataatatacctgctcaaggcatgtataaccaataaaggaaacaattcataaggcaaaactctaccaactactcttgcactcaccaagagcgatgcgttatgagcatcctcagtcctcgccatatgaattgcgaaactaatgcaaatattcggaatagggtttaatgcaggatttatgaacagccgtaccttctattttttcgcttgaacgccaaagcaattttttttttgtggaaccaagtataagtgatttgaataattatacaatctttttactttgaagtagctaactttatatttgttgtactttagatcatccccgactattttcactagccatgtccatcatatattttgttaaacgtatggtctgttcgtaggtgaaggattttgccagtgtaccagagctgacatcctcaaagttgttgatgtgctaaagaatggacatatattccggtaaaggtttgcttggtccataatcgggcagaaccaccacacatctagaccaatctaacgaggacagaggatagaaaacgggcgataccagcaggggaccacctatacatttgtcgacaaattttctcctaaaaatttaacatatgtaattatagttatgtaattatagtttaatcgtagtgtaattacactctaacttatatgtaattatactgtaatgtaagtttcacttaattttgaatcgttatatctgttacaatattaacatatgtgaaagaatttgttctcacgatcttcattttaccgaaataatatgttacggggagtttttgaaagttacatacaagttatattatagttacagtgtaattacatgtaagttacagtgtaatcacactataattgtactgtaattacatctgtcgataaatatatagcaaaattgatatctaatccacgagagatcacttgttgggtgggaacaccgtgaagtatgtctgtgtagcggctagagcgatgacgaatgtggcgacggcaacggagatggccgaccacgggctgggaaaataattgcgccggagcccagccatgtggctgtgccaccatgtcccacagtagcgcgtcacgtcgtcgtacagtccggagaaggcctgcgagtcgtagcccgccgggtggcagtcgtcgaggcggttgaagaaccgggccgcctcctcgtcgttgtccaacaggttcaccacgacgccgcgccggcggagcagctccacgtcgcgtgctgtcacgatgagctggctcatcagtgccacgtagctgctcaggagcccctcctcctcgccgcgctggctctgctcgaacgcgagcaggttcgcgagcagcggccgcctcgcgtcgtcgatcaggactgtgggtatctccattacgccccagcgggcgtcgaacgccacgtcgtacctcgtcccccctgcggcggccgctgggctctgcgcggcgacgaactgtacccccgcctctctcatctcggttgcgcatggtatcacccgtggcgtcctggtgatcgtccgtcggtcagaccgtgggcctcggcggcttcgcggcggtgttcggttgggaatgaagctctggtagtacagatggaggaggtggtggacctcccagtcgccggaaggccatctcattggctcttcgtcctcactgccgaggtacttgacgaaaaggtgaaggagggactccctgccgtgctgggcgccgccgccggtgactgcgccatagagcctctcgaggacgaagaacgggatctggttctccatgaggagcaggtcggcggccgcggggacaagcgtgaggccccttccagcgtcgcagagcgcgtcgggctccttggcgtgccactttaagaggaactcgaggatgaagcagccatcgagcaggagcatcacgatgaagtcgtcggaggcgaggccggcggggcgctcgctgtagcaggcgcgcgcctgggcctccagggttctcatctctgcgaccaaagtggacgcgctgaccgccgcgacactgccgtcgccggcgtggcgggacagcaggccctgtaggtagtgccacttgtggtcctccatggtgcgcagtgcggcgccgccgtggtaataggggccgatggacaccacgcgcggctcgtacgaggtgcgattgctctcgcggacgttggcgggaacgcggaagatggtaaatggctgccgcgccctccattgatctcctctgagggcatccaacgttgcctccaccgaagattccaacgacgccacatccatgagatcgatagcaaaacgagagaagtgatggtaggaagaagacacgcatgcaacttgcaaatgctcccgtaataaactgataatacactacagtactacaacatcatgaatggtcatcatcgaagcgcgtcgtcgttgacatttttgttttaatccaacgagcagaaatgaacgaccgccaacgcgttgattcgttgacatttaggtgagcgtcgctttcctgtaacttcctgttaggtacgcgcgcgaacatcttatttatgttttataaatttaactaaagatatcataattaggttttataattccaaccgatccatcacatattcacatgctcggggcactgagagcaagtttaatagtatagccaactactagctccaattcatccatagccaatctaatagctcatatatataatagttacatactatattattaatatctggtcccacctgtcatatacacgttacatcttggagaccgtgctacagctggctacaaatctgtagcccgctg

SEQ ID NO: 207 - DNA, 644 bp, Oryza sativa
caaaccagtcgatcggctatcattgaaggactcatttcgttttctttctatatttcttattggtggcaggatcaaaccaatgggcatgcctagaacccgaaagcaatatttaggacctgcactagagttaagcaaatctctcaggccaatgtgtgtttttttgcatcaacacgcttttggcatgccaggtgggaccatttcttgaagaatttgctagatggtggacacaaagacatctgatgttagtccagacaatgtcattccaataacaatggacaaattaacaccagagcaaaaggcagaatatgaagatctgatgaataagctctaaaatcaatacttgcattcccttgttcagaccagatcaggaacagtaattcagaggtataaagtaaatcttctaagcaatgaagacctagagtcaagttctgggaaggacaaggaagtcaagcaggaagaaactcctgaagaattcaagagtttacaagacaggattgattatgctgtacacaatgctttgatcaatcaatcaggagtgcttgtcaatactttgactaatatgaccaagtctgtagttgatggtactattgctgaacatcatgccaaggggccaatattcttgccagagggagtttttccacaat

SEQ ID NO: 208 - DNA, 1380 bp, Oryza sativa
  unsure (1)..(1380): unsure at all n locations
cgagaagacataccttctagtgtgaaaacttaactgaattaagacatagaagcaccatagtaaagatgtgtacaccaataattacagttacatttcagttatcttatccattaagcacaacgcacatgtctctgttttccacatgtggtgcataagttggcttgtccttgccctgaagcacaacagctatttgggacgccaaccgtccaaggacctatcacacaaacaaaggcttggtaaaaaaccattacccatgaatatttgcttaacaactggaaccactagaaaaatggtaacctggccctttgcgtcaaatacacaccatctcaaaccatctaaattgattcttctcaagtctgcaagtgctttttgctcagttcaaacaacagcactatcagtaccagtacttcaaatttagtaggttgaaactcaaaaatcttattaatgtaattccaaactaagagaccgaaacaatagggtagatgtagaacaggattcatattggctagctatctagatatttcaattatagagttcattccttttcaagaaaaacaaatgtatacagcttacttcgctcagtacaatataaacacagataggctgcttgctgcaataatgaaataatcagaaaaacttaatttttgaccatgcaatcagcatgtcagtgcagattctgtatgccctctaattttttgggtatcatgaggaatcattggcaggatgaatacactagccgaatcacaattcatagcaaaggcatataatctactgttgtataattgtatttgccagtcaatacgccatcttaatccatcacacaccactgtttattagttattataactgtagaatttcacaactcatgaagttagccctcatcaaggactgctgtgaatctctatatactaaacctaactggcctaactggctctaccgtgaacggatgtactacacgtttgcaaaaagctaacagctcgtccactgcccgtggtgtccaacccgctacaaatgacctcctgcaggccatgctatctctaggatcagactctcatttcatcagtatcaaccgctaaaccctaaaggcaagacaaacactgaaacacgcatgtcgctctggtatctgacggattcaaccagctgcagtatgcacattctcaatccgcagacaaccaaacagaccctatctcggagatcacccactccgactgtggctacaccacaccggtacaccacatgtgaatgaaagctcacgcccacgaggagaacctgatgggcgacggcttccccttccaaccncccccccctcccaaaattcaaaacacaacacatcccttaacccactttgctgggagcacaaacacacaagcttctatttca

SEQ ID NO: 209 - DNA, 669 bp, Oryza sativa
aatggcggcgaggagtggctcgttgtaagtccacgaccttgaaagcgagggcgaaggggatctgatcctcgggggtggactccacaacagcgcagacgcgttcgaccagcacctcgtcgaccatagcatcggcggcgaagatgtcatcggcgtccccggcgtcctcccagagcgaggccaggttatcctccccggcttcggtgggatcagaggcgaggctatcctccccatcatcggtgggatcagaagatgtggaagcagcgccgccggcagcatccggcaggggctccggggaggaggagaggaagcgggagagggggcgcggaggtggtagagtctagttaaggctcgaagtggagatggcggcggtggcgggagaggcctgtggatggaagactggaggaggaggagagcacaagctcccgaacgcccgccacatctcctcctcgtcggcgacagcggtggcggcggcagcgtggtagctgtaatgtgtggaggcggacgagtcactggtcgagtcgaggtggtgggcggaatgtttctttcttgctttctagggtttaaggccttgatggcctatttggagtgggcctgataatttttgggcccctatgaaacttttctcttttttttcccaaacggagcaagagatgagcgtatgattaataa

SEQ ID NO: 210 - DNA, 2672 bp, Oryza sativa
  unsure (1)..(2672): unsure at all n locations
cttccacatcttttgatcccaccgatgatggggaggatagcctcgcctctgatcccaccgaagccggggaggataacctggcctcgctctgggaggacgccggggacgccgatgacatcttcgccgccgatgctatggtcgacgaggtgctggtcgaacgcgtctgcgctgttgtggagtccacccccgaggatcagatccccttcgccctcgctttcaaggtcgtggacttacaacgagccactcctcgccgccattctcgtgtccaccgccaagagctgctccggtaaaaagctactcctccagttcaaatctattaacttattaaaggaatagaaaaagaaacctccacgttcactctcaaggcctagagattctcacattaatcgggataagaagaaaagtagagtccatacaaacatacaatttaaaagtaacaaaaaattcagaattaaaatagggaatatagaaagaggagactagagtccatacaggtatacaacttagaactaattgatattcggaattaaagaaagaaaactaaaactacaagtcagagtccctatagaaatacaatttaaaaataactaaaattggaattaaaaaaaataaatattggaagaagcccatattgaatataatttagaaaaactgaaattcgtaattagtagaaaacaaatattgaaagatgagtttagagtccatatagaaatacaattagaaacaacagaaattcggaattaaaaaaaacaggaatattgcaagaagagtctagagtccatatataggaatttagaataaattgaaagatgaaattaagaaaaaaagataaaagtagagtttagagtccatatagaaatacaatttagaaataactaaaattcaaaataaaaaaaaagcaatattgggagaagagtctagagtccatataagaatataatttattttggaattaaaaaataaggaatattgaaaaaacatagagttcacataggaatacaatttataataacggaaattcggaattaaaaagaagaatattggaagaagaatatatggttcatataggaatttagaactaactgaaagtcagaataaaaaaaattaaaaaaataaaagtagaattttgagtccatatagaaatacaatttataaataacaaaaattcaaattttaaaaaaataagcaagattgggagaagagtctagagtccatatagtaatacaatttagaaataagtaaatttcgaaattagaaaataattaataactatcaatacaatacaaaattcaaaattgtgttgctatttttaatatattataataataaaatatggaaatatttaagctattatatgaggaaaaatataatgacgttagccgcgtaatctgcgcgggccatcatgctagtttgtcaaaaagcaagtgaaaaattcatccaagttttgaaagtgagggagataaaaaacgaccccttaaagagagatttgataatttaactcttcttaaacgagcgtcacttcgattatttaatatcttgattcactttcattcactcggatagacccacgtatcatgcttataagtgttaattaaagtaaattgaccataaaaaaagttaaattattaaatttatcctcagagtcatcagaaacgaaactagaccaatttaacggaggcctaacttgggcccaaatcaagcccatagataatgagatgggcctgtggggcccactaagcactaggagcggaggcaagagactctccgcgcacatgacgccttcgtgtgctttggactcctttcccccgccgccgctgcctcttgccctctcgtctccggccaccagtccactgcgactgcttgacatggcctcggcgccgtcggccttcatcggcaaccacaaggtcagttacctacctccggtcaatggcattgaggtctccgtagagcaagcggtgccgtcctcttctcacatttcggctggcgctgaaacctaacataacctggatccatggcagcggcgtgggcgtggtgccctgtggaataggagcttgtgtgtttgtgctcccagcaaagtggggtgagggatgtgtggtgttttggatttcggggggggggggggggtggnagggggagccgtcgcccatcaggttctcctcgtgggcgtgagctttcattcacatgtggtgtaccggtgtggtgtagccacagtcggagtgggtgatctccgagatagggtctgtttggttgtctgcggattgagaatgtgcatactgcagctggttgaatccgtcagataccagagcgacatgcgtgtttcagtgtttgtcttgcctttagggtttagcggttgatactgatgaaatgagagtctgatcctagagatagcatggcctgcaggaggtcatttgtagcgggttggacaccacgggcagtggacgagctgttagctttttgcaaacgtgtagtacatccgttcacggtagagccagttaggccagttaggtttagtatatagagattcacagcagtccttgatgagggctaacttcatgagttgtgaaattctacagttataataactaataaacagtggtgtgtgatggattaagatggcgtattgactggcaaatacaattatacaacagtagattatatgcctttgctatgaa

SEQ ID NO: 211 - DNA, 1172 bp, Oryza sativa
gatcactgcatagatgcgcattcagattgtgttgtgtgggtgaggattgctacaaatctacctgttaatgtttttttaaaggatccatgtatcttttatttctttgacatgtagcctgctggattcagtagacggtagaatcatataacctggaaatgagcagctcaatctgaatgtctttttgtgtcttacagttagggatgaaaacggagcggatatggacggataatgctcataccatattcgttttcatattttttaccggatacgaaaacgaatacggatagctcgaatacggaaacaaatacggattatctcgaatacgaataagaatcgaatatgatcggacacaaatatggatacaattttttctcggaacataaaaaccaactcaacttctaatggaaagaaatatcagcatatataattagctcattttatataaaatgaggtataatttataaatattttttaaaatttaaataatatattaatagtatggactagtgttaagagataaactactattaaaatctataaaggtatattgaaggtcatagagttagaaagaaatggggtatgtctcatgggtcctacggatatccgaatagcactgttcaccggatatccgaattattatccgtatccgacggaaaccctggtaccatattcgtattcgtatccgggagaaaatatccgtattcgtatccgtatccgaactattcgagaattatccgatccgaaaggtatccgtatccgtttttgtccggagcggacggaaactatccgctccgtttttatccctacttacagtatgtaactcaaacctggtgttcagtacaagagtccataatatgctccatggaaacgctgaaaattccatctaagatttggattcaacttatctcgaaaatgaagctgatgttcgtggaaatgaggctaaagcttccttcagtactacgctttcccacttctactcgctctaacttctactcgatcgtttttcacgcgctccttaagctaaatatatccgtactcacgcttttttaaactatttaacggtgtattgtttagaaaaaaagttataggaaagttaatactttattaatcatacgctcatctcttgctccgtttgggaaaaaaaagagaaaagtttcataggggcccaaaaa

SEQ ID NO: 212 - DNA, 510 bp, Oryza sativa
gcactggatctgctactgttgagccagaatggctgcgtgatctattaatggatctgcctgttgttgaaaaaccggtgccggctatccttatgaactgtgacaatcaaacggtaattgtcaaagtgaatagttctaaggataatatgaaatcgtctagacatgtgaaaagacgattgaagtctgtcaggaaattaagaaactccggagttataacgttggattacatccaaacagcgagaaacctggcagatcccttcacgaagggactatcacgaaatgtgataaacaatgcatcgaaggagatgggtttgagacccatgtgagttatactatggtggtaacccagtctatgtgatcggagatcccgtgaattagatcctgggaagaacaaaccattagtaaactagaggagagtatcaatatatataccctctccaagtgaagatacatgtactctcgtgagctgcaaggcaggttggctatgccttaatgagttctgttggctttaat

SEQ ID NO: 213 - DNA, 1047 bp, Oryza sativa
gttcctgtaaaatctccggagctcgtgatctgggttagccgtcggtaaacagttctacttaggcacaaaagggaggtagtcagatcttaaaccgacataagcagtggtgtgaatggtgactactaggtacgtaggagctcaacgaattccgggttgatatggcggcactgaaaaagcaggtggccgatctcaaaggtctgaagggggaagtaaaagagattaaaggattgttactggaattgtgcaagagaaaagaggctgaataagaagaagaagcggctgctactgcaaaggcaagcaaggcagtagcttcgcaaggaggagtagacgcggctgggacaagttctcaggcgcaaggtaacccacctgtgactgaatcccaattccatattgaagctaatactgtgaacccctcgatgcctatgaatatgcattcagttgcacctacgatgcctatgatgacagtacaagggcatcccacacagccagggcatgagaatcagtttgctgctaatcgaaccaatgagatgtttacctcctctatagtaactgctactcgaccacagctcgcatttgaaatacccgggggcacattccagcttttcagcctaatgggaatagggttggtggacatgcagactttgtccaaaatcgtgcaggagtgaggatgttggaccaacagaggaacatttatctgggtcaggcaggagaagggaatcagtacgctgaggctgtcctcaaggggccaagattagaaatccctctgttcagtggagaagatccaatagattggcttaagcagtgtgagaagttttttgagattacgggtacccctctggatcaatgggtgaatttagcggtggctcatttgaatggcagggcattgaaatggttcggaggaattggtctgccatggcaagtgatagcttggccacaatggtgcagcatggtctgtactcgattttctgctgcgagtgaacatgaggcaattgagttgttccaaaatgtgaaacaatttggaacaacagtggagcaatatattgacaa

SEQ ID NO: 214 - DNA, 714 bp, Oryza sativa
cggcccgcctgcaaagatcaatcttcgcaggcagaccgccccctccaccctgggtactttttttgccggcggggttttggctccgaattacatgcccgcctgcgaaaatcgatcccctacgacgccgaaaatgagttttctagtagtggcaaggaatcaagtagagagtttataatgcacctcagcgtaagcatcgatgctatggagggaagagtcgatgcggacgatgctcccgacggcgaccccacgtatccacacgggcgtgcccacgcagatcccgcaggcctgggtgaactcgaagacggggcctggtacttgccgaagcgggagcgcagctggaacccacggatccacgccaccgcgagcgcgagcagcgccgcgccggtgaccatgaagagcccaacgccgccttcccacacgccacagcgccccgggcacctcgacgagcgccgcgagcgggttccagccaccggtcgtcggcgtcggcggcggagcacgcgacggagctagcttgggctcggtggggcctgggcgcgcgggcggagaggtgggttggggagggaggaggaatggcttggtggtggccatggatgattggtggaggaatctagcgagagatgcggatcagttcttgggggattggactggggggaagcggcagtgcgggacacaaagaatggttttgaggaaatttgttcggaaaccggagaaagg

SEQ ID NO: 215 - DNA, 652 bp, Oryza sativa
tgtattatctcatgagacctacaaaagcaacatctaagctaccctttccacctcctttaagctaaattttccttggtaaaaatgacccctttttttaaataccacaagaagatctttattttcaacagaagtcttagcttccaaataaaagattgccttggtatcacatttccaaacatgagttttttatacatcgagttgactgtgaaagttccatttttactagcatcccaagtaaacctatccttttgccctctaaggtttatatcaaccacgttagctacaatctcatgccatgctttcaaattatctcctattatggctctcctaaaggagacgttcaaaggaaccctctccaacactttagccaccaccacattcttatttcttacaagattgtacaacgatgggtatcttttctctaaagattggtttccaagccaacagtcttcccaaaatctgatttgtaaaccatcctgaagtttaaacgagccaaaagagctaaaggtatgaaccagttttgcacccaaagaggagagcatactctctttcaacctctatggctttgccaaaacacaacaattcgctcttatgaaaattaatcttcaagccagataaccttttgaaagcacttagtacaagtttaagattt

SEQ ID NO: 216 - DNA, 604 bp, Oryza sativa
agggaagctcctacatgaagcatgccaagaagcttggtgagctcgacccactgatgaagccgaagcaagaccggtacgcgctccggacatccccacagtggctcggccctcaaattgaggttatccgcgccgccaccaagtccatcgagcgtgagatcaactccgtgaacgacaacccgctcatcgacgtctcccgcggcaaggcgctgcacggtggcaacttccagggcacgcccatcggcgtgtccatggacaacacccgcctcgccatcgctgccatcggcaagctcatgttcgcgcagttctcggagctcgtgaacgacttctacaacaacggcctgccatccaacctgtctggcggtcgcaacccgagcttggactacgggttcaagggcgccgagatcgccatggcctcctactgctccgagctgcagttcttgggcaacccagtgaccaaccacgtccagagcgccgagcagcacaaccaggacgtcaactctcttggactcatctcctccaggaagaccgacgaggcaatcgacatcctgaagctcctgtcctccacgttcttgatcgccctctgccaggccgtcggggctgcagg

SEQ ID NO: 217 - DNA, 640 bp, Oryza sativa
gaagaagtccatatcggcaaagccggagaagcggcggcgcaggccggagagccactcggtgtggccgaccaactcctcctccagcaccgcccagtccatccaggtgatggcgttgtcctgacaataggcattgttgttgccctgctggctgcgcccagcctcgtcgcctgcggtcagcatgatcgtgccgcgtgtggcaaacagggtcgaaagcatggcttcgatatcggcgcggcgctcgttcaggatagactgattgtctgtctttccctcaacgccattgttccaggagtaattctcattgtggccgtcgcgattgttctcgccattggcctcattgtgcttgttctcgtaggaaacgagatccatcagcgtgaagccgtcatgggccgcgaggaagttgacactgcggctctgtgtgcgtccgtcgcggccgaagatggaagaggagccggcaagaatcgttgcgagctcgccgatccctgcgtcgccacgccagaagcggcgcaagtcgtcgcgggcgcgatcgttccattcgaggaagggtgccgggaagctccccagctggtaaccgcccggaccgatatcccaaggctcggctatcaggatgcgatcccgaagcacctcgtccgccaacagg

SEQ ID NO: 218 - DNA, 677 bp, Oryza sativa
aaatgcagctgatctggcgatacaagtccatgactatggtgctcaaccaaggaagctatcgtgtacttgttatcagaacatagcttcacgtaaatgtgtgcatcacatccacatctagtttctttcaatttaatcttttttttcttcgatggatcaacaatctccttatcattcacatgtttccatccttgccttgagcacacaaagtgcttgcactgaaccacgccatccaacttcttttgctgcccaatacgcactgagaacccaacttggtgtgcatatgacttgtaaaatttttcaacagaggcaatatcttcaaatgtcatccctaccgcaggccttatcttatcatcacactctggtgtaaaaacggagcactgcaaaatcacatatacattgcaataagcattttaaagcacctcagtcataatttttaaattgccagtgtacttacattgagtggaattcttgatattttttttggtgtactggtgttgtcatcctctattactggagaagttatatcatcatttgaataaatatctgagttatctcgcacatccaatctatttattgcctccatctgcaaaaaaaaaaacagatagcaaacacctgagattaaaccttcaattcccttgagtgaacaattatgttggagccacctaccttaatatgca

SEQ ID NO: 219 - DNA, 4577 bp, Oryza sativa
  unsure (1)..(4577): unsure at all n locations
cacactggcgccgtgcccgtgccaccgtggcactagggctgtcgtggaggtgctgactgggcagaaagggggcgccaaccacactggcgccgcccctcataccacggcgccagcatagctggcgcgcccctcctctgtgggccgacccttaaaccccgtgggccccaccacctttctcctccccactcccattttcgccattcccagcccgagcagcgagctgctgttcttctccctctctctccccctcacctctccacctcaaatccactcaatttgaagccgtttttcgcgggattttttgtggaaatcgaagagaaaggtagactccttcattctcccctcttttttttcgtttttattggttgaatttgtagatcggtgggtaaccctagaaccccttttttacccaaatttgtgatttttagcatttgttcttaggattggcttgttgtagtgctacatgtttgcattgtactcattggtgtcatgatttttttaaccatatatgtggtaatgttaatttttggatggtttggttggatggatggatgaaaaattatggttgaggcatgacggaggtttgggttgtatgatggagtatttgtaatatttcgatgtgtaatgcagtagtaaacttgttgatagttgtaggtggattaaatatttttttggagtagtagctttgggacaatttaagttatgcattggttataatatgtcggtttggactacgtttaggaatgaagatttaatttttgttgcaaagttacatttgattttttggtgtagatggatagacttgttagtgtttactacggtggtagagtggtgaaaccttatgttggtggacatgttgagtttgaggatatgtcattgaagaccattttgtttcccacccacccaactctagatgaactaaggtcacgagtgaaagaagttcttggatggaccgaggataatgtggagattcgtttttatgggagatacgatgttggtcaagggcataagtatatattaaatgtgataggtcagttggaatgggaagtttactttgatttggtaanagagtctcagtttagatctctagaggtgtttgcatcanagttagttcgtaccgtagaaaatttggatctaaacaattctcccttcttatcattacgttgagaagaattttgtgacatattattctcgtcgtggagggggtgcaagtaagagtgagttggtacgagaagacttggagggggaaggagagaagaagagacctttgcttggaaatgatttatgggaggcaggaccatcaaagagacattgcggtactgatgatgtggatgcagcgagggtgatgaaaagggagttagtacaagaggggcttgatctaagtgaacatttgtcggcgagtgttcattggtcgtcgtacggagtcaaccctgaatacccgacagaagtagcaggccaatatatgaatccagatgattactttgatgtcgaattgagtggtggtcacgattctgtctcagtagaagtcaatagagatgatgttgacgaggaggcaagtgttgagcaatatgatgttgaatttgctgaagactctgatgatgaccgtccattccctccacttactaataatgacaagttagcattagaggaatgtcgtgcgtttgagaaggtgtttgggaggaagccggacattcctgagtttagagacctaacacatgcccatggtgcactactagatggcggtatcaacctagatcagttgccagaaccattccaggtggatggtctcagaaagggtttagagttcccatccatggtcgcattgaagctatggctccaggagtacgccatcgtgcaccatcgtccataccgtgttgtcaattctgccgcaaataggaggtacactgttaaatgtgaaaacccacggtgcaaatggaaggtccatgcaactaagaggtctagtggcacgtggaggatatcacgggtaggtaaggaacatagttgtgctactgccgaaggttcagggagccaccggcagctgacatcaaagttcatagcaaataggttatgcaatgccataaaactgcaacctacactctctgcttctgcattagctttgtatatatttaaggttttccagtatagggtgaagtatggcaaggcttggagggcacgagaggaggctatgaagctcatttacggtgaatagggtgaagcgtatgtccgtttgcccaccttgctgcaagccattaagcagaggaatcccagtatggtctaccacgtcgatactcatcctgatagggttgtcaacgttgatggagtgaccaagaaaatttttatgcgtgcattctggtgctttggtccttccattgaggcttttaagcattgtaggccagtactagctatagatgcaaccttcctaactgggaaatacggtggtgccttgatgactgcattatcagctgatgcagaggaccaacttgtacctttagcttttgccttggtggagaaagagaattcacgagactggtgctggtttatcgatcttgtccgacgggttgttgttgggccgcatagggaggtttgtattatctcagatcgacatgctggtataatgaatgccatgatgactcctgttccaggattgccatcggtttaccaccggtggtgcatgaggcacttcagtgctaatttccacaaggccggtgcggacaagcatcagacaaaagagctcctaaggatatgtcagattgacgagaagtagatatttgagagggatgttgaggcactaaagcagcgtattcccgaaggtcctcgtaaatggcttgaagatgagttgttggataaagataagtggtctcgtgcatacgatagaaatggccgccggtggggttacatgacaaccaacatggccgaacagttcaatagcgtgctagttggtgttcgtaagcttccagtgacagccatcgtatcatttacgttcatgaatgcaatgactactctgtgaacagacatgatgaagctttgaagcgagtccagttagggcagcgttggtccaccaaggttgacagtaagatgaaggtgcaaaaaagtaaggcgaacaaagcttcaatgagccggttggaaggcctaagtggagacaaagcttcactccttggccctacaatgagccagacatggagaagacagtggcctacctttttgagagtactgccactgcacatgctcaccgggatgtggcatacaagcattatgtcaatgagatggactgcttgcagcctcaacatgtaagtacttccaatatcacttctagttagacatttacttctttaattgagatactaaccaacgacatctcttcaacttttgcagattgagtggttaccataccacacaaatgaggcttcaagcctgaccctgaactcgatgtgcaatcgagactctgactatttcatgtaccagtgcccattgatttgtttctgggcagttgagtaccaccttccgcaccgtgtcatgcgacagttcggaaagaaacaagattggccggttgaggacatctcaattggagttgaattacacaagtaaatatttcttatctttgtttgctttcattgtcaatgttcaattttgtaccatttaacccttgtcgatgctcactattgtttcatcaccttctacttgtctaggtatgacagggtgagaacaaagaaggtgaaagactgggggctagagcataatagatacattgatgaatggagaacagccggaaggaacgataggtacatcgagactatacaccaaaatcatcttttctcagagtaccttcgttggctgtataggacatatagactgttcctccgccctacttggacggaagccgacatagaggatgaccgcgactccgatgaggggcggaatccctatgatgtccggactagagttggatatcaaatggagcacgtcccacttagagacagagtcgtaagttttcttgcatttgtcaaagttacttccatttgcaccctagaccctaacatatatcttctcacgctttcagtcgagagagctcctcaggagtgtgaatgaaatggggcatgccctccaagctccgaggggtggtgaggacacggagaacacgctccgcaatgttttagaggtaaaatttatttagcactttgcattacttgagttatgcctaacaaacttcttttttttttgaaatgcagaaagttcgtcaaaggtgccggaaacttgcagcaagattaggttgcaggtcggttggattggacgacgtgtaccaaccggggagactaccaccaccactacctcaatccgcgcgtccaagtactgctcgacactccatcagaatagaagagcgtgaaggagttggtggctcgtcgtcgtcacgcattaagcaagggaggggaaaggggaaggcgccggctccacctagcgacgacgatgacgacgaggacgaggaggatgaggactacgtcgcaccagacgccgaggagatagacatgtcacagcttcccgacgcgccctcaggggacgcaacccacgcaatacaacttgcg

SEQ ID NO: 220 - DNA, 12351 bp, Oryza sativa
cccacctgtctcatcagaaaaaagggcgccgacaactccagctcctaggaaaacacctaaagcgaccgaaccctagctacccgcagggaatcagatgccgacaaggaaagtttcctacacatacagcaccttatgcttcatccataagacgtctaatcactcttttatgaactgcaaggtggtgctacaagtgaaggctgaactcgatgcatgtagagatcgagagatccagcgcacttccccgtttaagagttggtgtccaattcataaatcaaaaggacactctctttcaggctgcaaggtttttcttgatgctaccaaatctatgacccgacctccatgctgctagatccatcaacacgaaaaccaatctcaatgtgtgtcaaaggacgattgcacggaagaaccccttgatcgcttcgtgggggtcatcgacatcgacccccacgattcaacgaacccgccaccatagaagcaatccggaggacttgaagccaattcaccgatatatctcgtcgagactctctcgacaaggatctcgtcggtaatccggagttccgttgttctctattatactatgtgattttctctataatcccatataaactaattagggctattaccttacgaggggtctgaacctataatccttgtctttttgtgggcatgatgtcgtatcgtgtagatccttgtaccaatgtaccccaataccctcaaactacggttcgtgggtatcccccgtcgataatcatgtctcatgcataccaaattaataacatggacacatattggggaacatgttggatagacccaatatgagacactacaagagctatatgtgatatgtcatcagcgatctcatttagtgttggtgtagaatccttacacctgagattatcatggttcccaacatatgtagtagcttatttagggctgccaaacgctactatgtgagtgggtaattataaaagtaatctttggtatgctataaaacatgtagtgggatataaataatcaagatgggatttacccctcctatggagagatatctctggacccctcgatgttatagattatggaagtgcatggccatgcaaaaagtaattgaggagttaattacaagttaaataatctatcactagatcaagtaaatgattgagctattaaagaatggcacatatctagccttgagcttaatcgataacgtgagacaggaggattcatacaagtgtatactagagatgcaaccgatataaccttatgtatgtccggtgggtcaatttgttttgttaggagccgctcttttcgggttacaatcgagtgtacatgaacctacggggtcacacacttaataggccggaataaggggattggatggagatccaataggtgctcaattaggatgggatccgagtaggactcttatgggcctcggaggcccaattattgatcctatgtattcttcaggtgatgtgactggtgtcccgtgagaaaccctagccgccactcctctccaagccaaaccctagtcgcacgcgggtgctagcacgtccgcgtggcatttcgtctctggacgtgtgcataccggtagaggcaccgctggtttgcagtgctgatcggcctaggagcatggcgaggcaaatgcacgaggaggagaaagtcgggctgctgcgattgactactcctctacatcgacgcgcgctacatcgctaacattccttcggcttcttaacacctacctccgttccacaacacgtcgagtggtaatgattcatgatctcatacttgcattggttcctggtttatgcggtagaaaaattttgatttatgcaatcatagcttttacgcgtatcccaacactgcgagccgtcgtgccgcctcctaatagtgacagaggggataagaaagaagatgtttcacttacacctggatttcacgtgggttttttttcttcctatgccacatcagcgtcatgttattcaaaccaccttaaatactgccatacgactacatttgtaccggttttgaaaattgaaggatggttatatccagttttacgatttagggattttattcaagctcggtgataaattgaggaacatcatgtgaacttattcctacttaaaaaaaggaaagccgggctaaaaagctagggccgaaaatggaagctaggcttgatcgctcgcacaccctcacgcgtgactattcactgattagtgatttcggagtcttctgagtggagaagtgcttcgtaaacgcccaaccagatggtccgtaatgtgaaatcattgtcatgattaatatttgtgatgaacaattggctatgcaaatgatttaatcagtgaattggtttggaaagatgtgtggatgttggtgtgagtgcgtgtgactaatgtgggtcaggttgtgatatctgtgcccaggaatggttgttttgtctgattgtgtgcaggtgacttgaggtcaaccttggtcaatggtgaggatcgggactatgttcagagaggaacataggtccagtgcggtcgggataccatgtgagaaggtgactagagtcaggattcttggaggtcaacttcggtcaacggtggggaccgggactaaactcagggaggagttgaggtccagacggtcaaggataccgggtgacaaagttgaatacgagatggcacacagtggatggacaccgtgtgggagatatcttcgcaacgggcttcacgaggtgtgcgtgcaagcgtcagtgttcgcgaaggagatcggaagaaattggagaggagtatatatggtgctacagtgattcgggttacagtagcatgcatatatgtatgtttactggtgtgcagtaggcatgtgatcgatacatgcatgatgttgcatgcatgtgtgttggcgtcggtatggttggcttgctgctgccaggtaggtcaggagcagcagcaggacgtgcaggccggcaagagcaggcggctcggctcggccaggaagttggtccacaggagcgagaccgagtttgatttggtgaatttgctgtgtccggttgtggggctgcaggtttaggagattgtaatctggatagagtcctagtgtgtttaggagtggtactcctattttgagtagagggttttttgtgatataaatagagagggagcgtgaggctttccggtatcgcttttgagagcaattgagttgatagtttagttagggtttcgagtttagtcgagatttttgtaaggagtgctgttgttgcactttgtaaacacagagagaagcaataaagttgtcatctactttgagagttcttcaattcgtgtttcttcgggttccggcggcatgtgagcaatccgaccggcggcgacaggactacgtcgagatttccatcgatttgagggtaacttttatttccgctaaaagtttttgggtttttggttttccctaccattcaccccttctctggtaggcttggtttcttgtgttcaatcctaaacgtaatatatgggttacaacgtattcgattcggacatatatttttctggtccgtaatttgtttcgttttaccaaatggaccgtataatctgattagggaggggttagttgcgtcctagctagccagttccaagcccatacggccaacatgcatagctgtaaggaataagtgaccctcaaagcttatcgaaatctaatccgtgaccctaaaccataaaatcggatatcttgactctcaaactcttaaaaccggtgcaatttgacttccttgacggttttggagagcggttttgctgacgtggcgcttaagtggtggtattgacctggtctcctttacacgtgtcgttgatatggcgtttaggtggtatttagaattaaaaatatatataggacccatttatcattgacacagaaaagaaattatgggaccaggtatcccttctctctcccctccctccaattacttctccctcctctttctctctcccgcggcgggcagcgagggccagagcggcggcgggcggccgcccgtccatcggctccgtcttcaccaccgccgcgtgttcgtcttcgccgccggcgccgccttcgtgccgcgttcgcttccggccgatggagacgccgaagagcttctcgcgctcatcatttcctcttcgttgtttgatacgggcggcaccgccggggcaggaaggcatgaggtcgaggacggcagggagcgagagcggcgtggccgcctcggcggattcgccgaagcagttgttgttcccggcggtggaggaggagttggcggcgttgagcttctgcgtggaggtgtacttggacatgaggaggaggatgttgttgccatcatctggctgtgctcccgcgcgagctgcgcgttctctcgccgcagccgctcgttctcatcccccgctggacgcgacgccgccggagccggagccggagccggatggcgtctgcgacagcatgagcaggggctcgggggacgagctggacgatatgatctgctcctcaccggacagaacctgggaaccatcccgcgtcgtcactggcaacgccatcgggatcgtggccgcgaccgtgaccgcccccgtcgtcgtcgttgctggcgtcggtggcgtcaccttccatcggtgtatctcgcagagcagccgccgttcccctcgccggaagcgtcgttggcgaactcccacctgtccgggacaatattcccaaatccctgtataatccaatccattccggcgaggccgagacaaaaattagtggaggtgttcgaaatcgaacgggacaaagagaaaacaaaaacacggcggcgaggcgtacgtaggtgttgagctggcggacgaagctggagaagttattgcgcttgaagtacttgggggaggaggtcgcgggcgaactcggcggggcgccagacgacgaaggtggagccgtcgtcgttccatgagatgatgtcgtcgccggagaagaccccggcgttcgacgacaccagctcctcaccgccgccttcagaagaggaggagagcagaacaactcctcgcaaaggggacccggcccgcgcccgccctcccgccaccgtcgccagcccccgtcccacgctcgcggctcaccgaagggaatagaaagagagggggaggatgatttttgtgggccccacctgtcagcgggtcccacccatatttttggtgaataacaaatgggtcccacatatattttttatttccaatgccacgtggtaagaagatcgagtcaatactgctatgtaggcgtcacgttagcgaaaccgacatccaaaaccgccgagggagtcaaattgcaccgattttaagagttggggggtcgagatatccggttttgtggtttagggtcatagattagatttcgatcacttttgagggtcactaagtgaacttattcctagctgtaatgactaatgaataagtctatttttcttcccttatctcttgcccttatcgaatcacatcccttaaccacaaaattaggtataacatcttcctcaaccttcaaaaactggtgtaaatctactcctaaggcagtattgaacctggttttagcctacgtggcgtatggattaggattttatcctacttggcatctgtatggcgctcacggtaaaaaaagaggtgggatccatgtgggcccacctatcttccatcttcttcccccagccgccgccttctccatctctccctctcttcctcgtgctctccacatctctaggccagcagccgcgtgggagaggagctgtggctgcagcggtggctcctctttacagagtagcgcgagcggcgatgcctcgttgtgcggtggtagacgcatctggagtcactcccggccactcctaccctcgctcccctgcaagcttgccgaggtctgtctccccgcgactcgagctcgagatccttagctaacgttttcggccgtcactcctaccttcaccccagctcgctcaccaaggtctcccgacatctgcctccctgcaactcgagctcaagatccatagctcacatctgtggctaacgctcgggaaagaggagaagttgcagctgaagagatcgtggagggcgacgcgttcagtggtggccggggtttgaggaggtggatggtggggtcgggtaggagacggcgagctggaaggtggcgttgggggacctgcggcggtggaaggcatctgcggagtgtgcttcggtgtcagtggacgagctggagcggcggtccagtgtcgtggtgaggcaagtgtaggaggagctcgtcaggtggcttcgcgtaggaggaggagtttgtcggccgaccgcgatgcgtgcagtgcggagatcagcagttgatggcaacagcgtggtgaggcgccactcctcactcctccatggtggcagctatgttgggtgccgcacatgcctgacatcgcaggtcatggacagccagtggcggcgcacgacatagacaaccggcggtggcgcagaaagttatcatcaccgccggcggtatttgtgcaattggccttgggggaaagatggttgtggccatcgtcgtcatagcattgtgtgtctcaccgtcggcccgttcgagattgagaggggagggatgataagtgggcactacctttttcacttacatgtgggactcacttttatttttaattcctttgatgaccgggctgccacatcagcgtacttggaccaagtcaacgtgctacgtcagcaatgccacttcccaaaaccaccaaaggagttgatttgcaccggttttagaaattgggggaggtgttatacgtggttttgtcattgagagatgcgattcaatcgaggacaagagataaggaacacataatagacttatccctagctataaagaaaggtcatgagctcgcacgcgctggcaccggtgataacatatccttcttttgggcgtaatgtttttccttttaccactgtctgtttctttttttctttttgagaattatacaacgctcacagcacacgcacactcacccctatgaatgcatgtaaacaaaccctaccccctatgagcatcttcaaagaatgggccggcaaatcttgcagattgacgaagtcatcatagacacctcactgtcgacgggtacgtcacctaccactgaaagcaaaataacgctaaattctgcaaaagggtttgaacgagaatggttagacgtttatatatccgcgatgctataaccgcctgaagaaccagtaagccataattaattcttcagtgttactcattcatttgatatttctgtaccaacccgtaatcgaggtggaaaagacgtatagtttactagtcgcggtgtgcgcgcgcaccagctgctatgtcagccaatttttgttcatctcgtttcgcttatatacttataagctaaattttattttttaaaattgattttagttttctatagtttattttataatatttacttttgaatcgctaaatacatatctagatttacccataaattatttttagttgatattaaaccattcgaatatgtactatcgaaaaaaaaaccattcgaatatgtatgtgcataagccaaaagatggatctccgtttgtattgtctggcctagctgctgtgttggccccgcgcgcgccacatcgctatctgcctttgatttccataggcatggagctatgtaaaccgtatcccatgctccggtgcgataccaactgttgccaaaccctctaaagctctactttgtccagaccgatcagttctccgtttccctttggtgctttccaagcacatgccaatgtaaccaatgacccaatgaccagtgatgacagatcataagtgacaagatttatccatttattttcattatcccaaacaagtgattcactcagtgcgaggttttatttaccaccatatacaagtacaggaactaagatagttattactgtccctgtacgagaccaagctcatcatgggcagaagacgatctggtagtcggtgccggcggggcaggtgaaggtggtgccttggccgtcccgggcgtaggtgaccgtctccgggcacagcttcttgaagaactccgtgtccttggtcggcccgcacgtgctgttccccctgcacgggttgctgcacccggccttggcgcgcagctcgccggggcactgcagcgtgatctccgccgcgcaccgaggcccgccgcgggggcaccgtcgcccgcccgccgccgccggcacgatggccattggcgcgttgaacccatccacgagcgagatgtcgaagtagtcgtccttgctcgcctggcccagcgagaactcggccaccgtgacgggcggcgcgccgacggccgcgcaccgcagcgtgccgccgcagtcgcccgtctggcactgccctaggctgccgccggagatgaagccgcagcccgtgcgcccccacacgcgcgcgcccttggtgcccgccggcacgtacacggcccagctctgccccgggtcgagctgattgccgtcgcccgacggcagcgccgccggccacacggtgtacccgcacttgttgacgatggtgaacgtcaccgcatcggcggcggcggcgagcaccacgacgaggaggaggaggtggacagaagagttggcgagggacgccattattggtgacgtgttagtgtttctgttgctcaaattgagctgagcaagaatgcaagctaggggtgtggatttttatagcggtccggctaatggataatgtggaataatggaattcaacttttgcagctttgcgtgtgcgaatttcgttacgaaatcccaagagagtttggtggggaaaccagctgatggtttgataggagtccagctggttgtattaatttggcagaatcgtctagaaatggatgtgaatgatttggtcaaatatcgtgccaagattttgcgtgataatataaagttgtactatcttaatttatatctgaattgtcaattgatcttgacttggatgatacaaaatccaaaaatatggtagggacaaattttactctatatattatccatcgctattatcctgaagatataaaatacagagctctgccaagaacaaagaccgttcaacccaggataagaaaggagctaggtcgatgaatcgtcgatcacattctgggttcaaaaatcctcgatcacagttcacaagcacggttcataaggtttggaacgaatagagaacgtgtcatccacgcatacaaaaaacgttgttcagttctcacttgtacatcgtagtgatgctaaagtgctaaactacccgtcaaacccccctggaaaaaataatagaatttgaacggattcgttcatgcctgtgtaattaaccaaactacaagtgaaaaaccacttcagttttgaatggtttactttattacagagtaacttttctcttcatgattctgatacaaactcgcataaaaagtatgcatgcttgtttattgtgtatacatctaaccaagatcacatcgatcagatgccagctaacaagtcatcgtccctcatgggcagaagacgacctggtagttggtgccggccgggcaagtgaaggtgctcgtctggtcgtccttggggtagctgtaggcgtccgggcagagccccttgaagaactgcgagtagttggtcgggccgcagttgttcgccgccgagccggtgcagcagtactggtcctgcttgaacaccgtgcacgcgttgttgcacccgccgggcgccctcagctcgctcgggcactgccccgccacgtccgcctcgcaccgcggcccgcccttggcgcacccggcgccgtcgccggcggggaggaagtccatgggcacgttgaatccgtcgatgagggagatgtcgaagaagtcgaggttgctgaactggttcagcgcgaactccgccagcgtgttgggcggctgcccgtacgccgcgcaccgcagcacgccgccgcagtcgcccgtctggcaccgcccgttgccgctgccgtcgaagctgcagcccgtgcgcgcccacacgcgcccgcccgtcgtgccggccggcacgtcgatcacccactgctgccccgggtccagctgctgcccgccgccggacggcacggctgccgcccacacggtgatctggcacttgttggtgatggtgaacgtggcggcgttcgcggcggcggcgaggaggagaagagggaggaggcggaggatggcgggagctgccattgtgttagcctgtagtggagtgcgtggttgtggtgactgatcgatcgatgcagatatttatagtctggataacgtggaattccggtgcttccatgcgcaaatttctcacagaaattccacaagtttggcgcggaaactagggatgttctggcggtcggtctcggcttaatggtctgattactgagaaaatagaaacgtacaaatggcacatataatggggccgacgggtttatgccctctataaaacgggggaaacttttacggaattgctagaaaacttatgtaagtttttttagtccaaaaactttcaaatttgtgattattggatcaccttaagatttgtgcatgaaaaaaaattgctagaaaaaacttttacacatgtcacacgtaaagattccagtgctaaccaaccaaaccataattgaatataagttttatataagttatatcataggtacagtatagttacaattagaagcatctattatatactaaaagtccattaaactttctataaacgctctcaaaccgtcaagtggcaccctaataaataagagaaatttaaccatttatttttatttaaattggtggacctattgttttggatggttagatctattcggtaaaagcaaaaatcacatccgaaaccaacgacgtacaaaccaaaaaaataaaatcaatagaggcgtcatatatactaacgaataaaagtacgtactatatgaacgtaggtactgtacgtacttcccttcttttccttcctatgttactttctatttcatgagaaattaaaattaaaattatttttacatgcaaaaaaatcacaaatagatcaattgctatgtctagcagctctccctccgtcacagatttaaacatcctacgaactatcctaagtcgctacgtggtgcaaataaattagagaaagtactaaaaattcttaaaaatacataacaaccaaccatcgatttctacttaaattgatgattacatttaggtggttaatttttaataaaaaaatcccaaatctctctccctccctccctacccccgtgtggtgttaaagtccattaaatattttttaaacgcctctatgacagtcttaaattaaagaaaatcttaaaaaatttagaaaaataactattatatattaaaagtccattaaacatcgtacagatactccgatcctaagtcgctaagtgacaccttacaaatgcttctatgtcgccaagtcatactctaatccgatcatcgattttcatttaaatcggtgtatcttttattttattttagaaggttagctttttataaaaaaacacgcacacatccagaacttccccatcacgtacgtatgaacaagctatcttcatgagaaattaaaatcaaaattatttttacattaaaaataccacaaaatagatcttcctctgctaggtctaaccgctctcgctctgtcacactaaagatcctatgatcgcttctaaaatgctacgaggtgctattaaattagagaaaatacgagaaaatctttaaaaagaaacaaagcatctagctatcgatttgtcaggtttttgtaataagaaaaacccaaacttctctatgtccctccccacacccgtgcaacgttaaaatccattaaatatcttataaacgcttctaagctgctatatgaaaatcttaaattagagaaaaatcttagaaatttcgggggaaaaaaatccaaccatcgaatttgacataaatcgatggacacataattttcaatcgattaacatattattttaggtcattagatctataacttttttaaagaacaccccaaacctctttctctccctccttctttgcggcatacggtattaaaagtccattacacatcttataaatactccaaagatattatatcgttctcttaaatcgaagaaaatacactcttgagatattacgttgttatcttaaatcagagaaaatcctaaaaattttgacaagaaaacaaaacattcaactaagttgttagattaatcatttagaaaaaaagtcccaaacctccctccctcctgcccatttaccgcgtgccccattcttttctctctattttttttatctcctaatcaacggaagttaaaattatctatatgggcaaaaaaaaaaaaggaccgggggatcca

SEQ ID NO: 221 - DNA, 3370 bp, Oryza sativa
tataagaaaggagagatgtgggcctatatttattttctcactcacatgttgatcccccatattttttttctcactcacatgttgatccccttttttttctaattatgatgctacgccaatgaaattagagatctacgctgctatgggatctaaattacacggttttgtatggtttaagggtcaagatttctagtattggggattagggatgtcatacaaactcaatgtaaagttgagggatgaacggagaacttattcctcgtacaaacacagtaccagtacgggcaaagggccgaccgagcgcacattctcctcgtactacatggccgatttagatgcaacatccgtggaccggaaaacagaaggcgcctttgcccgtgctggctggcccgtttgcccgcgtgcccaaagccccaaagccccaaagcctggcctgccgggcgctcgtacgttatcagacatccgcgcgcgtgatagaccaaaatccaaccaaacgggccggccacacgcatgacgcatatgcctaggcacacaccacgcaccagtgtatcatgacgccccatcataacaacagccgatcctgcagctcgatcggctacaccatccatcatccatgcagcctgcctgcagttagctgcaggaattccctcgatcacctcccacccggtcgatcgatcgatccggtccctggacggagggggggacacgccatcatacgcctcttacgtaggtacacgcatggcatgtcccatcaatcgatccccacacacccctcctcctcggcctcctttccccgatccatgatgcgcaccgtttctcacgctctctctcccttcgcgcgcgcgttcgatcgatcgatcgatcgatcggcatgcatacgcccatgcgtggtgcacggccggtgcactcgctccgtgcctccgcgcgcggcacgcgcattgcgaaactactcgtaacacacgagatctcgatcgccatcataagtgcacctttttacgtggaactacgcgctcgctgctgcctgtgcatatgctgctgcctgtgaatgcctgatcgatcgactagagctcgtcaatcatgccccgcccggtctccccacgaatcaaccgtttgatgtgatcaccccgtccatccggcacagccgcagcacaagtgggaaaaggagggagctcttccgcgtgcagcttatcgatcgctagcggtaacttttatgcgtgatacagtacgcctttggagtaactgagtagtgacactagtactactgcctttgcgggtctctctccggtcgccgtcatctctggtccagccattgccacctgcgagacctgccctgatgccctgatgggcgcgcatagctgacctgacctccgttctctagcaccctagggccagggctgcgacatgcgtatatatgcatatggcggactcgaactcggttggcacgatgcgtaagtataagctggtatggtagtactgtgctgtactgcccgatggtgccgtgcatggaaaactatactacctagaaaacgacccgagagaccgtgagcgtacggtgccctgccatgcatggtttgaccttgggacaaagcagcagtgaacaatcaaacaaacagagaggtcactgcttgcgcatgcatatcagcagataaatattctcatcacctgcatgcctactgacggccgccggcgccagcgatgtgttctgaccatatcacccgtcaaaacatacgtactaccttaaccataggagtatctctcttacatgtgggggagtgaattttaaactcgagagagacatcccctcattatttacatatcatttaaatagttaaaaaatcaataatacagattaatatatgataaatcacttcacaaagatataagttaaaatttaacttttacaagttgcaacaaaaaataaattgaactatggttagttaatgtatatccgcagttaaatttgcttttttcgttgcggcacgtagaaattgaatttaagttgcatatttgtagagtaatttatcacatattaatctatcttgttgattttttttaaaaaatatataattatttagatgacacgtaaataataaggtatgtaccctctagagtttaaaatagctttttcttacatgtgtcttgtagtgtagtgtagagtgtagtggttgtactatgtcgatctgctcggtgtttgctatccaggtcggtccatccaattgaggccggagaggggccggtggggttaaacctggctggctgcctctgctgggtcttctcttctgtgaaaattttgaacggtagctgttgggttttaccttctgcagctgtctagacacagtgaaaaaaccacgcgaactgcttatggctgctggctgggtggcccagaccttggtgagaaccgagggaatatgtggaatggaatggaaacaacccgttagggagggaacaaaagttacacagctagcaggagtagtactacgactactacaggcccgttagtgggcgattatagatgtcatctcaggttgccacaaggacacaaggtaaaaaaaaattactaatgagtagtgaaagtgtcttgctttctctagactagatagtatataggaaactcaaatcatcccttaaaaggatatctccttatcgttgcatgtgacttgaaaagtcataaaaaaaattaaaaattttcgtaggatagattaatatgtgatatgttattttacaaacgtgcaaattcaaattcaacttatacaactagaaacaaaaataataaatttgactatgaataaaacgtgtaattcacagtcaaatttgttatttttgtttcgaattgtataagtcaaattttaactcgcatgtttgcgaaaaatatatcatatattgatctatctcgacaaatttttttataactttttaaatgctatgtataaaacgaggggatgtctcctctatggacaaaaatccacttccgtagtatatatatgtagtagccatatgcatcatcacattacgttatcagatagtagattaattacgagtagagtggtagtgttacaagcatgcgtgataattaactcccggccgtcccaaagattgtaccggggactttcccaacattaacatgtttcttgttaatttagcattgctggtatagctacggtgcagtactggtgcatagacgataaatcgagatgcttggtttgtaaatatgcttggttttcactattcgaagattgctcctttctccatctagctcacctatatatattcctggttttattgagaaaagtaaatttcacaaaactacatgttttatagtttaagttgcataaaaccacacacactttgatacttggcacttaagtacata

SEQ ID NO: 222 - DNA, 11095 bp, Oryza sativa
aatatatgtacttaagtgccaagtgtcaaaatgtatgtagttttctgcaacttgaatcataaaacatgtagttttgtgaaatttactctattgagaaataataatgagaatattccgtggccttaatttgtgataagaatacatgatcacccagctagatagcacaagatatatatgatgcgcaccacacagtcatgcatgtacggaatatatgcatggttcccatcatccagcaaactagcatgcaactagtttgctagcagtctactgcattcagcatgcatgtatggtccttgttaacccttacattgttttctgctagatcagaaataaaggcagatttaaagggtatatatacatccactgcgctgtgcatggatatgttcaagatgcatacctacacaatctatggctatatatatacttactccgtttcaaaatatttgacgccattgatttttttaaatatatttgaccgttagtcttattcaaaaaatttaagtaattattaattcttttcatatcatttgattcattgttaaatatatttttatgtagacatataattttacatatttcacaaaatttttttaataagacgaacggttaaacatgtgctaaaaagtcaacggtgtcaaatatttcgaaacgaagggggtatatcgacactggtcatatataggttttctacttgcaaaagcgttcgtgatatacaagttacttggtagtggatatttgcttatgtgacagtaacacagatattatccatacatctcctatgacttattctatggcccctaacgaatcccgtacagaactttaactcttgtgttgattcgattcgattcgatcgatcacaaagtcatcgaggaaaaaaaaagtgacttactccctccgttccctccgtcccataatataagtgattttgagtttttgattgcaatgtttgatcactcgtcttattcaaattcttttttcaaatataaaaaacgaaaagttgtgcttaaaatactatagataataaagtaaatcacaaataaaataaataataattttaaaaaaaatttaataagacgagtgatcaaacgttgtaaggaaaaactcaaaatatcttatattataggacggagggagtatattagctagctagagacatcgcaagtggacaagaactaacgtgtactcctgtcttggtcagcttggccagatattcttccgtttttcacagtggtgatatgatcatctggccatataatccacactgcaactctgcaaggcctttcaccaagttagtgatggtgatcactgatcagtgatccactttactcgcgctaatcagctcaacagtttggtaacctaaaacatccacatctcttgaatcatccaccacgcgcgcgcatcatatcatacagtagtacgtacagtctccatgacacgcacacgccgagctccaagaccaaaatccagaccgattggcgctgtcgatcgacgaacggacggcccagatcccagtcgagatcatgtcccggcacacacctctcactggacccggtctcagcgacaagacacctccaaaatcattgccgccctgtggccatggagtgcttagagagggtggaatcatcatgtgcttattgaaaaaaaaactatagaattaagctgaggttgacaccggagtcaagatcgagtgtggtacgtgcgtgcgggccggcagaacagcggatcagctgggcgatcaacacacagctgactgatgaggcgacaatcacatggtgtggaattaatgggattaatgaatggtgatgactgatgagatgatctatctatctcgttcgagttgggatacagcgttgtgcgcagatcgatcggccgatggaccggccggttccctgtccaacaatcatgtggaggtgtggtaagcagagcatgcatgcagggtggaatgtctgtgtgatgcctgagctgtttagactatgtaaattattacaatgaattatcgatttgattatcaagatactttaaagatttaaataaatatacttaacttatagctttaaacaagtgggttaaagtagaagaatcttttttaaaaaaaggtatttccaaacgtggagtaaataatgtgttctaataattggatggataatctgagaaagaaaatgaccttagactatttatctggcaggggcaagatcatctacgtatggagatagcacatatcaatcaccttaactgcaagatactgatctttactggatcatacaaaattcacattagtcccggttcaaaaacccgacggcacttttaaaccgggacaaaagatatttttgagtcccagttaaaaaaatagcaggtggtgtcagacccctccactatctttagtctcggttgtttaacaaccgggaccaaaataaaaaaaacaatctggactaaaattaaaatttttttgcaaagttgtgccgagccgccttgtcctccccacaagttacagtccttatctccatctcctcctcccttcctctccctcattcctctcccccgatctcctcctcccctctcctcctccggccccctcccctctcctccccctcccctctgcgaagccgacgacggtgacggcgggcggcggcgccctctcctctgccggatccggcaggaggggagacagcgggggcggcaatgacatcccctttcctccccctcctcccggccccttcccctatgcgaaactggcaacggcgaccgcaggcgacagcgatgattcttagattttttgtttaagtcgatttgttgtggatgaatttgttgttgatgatttttttaatgaatttatgatgattttgttgtggatgatttgagtatgatatgtgaatttgtggatgaatttgctaacagtagtatattggatgatttgtgaatttgtggagcaacttgacgtggggaatgcaaacatcaaaaaacaatgaaaaaaaagaaaaccatgactaaagatgtagcagcgtcatgtggcgccatctttaatcctagattcgaggtttcggtttgcaacccgaaactaaagggattgtaaatcaggactaaaagatgctttctccagcactgtttgttggcggactgagaggtgaaaaaggagatgtttcaaatgttcctctgtctgtggcggtcgtacatcgcctgcggggtgagggtcatcaggtcaggctcatctcgttgtcgagttaatcttgtagttttctctcttttcccttttccttgtgcaactcgaagtggtggtcagtgtacatcatcttcgtcttggtggcgaccggccatcaccggagcagctagaggtttctctggcttccatcgagcggctgaagctaagcttagtgattctaagtggttattcatcgtaaaatttagtgattctaagtggttatttacgtgtaaactactaaactgtcaagcatagaaatatgtatatgataagcttccttcagacatgataaatggattatgttggattaatccaagaaaagcatgtactgcattactacatcatacctgctttaggatttctcctttttaacgaattaaagtgccgaggtcttcaagtacgtaatcactattttgtgcccgtattgctattggaatactggatcaccatatatatgcaagccacgtatgagacgtcaattctgatcagagctttcactttaccaagttcgtcaatgcatattattttgtattagtactagctttcagagtatatcaagtggagtctacaaaagcatgcgaccgattaaatgtggagctaaggcaaataggatgccgacctggctccttttacgcttttaatcattagattacgagaagtttatgtaaagcgttaagcgattttgcgccgctctgcttcccaacttcccctgctttacccagcaaattaatatactccccctgctttagccagcaaaatatgagtacacgacggcttttgcaagcaagattacgtgctaattgcatgtagtgtaagctcagatcaatgtggtggttaatccttaatccatttccaagttgaggtcagccgacacatgactgtgtgtttagttcacgtcaaaattaaaggtttggttaaaatttaaacgatgtgatggaaaagttgaaaatttatgtatataagaaagttttgatgcgatagaaaagttgaaagtttgaagaaattttaaaactaaacacggcctgatgtggatgtctcgttcagacaatctaatcttgtttttgatagcactctggcagcacagagctttcatttacttgccctggccctacagttgcttatattgttcgcaacatgccacatcgacttgcacacgctttgacacttgtcaccattggtaactcaataactattttactctacaacctcagggtctgttcactttgatgctattttcaaccatactattttttaataaagttgtaaaaagaatctacatttagtttgttaccaaatttggttaatgcataaaaaaaattctgccaaaattttagcaatattgctatgttgctaaaattttagtattgccaaaacttgataaggtttattttggctataatctgattagacccgaatgtctcagcagccatgactacagctctcatggaattgcaaggaccagatagtagcagcagcatgtacatgttctgaaacagtttgcttgtgaacaaaatgaaacagttctgaaacttcccctgcgccagaaacagaaagcaagtggtagacataacgagtcactcaggcacagtttgaccatagagggacgacacatctgaccattttccatccatgacacacacctgaaccacttactgtcaccagcgagtagtggcacgaacacaaaaagacctatcccaacagtgcatctccacaatattgctcgaccgatcgatcattccgtggacttcaacggaatggaggaccggatcgagtcagttgatgcgcggatcaaatcaaagcgcaacgcaaggaggcgcaccgaggattaattgaatcgatcacaattcacatgtacgtgcgttcttttgatggtccaagatgttccttaaccgtgtaacactggtatgcccccaaaaagcgctcgagccattaaggtacagccagcccagctcctgggggccccctctctcatagttagtggaagcttcactaagtacgcgacacatttatatatgtagatggagcatataagtgcgtacatatgtgtgccttgatcgatctgttgttatatactattaggagtattggcgttgttgtagcccccagctgttagctcgaggtgaccagtctatctgtcgttgtttatcgatccagcccggggtgcccgggctccattatggattgttcattgttgttgcggttgcatatacagatgcagtgcagggccctggcacgcggtccccttgcccggtgttgagctgctgctttagccgcgcgctagctcatctcgatcatatctaggagtatcatgcaaaggccttcgcgtcgcgcggttgattgggtcgggtcgcgtcccccacgcaacgcatctaagctaagccaagctcgctggccggccaccaaaaggagggcatcatttgtttggctcgtgccaaagctgcccgcccctggcccggccggccgcgcccgggtcatgatgagaaaattgcaatagtaggactgtaaatatgagggtttcactgttttgacattctgagtggatgacaaataggtccatctgtgtagaaatatggatccagtgttattataacaaatgttaatgtttgcagtgttataattgcaaatccccacatgcggccagcgcgatcgatcgattcgcccgtttattctagtagccgcgcgcgccgacgccgacacgctcgtttcgcgaggacgacgaggagggcagcatgtaccagtgccacggcgcgccgccggccgcacgccgccattgaccagcacgtacgcccgcgacggacgacgtgggcgcgttcgcgattcgcggagaggtgcccggccgcccgttttcgcgggagaaaagggggggctagcatgcgccactacttgtgccggtgtttgtaccgcgttttaattagcgaaggaccatgcttttaatttgccgtgcaacggattaatttagtcgaccaaccgaacgcccatatgcacaccaggaccgttcgatcgcgtgcgtgtatactggatgcgatcctgagcactgttccattggcacggtatagtgcacggtccagtccgatccgatccaggccagggcagagggatcgggctgtactccagcagctaaacacgggcactgtggcagtagggtttggcaggggcagagctgactcgtaaggctggggcagcgatgttacggctctcgacccccaccttttcatcctgtcgccgaaaccctcggcacggcggccagctgcgcggtggccggccggccggccctccggccagcgcgttgtgtttatgtgtgcgctctcgagcgtagcttcgcctacggctttagcccacagctttgtattctaggatgtcgatgcatctcgaacatgttgtctgaatctctgatgaacagatgcagcactaacatcgcctacctgatcgatttcagtagcctagctagtattgccgaaagatcgattcttgcgattcccaaaaacgcatacacctctatctttctgctactactagtagctctaatctccaggaaagcacggattttttttttacaggtttatattacttcctatgcatccaacgaacttcgatgggattggatttggaaggctaatgtttgggaaagtaaatcattcaggcgccacaaagtgaggatctttcgattcttttcaataacatttggatacatttatttatatatgggtgtggcgaggcctatgacaacgaaagcaacaactggagtcggcactatggtggtacttgtgcagttgtgcgcccatgcatatgattcactactactccattcatcatttctcgaaaaaagctaaactgcgtattgattttttttcccaaaagggagagggagacccaccagagaaaaaagattcagattatattactcaaagccaaaaaaaaactacctccatttaatttttttaatgttggttagcttaaaattaagagcaaagtgtacggacggtgcttaaacttgtaggggtgtgtcatctaggtccttaaactcttaagatgcatatccaagtcccagaacttgtcatagtgtgttatttaggtcccaaatcgccacaacctcttcaagatcctacatggtattgatgtggcatgccacgtggacatgacgtggcattaatttgactgacaaatggaacccatttattttttttcctttttctttttttcttctctttctccccgtgattcttctttctctgtgacccaagcagaagaaaggaaaaaaacaagaatgagaagaaaacgaaaaagaaaaggaaaaataaaagaagaaaaaaaaaagaaaaggacacgtcacgtccatgtggcatgccacatcatcgccacgtaggatcctaaagtggatgtgtcgatttgggacctagatgatacacttcgataagttctgggacccggatatgcaatttgagagtttagggacctatatgacacaaccttacaggattaaggaccgccaatgcactttactctaaaattaaagggtaatttggaaccatgccattataattttgtaaagtttgagatatgtcattggtaaccaatgtcaaatacttggaaaataaggtatttgactggattgaattatatgtccatgttttgagacggcatttcttgcttttatcgagccatggatgcttggattctgaatttgttgagatccagctgaggctgtgtttagttccacgtaaaaattaaaagtttaaagaaattggaacgatatgacggaaaagttaaaagtttgtgtgtgttgaaaagtttgatgtgatagaaaagttaaaagtttgaaaaaaaatgttggaatctaaacaggacctgacagtggtaacagagaagaaatgccccaaaaggaaaggttcaaaaattactgatgaaaacgaatgcgcaacagaaagcttagcacacatgctcgacgatattgcgcaggcgctactattactgggagcataatcaacaaaataattggcattgattagacataaatacgcatgcataattatttcatatatatgctcgtggtagtcgttccatccactcgtgcaattgcgatgtggacgtaaggtggatatattatcaatcaagattttaatttgctatcgctgtatgataccagatggcatgcagatggggctacataaacacacggccggatttgcagacgtggtgaacatgccaccatctgtatgtatacattacaccatgaagaaaaggtcatattatacatggaccatctaagaataatgagtttcaaaaaacaatatagaaaatcaagaaaacaaaatgtctattcctcatgtgccagggaatctggtattaattaggccacaattatgaatgatctctaggggcttgatgaagtggccgtgtgatgcaccacaaatttcgtgaagggaagggaacagagtgagctgcacagatggtaagtaaacaacgtgatgtggcgtacatgtacgcaggggacagctgcgatggcatgggtctccgagctacctacacgagtagtaacacggtacagatacaaacacgcacgcacgcacagctgcacaggcacactgcacagtatggttgatactacgcgcggtgtgcggtgtatattgccttgcctggtcgatctcttgggttggttgtcgcagcagaggagatgtcgatgaagaagaggaagatatgctatgattcggcagcatgcagcgtgcgtacgtataggtacaggacgtactgggtgtgtcaacggcagcggggcagcggggcaggagggattgggcagcagattggtgactgatgataaataacgcggcggcagggtggagtggcgagccctgcgcgctgccgcacggcgcgggcacagggacaaaagcgcgtacagtggcgcgcgctgctctcggattgtctcggagatggcaagggccaagggagggaaggatcggagtgtgccggtgtggtgtgtgcgggtgtacttcggaggtcattgccgcgtgggcccaaagacgccggtcacgggaccacgcgtgtcatgtgcgtccgaccgaaggagtactggatttcttggagtacgcgtacatgctcggaccgagatgtgcaacgtgctactccttcggttaataatacttgtcgttttagataaggacacgatctgaaaaaacaaatttaaccattattttttattataatatatataaaagtgttaacaaatactctctccgtacttgtataagaaatcgttttgaacaacgatatggtttccaaaacacaactttaacttattgtttctataatatttaaatgatatatgtatacttttatgaaagtattttttaatacaaatctatttatataatttttatattttcaaacttaataacttaagagttatttatgatttatattctcaaggtttgacttaaacattatcataattgactttctttacgagtacggagggagtatatgattttattgaaatacgttttaagactattctatacatgtagtaaccatatttgaaagataaatattttaaaaatgcttcataatcaaagattttaaagtttaactttactcttgtctaaaacgacaagtattatcagcctggaggggtattatcagcccgaagggagtagtagagtgcgtagctagtcacgccccgtgctgctgctcttcttttagcgtgtgagaggagtatgtttgtagggtgatttcacggttattcaaaacgtattaggatgtatcacattttttatataaaatttggtacttgtcaatatcttcaatgttagcaggtacggaaatttatttattgaaatatctcaagaataataaaatttctcatgtgtgtaaacggaatgcacgctgaggtctttgtgattttctttatttcgatttgcaacgaagatgtagggtgcatgatcgaacataaaatgcaataacgagctttgacacaaaacactcaggccccatgtagttcccacgcaaaaacttttcaccatatcatatcaaatatttggacacatgtatagagtattaaatatagaaaaaaactaattacacaaattacgtgtaaattacgagacgaatattttaagcctaattgcatcatcatttgataatgtggtgctaccataaacatttgctaatgacggattaattatgcttaaaaaaataatctcgcagttttcaggtgaaatctataatttgtttcgttattagactacgtttaatacttcaaatgtgtgtccgtatatccgatgtgatacgctaaaacttttcaccgctgaaataaacagaacctcaattagatcgagtttgagggaaattcatgaatctctgatagatattgtctcgaagtgatcgaattagtggttccctgcttttcaataccactggacttaaaataaaaaaccaatcttcaggtacgttattcagatgcatggaaaaaaatatatgctatgttcgttcctcagggttcccaactccacacactcattttccacgcgtacgcttttcaaactactaaacaatgtgtttttttaaaaagtttctatacgaaagttgcttaaaaaaatcatattaatctttttttaaaaaaatagctaatatttaattaatcacgcgttaatgcgaacatcgttttacgtgccgagaggaggggttgggagagcttaatacatatcaaaatggaggtagtatttatattggaacagacaacataaataggttctcatcgataggatatcaactagccgtgtagtagtaatctgatgagtgatgacctagccatatataggctgtgttttgtgtttagtttccttcaaatttccaaaaatttcgtcatatcaaatatttgacatatgcattgagcattaaatgtggaca

SEQ ID NO: 223 - DNA, 3313 bp, Oryza sativa
acggtacttagatctactcatttccacgcgaggtatgcatttttttaagcttttagaccttaatttgtgatgcatttatgcatccaaaattttgaaggaagagagcaccatgtttttaaattttatttcgtgccatatgagaaagaacccgccgccggcccccctattttttcgtacggttccacttacggaccgcatggaaacaaaaggaggcggtgtccaaaaaaaatctatcgtgtagtagtgcctccttcttcctccacccaaccatctctcctaccccacgtcctgctcggcctcaccccgccctcgctgttgtgtcggtggtgccttaggggccgcagggcgtattcgcctccaccttaaagtgaggcccactatatttttttaattttttaacttagtactcattgatatgtgggtcccttttttatatgtcgcgtaaacgtcacgtcagctaaaacagttatcgatgcagtcttagaacaaattttacactagtttagaagttgaaagacacattatatctactatttcgatttagggactaacttataacttattattccattaatttgcatataaaattcggcttcgtccctcccggtcccggcccacaagagcacgtttaatacctgccccacctctcctccggcgaccgatcggtctgttttccttccccggatttgttcgacgcgcagccgtggcacgcacgtgtacatacgctcgcttcccacggacgtcgcggacccaatcggtcggcggtgcactggtgcagccgtgcaggcaaagataacgcgctgctgagcgcacacactcgacacaccgtcgtttcatcggtgacagtgctgcatacgagtacgacgctcccctgcctcgtaccgtcgagaacacgaaaatgatacgatggcgcgcttgtcgatctccgacccgtcttgcgcgctgggcacgttgatagatctcgcctgggtgacttctcagttgtcaacaacagctagttagcctaccactgcattcttcaggtgtactactggcaactacttcctccgttgttcatctgaggcctctcatattgcaagctatggggcccatacccctagctcaaaaagttggcctaaagacacccaccccacagtacaagcattcatatatgtgtggcttaattggatggagacacttatgaaggaaacgaagttcacagttggcgtgaccccaggcttttggacacggtagcggagcaaaatttattcctcacataccccactctccaacccagcacgcaacggacgcctcgaccgcttcgctctctccaacccctcatggcggcgggaccgtccccggcggcggtggctggcgtggcggcgggaggcgtcctcggcgggagtggctggcgcggcgacggcgggaggcgtcccaggcggcacgacctcgcccctcgcatcttcatggctgatgccgctcacccgccgcgtcaccggagtccgccgcttgcccgccgtgctgatgccgcttcaccgcgtcgcagctgcagcggctcggcgtcggcggagccacaggcgcctgtggaggagccgcacggcaccggccgccgcggcgagcgcggctgtcgccgccaccgccgctaggaggaggagcgggtgggccgggccggcagcgccggcggcgcggaggaggtgcgcgtgcagatgcaagtgcaggtgcaggtgcgaaatttcttggacaaggagaaatttccgcttcttttctcaactttcatctttgtgtgcatatactagttcggattgtttctcggagaaggagaaatttcttgtctaggtgagttgggatttgatctttgggactgaatgaaattggtatcttgtttgggattttgttttgttttgattgagtcgtggccaatgacgacgacgacgatgccggcagcagcaagaacgtcggcgccgggtggatttttggagggcgaatccgggatttctccgagcgtctacggcgcgaggacacgctgcgtcgaagaaccgaagcccacagcgcaggcgacgccggttttcctggccgcgcatggactcgtcaaagcgtggtaccgcgtcactatgtttgggggcgaggggccaagcttggtcgccattcctggctccacctaagcgaaatcctccgtggcgcaggtaaggcacgagccagctcaccgcactgtaagaggcctaacaaatttatctctaggccctgtttagatctcaccctaaaacttttcacctcgtcacatcgaacgtttgaacacatgtatgaagtattaaatataggctaaaaaataactaattacacagattgcgattaatttgcgagacgaatcttttaagcctaattgctccatgatttgacaatgtagtgctacactaaacatttgctaatgatggattaattaggtttaataaattcgtctcgcggtttactgacagattctgtaattagtttttttattaatgcctgaacaccctataaaacaccctatataatattcgaagtaacccgccaaaactttacacttctcgatctagacacccctagctcattttatttgtcccaaataaattattcttagagcaactattgtatcggactttgtgaaagtaaaaaataattatattgagagtggataaaataaagaataattgtattagagatttaataaaatagaggtatgctattggtatgtatgggatggtgaaagaaaaaacttatttttggacgggatagtagcctactagctttgccctgctttctgcattgcacatttgcgcattctatgtaacgctaactactagcttgtggagggtattgtggctttgtgggatatagtagcaacatgccaagttgccaacatgcgagagccaaggacgacagtaagtcaaccatgaattaacaacttattactgtagatgttgtgtgctgatgaggatgaggggtctccgtcttatatatatgatcatgtttcagggcttcaggtttaggtagggattgcccgttttcacggcggaagtttcacatgatatctgtatttctgcataatctaattcgatgggatatgccatctttgggtcaggagacgtttttaccatctgtaatatattttatcagagatatcttggcactataatctattttgagtaaagtgtattggtggtccttaaacttatagggttatgtcatataggtccataaactcttaaaatggatatctaggctccataacttgtcaaagtgtatcatctaggtcctaaatcgacacatcccctctaggatcctacgtggcgctgat

SEQ ID NO: 224 - DNA, 16377 bp, Oryza sativa
tgatacaaaatgtccaccgtgtctgtaagtctgaacatcgttttagagttattcacactgaaagtgagctatactattgtgtacttgctacattcacggtgaattcttgtttatcatgcctgaaaaaacgtcagccatcgatatttctctgctcgtttctgcttataacatacaaatgggcgaaccaatggatgtgcaagtaccccgatctcctgaaacggtgcgaacttttaaaaacacttactatactaaatttcttggaatattacattaaatttactttttaaaaacttatactccctcgaaaaaaaagcagcaaaagacaaattaacatagacgagaaaaaatgatatatacgcttctcattaaataacagcttgtttggttggagggagtttgagagtgggaatgggagtttaggagattgagcattttaatctctagtttggtcagagggcttgggaatttcagagggactgggatggggaattaatctatctaactcccactgatcccatccctgggggaccctgttaattcacgagacttgatgggaatcaactgtaatctctaatataaaccaaacaaggcatagggaataaaaatccaactcccatgactaatcccactttaaactccctcctctaactcccattccccttccctgctcttaccaaacaggcagtaaggaatgattaaattgagtaaattctatgtgtatccctaaaaactcactcaatccctttcatacttgataaaacctgagttccactcgacactcaaggctgttgttggcccgatctttcggtgagttgaagataactacgatttgggagaaatgttgacgacccgactacaactatactagacgttgttgtgttgcgccttagcgatcgatacacctctccgttgattgttgatcttgccggtgcagatgaaccttattcctgcaagcaaattgaagaaacaagtaagaacaagataaaagcaatctgatattgcagataggaattgaatacaaatgataagttgggattccgtaacgagtaaaccggcgatctaaccgatcacgggattgcacggcaaagtagtaaagctaaactttaatctaaacaaaacacaagaaaccctgaaggggtaccaagctatttatggagatgggaggatcctaagtcatcctccacctggtttggggcgcaccccacatgggccccacttgggctggggtcccagacgaagttacaagcccataggcccattacaggtgacgtagcaccttgttccatcaattgcgcatgactgagaaggaatttggcagtgaggttggatctgttggaatgacgactccgaatgctttccatcaagtactcacggacccaaaacggagctcgtatgcacatttggcggccatttgaattcatcacagtagcaggtggccgaattggattccagaatttggacggcctgatcttgaagtgttcttcttgatccatgatgtgagcaactgttgtatccatggtagccatggtcacatcatcctcccattcttcacggaaaaccgtcctcggtttttctatatggtgctcttcacatagtccattcaaaataacctgtttcatccaatcaaaactagagaaactcgaaatagtgtgattagcaacaacatgtttctctaaatacgaacaaatgaaaactctatgcaccaaatatattcctctatcattatattcgccaaagatatgaaaaatagcattagctggacatggcaaatcagatttagcaaataatttctcctccaaattatcgagctcacaaaaatcatcaaactgaacatagcccaaagtatttaaagaagttatcaatttgcattcctcaacatcattagcaatgtgaacaacatgcttaaaatcagcacacaatgaaacactagaaatagcattctcattcactagttgtggcatggatataagtgaagtattattacacaactcttctttatcacaaggaacaataattaaatcaacttgtgacaaaggcatctcagcaattggttccactaatggttgctctagtatagcatgaaaagtggaaatgtgtagctcaccttgagtatactcaccttcatttgtctcagcaccatttaatttaccttgcaaactattttcagatatcgcgggtgcttcatgcttctcccttttcttctcaatgacatcattatactccgtttgttgaatgttctgaactccctgcaaaacgttagcaacaggagacacaaaagattgctcctcgtttgtttgcgcatcatcattgtacaaggatataggagattcaaaaacatgagataaatcacattgttcatgctttctcgcatttgacatgatcttactgtcaatgctgcgagcaagcatgaataggtgcccaatataattatatgtcacattagcaagcataacctgaattttagaattaagcccattgaaaaatctacgtattgtgttttcattgcactcttttagaccattgtagatgatacaaactttaaattcatgaatatactccctaacagttctatcatcttatttcagatgttctaatttctcccgaagagtacatttgtaataagaactcacaaagcgttttctcatcatggttttgcattcatcccaagtttcaggtttattactaacaaaactctaccaaaagagagcagaagaggtaaacttattactagcagccttaatcatttgagcatcagaaaaatcatgtatatcaaattcattgtctactgctagctcccaatcaatataagcaacagaatcatacttcccatcatagaatggtaacttagattcaacttgtgcaaaattatagtcatgtacctcatatgcattgcgtggagaagttgtcatatcttgtcgacggtgaagaagccgatgttctcatattcccatgtgcaatcctgcatggttagtagaaaacaagaaacatacacaagaatatgcacgctcctatcaactactaggtagtggaagctctaatatcacacacactcaagctttttaccaagctcttacaagttcttaccgaagcaagcggaatggtgacgtacaccgactcaaccaagcatcccaatggagtttgaatgtatcaatgccttggcaaacacttgctgtacggttgcaatcaaatctgtggagctctgggtaggcttaaatatgtagcaaaggaatagcaaatgctcaaatcagagattacaaagttgaatgatcgttcaaagtcaagtaccgtgctggtcctaaactagaacatattagagacggtgctagtcctaggttagaacgtattagagacacgagcctagacacaaacgatacaataagataacaccagaaacaactcaagcacactctgatatatgaaaccaaactcaaagatacaactgatattttctctctttgccttctttctttcactttcttttttctttctttcctttattttttcttggtacggcttttttctctcttcttttttacgcacctttctgccttttttttcttttctatttttttaacaaaaaccgactcaaggacctcaatgtaagattacatggactcaaatgtaaataaaaaattacagggattgaagtgtaaaagtctgaacccaaaaattgaaattatacaaaaacggaatattgaatttataccggttccgtttttccaaacagatctcgaaaccgacacaaaacaaatttttaccaaggtgttacagaagtgggagcgggacgtgactacaagcagaaatcggactcggccacaaagggcgacaacaggaaggatgcggcaggcgtccggatttggtgagagaaacggccacaaagggcgacaacaggaaggatgcggcaggcgtccggatttggtgagagaaaaaaaaaagaaactgattttcaatcaatctgatctatttctttccagattaaactctcatacttccaaaaacagatttggaaattttttttctcctcactcgcgcacaacaggacaacaagagcacgggaaccatacaaccgaaaccctagatgcaaccccacaactccaaaaatgaccgaccacaactccaaaaatgaccgacagaaacttctgaaaactagaaaaatagaaccgtggcagcgagccaattccatttccgtaggtcccaaagacaacaagaacacgacggcggcgataacagtggtactagacgtgacaagaactcgaaactctaaccgtactacacactaagactagcagcatgactcgacaatgcaacataaaactcaacaacgcaaaaactgaaaagaacaatgtaatagcataatatggctaggtaaatgatacaattttttttgtctagctattttctagttatgggtagaaaaaaaactcaccgagcaacgaaagctctgataccacctgatgaaccctgaattccactcgacactcaaggctgttgttggcccgatctttcggtgagttgaagataactatgatttgggagaaacgttgacgactcgactacaaccgtactagacgttgttgtgttgcgccttagcgatcgatacacctctccgttggttgttgatcttgccggtgtagatcaaccttattcctgcaagcaaattgaagaaacaagcaagaagaagataaaagcaatctgatattgcagataggaattgaatacaaatgataagttggggttccgtaacgagtaaaccggcgatctaaccgatcacgggattacatggcaaagtagtaaagctaaactttaatctaaacaaaacccaagaaaccttgaaggggtaccaagctatttatggagatgggaggatcctaggtcatcctccacctggtttggggtgcaccccacatgggccccacttgggccggtgtcccagacgaagttacaagcccataggcccattacaggtgatgtagcaccttgctccatcaattgcgcatgactgagaaggaatctggcaatgaggttggatccgttggaatgacgacttcgagagctttccatcaagtactcacagacccaaaacagagctcgtatgcacatttggcggccatttgaattcagcacagtagcaggtgcccgaattggatttcagaatttggacggcctgatcttgaagtgttcttcttgattaatgatgtgagcaacggttatatccatggtcgccatggtcacatcaataaccctaaaatttactcgatcctttctatacccctaaaattttaacttgatccctttcatgcccctaccgttacattttccttcattccactattatgtttgtttgcaaatgtatttttttacccttgatgctttaggtttgaatataagcgtgaaaaacgattgaaaattttatttgagtgcacagtacgtgcattttatgaaactaatgagactaaataattagtgcagaaaattttgacataaattttaaaaataacacaaatgtaataaattaaagtttttatttgaaattttaattggacaatggattttttttgtcaggagcattcataaaaaaaatatattgtgagcattggtcgttctatctttataggaatgctcctcttttttatgacttttttaaaaaaataaatacatattttttatttcattatctaaaaataaattttttgataaataatgcatagcacaacaaactcataactataatagtctcatgcgacaaacttttacatttttaataatataattaataatttctatgttcatccaaatggtaaaataatcatttttatagaaattagactgtcaactaacggtcaactgacggcaggggcatggaagggatcaaaatcaaattttggggtatacaatgaaataagcaaaattcaggggccttgataggattagcttaaaattcaggggtatacaagagattttctcaaagaaatttgtatgagaaatgatttgaggggaagtagtactcatatataattttattctgataaactttaaatgctagaagtgttctttttcataactgtttcttcaaaatatatatacatttaaagtttaaagtcctttaaatgatacgaaaactttaaatgaaaggttagttggaaagcaagtattatatgatgcaggtggtctatcgaactcctaaggtcccacctgcatgcacacacatcccaagttcttaatattttgaactctgtcgaatgtttgtctaataactgttgtttaatagagtactaaatttacgatttcagaccatcaacacatttttataaattgtcattaaatttgtattatttccaaaaaaaatccattgttgatggcactctttttttgcagagaccagataagcagtaattgggtggtggtccgagaccatacagcggcggtgctgcctgttttcatggaagttcgtcagacatttcgcaactgcagaggaggtagagttactagctagagcgccgagaggggctggcactaaagcgcggaatggattcataaaccatgtattctggagtcggattgtattttcgcggtgactcaattgcaagatataaaagaggataatgatggccttcaggcgaccgggcgggggaggaaaaatcggtcgctccccccgcccccgcccccgcacacacgctggtgtcgctggccctatcacattacctacaatacatgcccccacctgcaacaaatcaaccacatattttaaaaatcatctattaaggaaatttggtttatttcttgttccaccaagaatgtttcacgaatgtttcacctagtgtactcacaatgtttcactatatatggatctaattaatatgttgcacccttttgtcgtaaaaaaattgcaactttatcttgctttgtttattattttcagcttgttaatccatatatggactattatgcatgtaattatattttcttgctcgtaagaattttcaacaaaacatatttttttagttttatgttagaacattattttctttaaaaaaatagatgtgtgaattgttaatattgatctagtgttgaaaaagtgattcataaatgtaagaaaaaaaacgctcaactaaccaattagatggccccacactatattaaaattcatgtggcgtcgcattcacaaggtaggagtaacaaatatggcgtaaacatattaattagatgataaaacataaaatataactaattttttttaattttttcataaaatttttaaaaaagacggacagtcaaacgttggacatgataacacggatatatttattttgagatggagatagtgatagagatgtgtacacacttcactaggaacctcgtaagtatatctcaaatcaaaccagacacgaatatattggaaacatggccaccagatttaattaccagagatattaaaatatactccctccgtcccataatataaaggattttgagtttttgcttgcaacgtttgaccactagtcttattcaaatttttttgaaattattatttattttatttgtgacttcctttattatctatagtattttaagcataacttttcgttttttatatataaaaaaattgaataagacgagtggtcaaacgttgcaatcaaaaactcaaaatctcttatatctcttatattgtgtaacagagggaatagtaaattacatcaaaaccaaagtacgatcgcggtcggtggggtcgtttttttctttttttgtaagactataatcaacggggtcaatttggagtaaacccagcaccgctgacaatgaggcttcaatacagaataagcaacgaggtgcaactgaaacaagaatatctggaaccggatgcatacggcgcatctggtgtacatcgttcacgtggtaaactggtaccggtgtcttgtttatttgatcggtatctttatattcgtgttcgtggtgattggtaagtggtaacacctcctatcgtaaataagatttttttttgcaactaaaaagatcatcaaggcactattaattactacccgtatcccataataattgtatttctaagatttaaacttgtcctaaaataattatcatagtagagtactaattgtcccatcaatcacttctcatttaaatttcttccaattctaccctttatcactcttacaatcttacctatacaccatttaataagggggcaccataatctttcttctcaaaccttaatacatgctaaacaatttagaattacaattatattggaactaagctcgtaattattaatcattacatacaaaatgagcggaaaaagatatgtgtattagacacattttctttcccagggatatttattactacaaagttcactaaatgtgaaatgttaaatgattctaatttaaagccaacaaaatgtagaaaattataacatttgtaaaccattttgaagaaaagattaactacattgttttttaaagataaataaaaaaatatttcaagaaaaaataatataaaagtttaaacacattaattaagcattctaactactaaatttctgaccaaagggagtatccgttattacaaagctcacgacttagtaattaacaagtttctaatcaaaaggggatatcaattatggctacatcgaatatgtaggattttcaaaacacaagggtagagaaaaaaaaaagtaggattcgagtgccttgatatctttaatcctatatatatatatatatatatatatatatatatatatatatatatatatatatatatatatatatatatatatatatatatatacataagaaaaaacatagaaaaattacataaaataatatttgggttgaacacacgaaaaatatatgaatcagaagatagatatatataaagagttttttttataagaggttgaaccttatatatattgaaaattctccaaaatttgtatgatttaagataactgaagaaatttcaacgaaatatggtagcagttaaaataaaatattttatatactgtacagtcaattattctatattaaggtcctacaacatattaatattttatatcaaactgtagctctccttagtccgatgctcaagaatctctagaaagttgtttaatacagtcacttggaatcaccaccaaattaattgtgtttagattccttcacgtgcggccttccacttgtggaggttccttctaacaggtttcccaatttggttatgccatatttgtcgatactccctccgttccaaaatataataaattaaaattagatgagatattttctaatacaatatatctggatagattttctatccagatacattatactaggaaacatctcatccaatcctagattcttgtaatttaggacggaggtagtagaaaattagagtgaaaaccccggtcaaaaaaattagagtgaaaacttatgatttttataccgtcagatgcactttgagattcgtgatgggaaacttgtcacgcgaggagacgaggaagcgaactggtgatgacacaaccacatctgtagccaacggaatatttaactatttatcattcttaaatatggccttaagcatttgctatctgaacatattagggacaaatggttaaatgtcatatctaaaattagcaaatagttaaatgttccatagccaatggtaccacgtgttctttttttaatagtatacattactgttgtaattataatataattatattacaatttacgtttaaaagttttctaaaaaaatggaatgttgtactgctagtcccctcccaaatatgccacaattgaaccaaattttcctaactgcttatttcatcaatttaaactcttaattgttggcttcatcgacttttgatgataaacatgttaggctattccaacccaagacactagacatagtatccataaacctcacatcatcaagaaactagtactagacactactcttccaatgcaaacaccactattccatacttaattaaatttaatgctacttatctcacatgatgtcttggatattgtgtagaaaccatgtctcatgcaagatatggtttctttctctttacttatttattcacttgctacatcattttttatcttaggtggcagcttatttaatattatggacgccatcctagtcattgggttggaaatatgttagtgatatgctctagaggcaatcatagagatgattatatcacatactatgtttacatatttatccgacattgttccttaaaatagattactcattattggttaatgaatatgtgattctttcatgagactctttatattatgtgttgctatttctaaaggatccctgatcaaatatcatatgtggaacaaatatgtttagatgatcagcacatgtattaattgatgatcatgtctcatagatcatggtatagagataccaaattaataatgtggacacaagttggtgaatatgttgttggatagacccaacatgagacactgcaagagccatatgtgttgtgtcatcagtgatctcatttagtgttggtgttgaatccttagacctgagattatcatggttctcaacatgtgtagtagcttacttagggactgttaaacgctactctgtaattgggtagttataaaaagtagttttcgggtatgctatgaaacatgtagtgggatatgaataatcaagatgagatctgcccctcctatggagagatatctctgggcctctcgatgttgtagattatggaagtgcatggccatgccaaaggtgattgagcagtcaatcacaagttatataatctattaacaggttcgagtgaatgattgagctattagaggatggcacatatctagccttgagcttaatcgatatcgtgaggcaatggggttcatacaagtatacactagaggttcagccgatatgatctttatatatgcccggtgggtcaatacgttctgctaggggccgctgttgacgcgtggaccgaaaaggagttctcgggttacagccgagtatacatgaacctccagggtcgcacgcttaatgggccggaataaggggattggatggagatccaatatgagcttaattcggatagggatccgaatatgagtcctacgggccttggaggcccgagtgatggattttatatattcgtgaggggtgtgaccggcggatataattgcatcacgtgagaaaccctagccgtcacttccctccccaagcaaaaccctagccgcgcgcgggtgctagcacatctgcacgtggccttcccttccctatacgtgtggataccggtagaggcgccgctggtttgcggtgctgatcggcgtgggagtacggcgaggagaacgtacgaggaggagaaggtcgagccggtgcgatcgactacttcctctacatcgacgcacgctacttcgcgagagttccttcgacttctcagcgtcttcttccgctgcgcagcacgtcaagtggtaacgatctatgatctaatacttgcatggttcctggtttacgcgataaaaaattttgatttattctatcgtagcctacgcgtatcccaacaaaatggtcttaagagattttcaaagatagagcccatcattttagtcccatcatttcaaagatatcgcactggtggtcaccagggagagagggggagaccgagagcaagaggggagatggaaagcactagctggtgatttttattcccatcggctccgctatagcttgatgaatgagctcggcttggctgctattttgtaccggtttacctaaacaaccggctgtggtgatatgacattatgttactgttagttcatttaaaaaattaggtactaattaatgaccttatatcaagtttttatatcctcgtggcatgcaggggtgtaaagtccctgtcattaccagtttttacctaacatacatcattgggacaatactaacaacgtattatgtagtagtcgtgttatttttatattatttgtatataggccacttgctattgagattcactgtgacagcagatttttttttaacgaactgtgtacgtgttatttttctatggaccacttgcgctataggttcagtgtaacagcaaacattagtctttttcttttctccaagcaagctggctacaatgcagccttcaagatctatataattgtcgatcagtaacaacgtccagagtgcagcgcaaatagttactacctattatggtgaagttcactgcacgccggggcaaatctgagctagtggcaccagcgagggccacaccaaatgagcgaaagtatctctccgatattgacaaccaacactctctacggttctatgctaccgccgttgagttcttccagctatgcactttcgatggctacaagccacacgatccggtgaaagcaatcaggtccgcgcttgcagaggccttggtacactactaccccatagccggtcggctgagagaacttccacaaggtaagctggtagtagactgcacggtagaaggggtggttttcgtggaggcgtatgcagacgtgcggctagaggagctcggcaagccgcttttgctgccctacccgtgtgtagaggagttcttatgtgaccccggcgatactaaagtggtggtcggcaaaccattgttgtttctgcaggtactatatatatatatatatatatatcactcattttatttcctttcccttcaaattttcaatgtggtttacaactttcagaattagagacatatataatttttagattttcaagtatttgttaataggcatctctaggttatagttatagtaacccaagatttgaaaacattgggcatgcagtttgttttatatgcctactatatatactatatattttatatggcttttggtttctagtcttgtcatatttttcattgataacattttatagcctgattttattggtagatgtgatagataacatgcataatgctagaatctttatgcaataatttagaaaaatcatttgtgttcctagccgctattgtgttaatggaatttgtttgggtgtgtacgtgccatgtaggtgacacgactaaaatgtggaggatttgtaattggccttcatatgtgccataacataagtgatggctttggaatggctcatttcatcaaagctgtgggtgacatcgcacgtggcgaagcactactgaccatatctcctttatggaacagagagatgctaactatgtgttacccaccccaaatcacgcacacacatttagcatacgagccacttcgtgatggtgatcctaccaatgatataatgcaatccactacgcctgacaccatggtaggccaatactttctctttgggccaagagagatatctgctatgagaaaccatgttcctgtacaccttaggcagtcatatactacgttcgaattaatagctgcggcggtatggaaatgccgcaccgctgcattgggttattctctcgaccaacatgtgcgtctcatgttcaccttaaactctcgtggcaactggaaacgcaacccaccaatcccacaaggttactacggttgttgtctcgtctttcctgttgcagaaacaacggtggctgacttgtgcggaaaccctctagggtatgcacttgaccttgttcgtaaggccaaattggaggtgacagatgaatacgttaaatcaactgtggactttctagcatcacgcaagtggccatctcttgttgttgatcgaacatacattgtatcagacataacatccgttggagatgacaaattagactttgggtgggggaagcgtatgggtggtggcataccaatggctggagacatcatgtccaggctaataagctattttaccaagtgcaagaatgctgatggtgaggactgtattgtagtgccaatgtacttgccaagcataaccatggatagattcgcagcagagatctctgtttggtcaatgaaacaaggaagtaaattcattgtcagcgcactttagatgcataaggcatgcgaggttgccaatggttataaaaaatagcaaataatgtttcatgctatttgaaatcaataataatgtcggtctttaatttatatgtatgggtacatcttgcatgatgtatgtaacacatgggtatgaatgtggagtcatgaataaaagaaattatccatcttctatcacacatgcagacctcatgttttcatattgcaaatgtggttgcccttatttgttgttcatgtatctataggagcaatataggtcaaaatacggccataccaaggcatcagcaatgtgaaaatataaggtgatattaaggcttactatggtcagtctcaaacatagagcatttaagggcacatatagtgtatataaaatctactccatccgttttatattataatatgttttgatttttttcctagttaaacttatttatgtttgattaagtttattgaaaaatctagcaacatctataacaccaaattagtttcgttaaatctagcattgaatatattttgatagtatgcttgttttgtgttagaaacatttctatattttctattaacttgatcaaacttaaagaagtttgacttaataaaaagtcaaaatgtcttacaatacgaaatagatagagtaggtctttaagcaataaaatattctttgtagattggacacaaacattatgagaatgggttaactcacaaacatatatctctaaaaaccagtaaattggtaggagaccgatctttaagccaaaaaaaaatacaatacttttcagcatactaggagtagtacgtacattatccaatagtaagtttcattttttcctaattgccgaacctaccttagtaccaatggaaggtattacggtatcaacaatgcatataaaaacagtccttatgatatcataaagtcatccatatatatcgtgagggtagtctatgtagaatacaattaggctagaactgcattctttatgggactgctatttagaaacaaaaaatttgctcaaagttcacatgtagtaacccatttagttaactcatttatttgtacccttggataattaacacgaaccattcatatattcagccattcaatcattcaacagaaaacaacacatgctaagagataaaatagatttttaaggctccttttggtatcatggtggattataataatcttgtttggtgcaatatgatatattaattatcaaactccgtacttcgacctatttgtaagcttccatttacatggaatttaaaaataagcacatcatagaatagcacaaccaaaaacttagccttaaaagaccttagttaacgaaacttctatgcctagtttacgattgaaattgttagaaaccttaatatctccaaataatggaaggaaacctcgacaaactatcacatgtttacccacattattctagttaaggtacaacatggaccgctctaagaaggggttaaggtacaacatgtaaccttgggatgaaatcatgtgcataaccaagtgtcactcaaatctttgtaacattgaaaggttgtgttgcttgcatggcctggccaatattgtggaaagatagactcctattgtcttttccaaagatcaacagaagaaatttagaaatctccaatgaataggaggacaagagcaataggctgctttgttggtttgttggggaagaagataaggccttagagaggacaaataggtaaagttggagtggactagactaccacttggtggtatggtgctctagatttcttattgttgcttttgcatcaaaagagtggttggaagtcctgtcaactcactactacaaaacaatttttcatagcacttcccttttattttttccaggcggactaaaaataatgccaccagtgaaaatcacatttattattaccgccagtgaaaaataatgccacatgtgcccattctctggtcctttggtggtatgtggtcatctatgtgaatttgattttgttacatacaagctatttcttgtaatgtgtcagttgatctatagttctgtactctcttcatcctaaaatttatctacctttatctgtaagctatactatggaaaggagggagtattgatttatggttgaattatcttctttagaaatagcatgcattggtgcggtagccaacagagcttaatgatgccagccatttagaggagacaacaatagcaagaggtcggtgaagggtgcccgacatatgtgtctatatatatatgtatatatgtatatatatgtatatatatatatatgtatatatatatatatatatgtatatatatatgtatatatatatatatatatatatatatatatatatatatatatatatatatatata

SEQ ID NO: 225 - DNA, 27113 bp, Oryza sativa
tttagacttgcccacaaacaaaaaaagaaaagagaaattgcttttgcaaaacgacggtggtgaaaatcgagttttaattcgaggagcacggttagaccgacattgtccagtcggttagaccggttgcctggcccggtcagaccgcaagtacagcggcggtcagaccggcctcggggcaattttgcgcgaaattcaaatcagacttttatgaagcgaaaaggtaatttttcagataagtctgattctgattttgtttgtgcatatgtacctcatggttttatcaagcaaaaatatgacaatgagaaaaaattaagaaaaaaagagctttcttctatacatatggtgttttcttgtgcatgctagcaatactttgaagggttatttgtctctagcatagtttgtatgtattctagtcttttcatgatatttagattttgcttttaagggagatgatacatgatacttaaattctatacttgaattaagcaaatatgcaatgttgatgctagcatatagtttgatctctctctctctatatatatatatattctttattgaattgttattcctcatatagctttaattgctcattgtgaaaagagaagaaaaatatgaaaaaaaaaagaataccgaatccttgaaacaatcttgacgacaaggacgtattcgatgtgagcaaaataatgggtgccgaatctctggaaacaatcttgatgacagggacgtgcccggaataaaagagaaaaatatgagcaaaaaggctcaagaaaaagaaaaagtaaaaattctcttgtttgttttgtgctgaaagctaatttgagaaagagtgataaatgcaataggtatatgtgtttagtgtttatttttcaacctatgtgcttgttaagatgttgcattttaaattgtatgaaatcatgaattttgattattgattcaagtttaattgtaaaatctttggttcatgattatactttaatgcatgcttgctatattatagattagttcatcttctttttattgcaacacatgacatgatatgatatatgtatactaagctcttatacattaatgaacataatttctatgcttgatgaaatcattgtcaaaggggggaaaagtaaggtgaaaattttttggagtagcaaatgagttgagaagaggcatgttgtttttggttcgattggaaatttctttcttttcaaaagtgagagaagttttcttttggattttttagcacgatgtgtacatttgtacaaagtgtgctttttaccacttttgtttttattttttcaaacaccaaaacatttttaatgggtttgccaatatgttcatcaagggggagattgtaaatcaaaggtgtttttgattgttattctgtgatgaacaattggcattagcgtttattggcttcgatatttggaatttatttacgaagttgttttggagacgattgcatttcacaggtgatctgctatgctttgggtccggtcagaccgggcagtgtgtgccggtcggaccggtgatgattgagcggtcagaccggccagcccgcggtctgaccggccgacgctgtgtcagtttcggttttgggttgtttgtttggatatccgtgattgtttcatggttatggcttctagatggataatatgcgtatctaatactgttgtttgctactaatgagttgtcacatcctgattttcgtttcaggatttataaattatctaataaattattaatagaatttatattaaatgttctttaatttacaagtgaagttaaatgtgggaaataaaatttcctaaatttaaagcatggatggatttaattctcattaaattctccatagttaattatactctctgaaattttctcggatttttcggagctcaattcctaaatgatacaaagaacaggtcagtaattatttaatcattaatgatctaattataattatgttaagtgcttttcttgtttaaaaatccttaatttataaattgttgtcgaaaagggaattattagaaatgatcttaaaagcctagaagagaagatctaattttaattaataaatcccaatataaaatggggccagataaaatttcgttaaatactttgcttgattctatagttcctagattttttctgggatttatttgagccaaggaagtatttttaataaatgaaattgcatttcatgaataattataattgaaaaaggttttaaaatcctcttttggctttgggccgaaagtcggcccaaaaccctctctctctcctcctcggcccaagccggcccagtcaagccgagcagccgctctcctctctctctctcccgctgacaggtgggccccacctgtcggactcgtcgtcctcctcgcgccgtcgcccagccgtgccctagccgagtcgcgccgccgtctccttccaaatccggccgcccctttccgtttccgatgaaattaattgaggggaaatgtttcccgggatcccctctatcttttctcttatggaatcgtcggctaatttcgtttggaaatccatagattcgagttcgattcggatcgatctctcttctccgaaccctaatctttccttctcgtcgccggtcgccgtgggccttcgccgccgcctccttgcccctttaaaaggacccccaagtccgccgctacctgccgccaccctcgccttcgtctctcgccgtcgatagcgccctagcaccgtgtagcctcgcgccgccgtcgtcgccgccgctccagccgtgcgtcgccgtcgctccagtcgtcgtcgtcgctcgggaaggccgccgtcgtggtcgccgtcgcgtcgccgtcctcgtccgcccctccgccgtcgctgtcgaccgccggaacaccgccgtcgtcgtcaagccgatcatcgccgccgctcttcctcgacgccgtcgccgtccgttgatcttccgccgttgttttggtcaccggtgagttcgccgcgtcgccctctacgtgttggtgtcctccgttcgcgctgtcgtgccgtcgttcaccggcgagcacgcgaggccgagccgtcgccggtgatgacgtcatcgccgacgtcgtcgtcgtcgtctctcgtggtccggccgtggaccgatcgatctcggcccgttcgtttggatggaaagatctcggccgttagtttccgtgagccgccgccgtgcacccggtccaccgtgaacccgagccgctgacgcaataaacccccttttccttttcaaaaataattcattattgcgtcataattcaattaaaacccatataattgatttaatctgatttatctttgaaaattcataaataattcatcttagctcggatttagttggttcaagtctctaaatttttctaaaattgagatctacatgttaaaaatatccacatgtactgttcatgcttgtttatgtgttgttttggtgttttgctcctttctgtttagattccgacgtttccggagagttcgttttcgcaggaaaagaatttgaagagttccaaggccagcaaggcaagtcacacagatcctaaacacaatcctttgagcatgttgatcctatatttaaattctctatttatttcaattgtgcatttattttcgaatgtcactgggtggtgtgaatctattcctttgttatggcctgtttgcattgattactttattccttgataccttgggttattataacttgactagttgagctttatatattggttcagctagatattagatatgattgcttagccatgcatagaaacattagcacactattgggataacttatgactcactattatttaatgatggcttaatgatagttcacgatggtcaatcgtgattggttaattaattacttgccaactaaaacttgataatggtgggttgtgagcacatggttttgagagtcgtgctcatgacaattaaggaccggttcacgattttcggttgtgaaacattaaccgtgccaaccacaagccagcgtgggcaacggctttaccttttgtatagcatggttcattgcggagcaccagactgagaagtggcggagataagcccacgggggtcgctgttgatagctttgtatagcatcgttaccagactgtttggatagctttagatttgtttttggtaatagctgtcgtaattaggcatatttatggttttccttttcattttaagagataaatctctagccgatcaagtcgtgttcgaatgggacttagttaggtcgagggtatcagtataagtgcctgcaaagtcaacatgaaaattaaagtttttggttggctgtttctcatggacagagtgaatactagagacttgttggatagaaaacattgtgctctcttgagcgcatcgatttcttgttcgttgtgccaggagaatgcaagagaaaccagggagcatctgttctttgattgcgccttcagtaaagggtgttggaataggctgggatggtgttggaacacgtcattggagtttaatcaaatgctacactcccagcgctcctctttctcccatcatggtttcatggaattgttccttctggctgcttggaacatctgaaaggagagaaacggtctgatctttcaagggattcagccctctattacaagttgtttggccaatctcaagtcggatctgagcctacatttaattaggttcagggaaagtgatcgccccttagtgcaatcatggattggtcatttgtaatcttctttcttcttttctttccctcttgttcctttgttttcttctctctgtaaatttttttggttattaatttaaatcataccgtgggggcctccctcactgtttttttttttgttcaaaaaaaatataagtgcctacaatcattatgacgatatcaacagtttaatatacaactctcagtgcatcgttaccttttacttttgatgagttcttattttcaagcggggttgcattggttcgatctccagtgagaaagtaagttctatcaacttcgtttgtataggcttagttaggacttaattggttgagtacgatattctaattaaattactacaaacgttccttatctgttatatcggctctttccttcattgcattgctttttgggtagatttgatatatctattactttgcatagaatctatcagtttgattaagtctacttattttatcaatcccatgttgtgtcagcttggtccgacatattagattgtagataattaagtaaatttcattaagatttataggttctaaccaaggtttcattggagttctagccgataagttatcttatttcaatttctgagtattacatcggcttatacttaatctaatacattcattatctactctacttatctatctacttacacctaagttgttctgtaatttttagtatcattaaaattttttatttctatgcgaaataactgaagagagtagaagagaaaattgtggttgggaagattatactagtagcaaaaagccagtcctaactaaatcaacacacaattacctcaaccttctaccatccatcatatcaggcaagtcgaggagattcagccttatctatagataaggctaatcccttttttcttccttcaatattttagttttaatcagttcatgaaaaaaattatactattaatttattcttatccataatggatttatttgggccaatacaagaaattcttgtgctattcggggatttattcttcgccaatcagtatcatgtcaagattcatcaaaataattttgaagaagaggaacaaacattgtcttcaacaacactcatccacttattgacattaatacatatgaatcttcattaaaagggccccaaaaaaatctttttgctaatgattaatttcttctgaaacctagaacgaatccacttctataggaagatggaacattttggggtaatgtaccctgcttttcaaaaaaaaacatataggtcttgttcgtttccactgcaaggagtggatgaaattttggatttttgtggcatgtttttcaaactgccaaacggtgtgtttcgtgcaaaaaaaaactttatatatgaaaattgttctaaaatatcatattaatccatttttcaagtttgtgataattaaaacttaattgatcatacgttattaccacttcattttatatgaaacacttaatcttcatcttcatcttcaggagattcaaacaccaccatagttcgctatctgagcctgcccacttgctagttaggaaaaataattgtttcgttccgtgggcttctttcactgctatcttaacgctcgctttacgagtgcaaccaacgaaaaattccaggattgctttagtattgactcaccatacacatcttctacctcatcactgtcaatggtgtagctgatgtgtcatgctaggtatctcttattggccattttttatttctagctggtagaggtatttccaaagttcatcctttatttagctcaacatgccctttatgctagttaattgttcacattgttactatcaaagagcctaatagagaagaaagagtagcttttgtagagctgggaaaatgtgccgaagagagtggtttatgcttccgggcttacagaccttgctaacttcatttggtagtatagttgtgaatttttgaactttttttgctttgcccaatagaggatcagtaactgtgtccaagtccatattcaacatccaataccatttcaagtattggagccacttctgcatttgattccaagcctatcaatggataaatggaatgagtcgtgtcaaggcaacggagtggttcacggctactgtttccgtggcgaatttgattttttagctttaaccaagtatgtagaaaaatgcaataacatttctaatatcaaaatatattcaatgctaaattttatgaaactaatttagtgttatatatgtgattaatttgaactttgacttaaaaaagtcaaacaactcccaccattttttaatttatgttgtcgttggctttttttaaaatacgtttaaccattcgttttattcagaaaatttatgtaactatcatttatcttattatgacttgatttatcaacaaatgattttgaccatgacttaatatttttatatattcacgaaaattttgaataagacgactagtcaaatatttgccaaaaagttcacagcgtcatatattaaaaaggatgtagcataagtcttgtagtaattactatgtaattatattttaattatattatagttctattttaaaatttttaaataaaatactatcaaattttgtatagttactcattaatttgttacatactggatttccaggattagctcacaactaagcctcctatcgatttgaggaactttacggaaaatattacgaaatttgagctaattcctgtaaaaaaaaaacgtgttgttggtcatccagagttggacagacagcgccttccttatcctaagcacacaccatccaaaacctcctccacgctctatctctccatggctgccgccgccgcttcgctgctccacctcgccacctccgcctgctccccgccgcgcgtcaggctcgtcggccccaccaccggccggagatcgccgctgcgcgcggctccggcgccgccgccgccgcgggcgtacaaggtgacgatcgagcacggcggcgagtcgcgggtggtggaggtggaggagggcgagaccatcctgtcgcgggcgctcgacgagggcatcgacgtgccgcacgactgcaagctcggcgtgtgcatgacgtgcccggcgcgcctcgtcgccggcgaggtggaccagagcgacggcatgctcagcgacgacgtcgtggcgcagggctacgcgctgctctgcgcctcctacccgcgctccgactgcaccatccgcgtcatccccgaggacgagctgctcaaggtccagctcgccaccgccgacgactgaggcacatcgcgcgcccgccgccgccgccgtcgccggcgtgtgtgtcatctccggctagcttgtacaacttttttcccctcaagtggtatttcccgagatatttgtgacaattgctcctttgcctagctagttgtttcagttgtgataatgtagtatctactatttttgttttaagcattatgtaggatacatagtattatttctatctttttcatattctaagagacgaactacaaaagggtaatgtacaaaaatttggggagctcagcatgtctggaagcacgggagaacgttcttttgctgatattattaccagtattcgatactgggttattcatagcattactataccttccctattcattgcgggttggttatttgtcagtacgggtttagcttatgacgtgtttggaagtcctcggccaaacgagtatttcacagaaagccgacaaggaattccgttaataaccgaccgttttgattctttagaacaactcgatgaatttagtagatccttttaggaggccctcaatgaccatagatcgaacctatcctatttttacagtgcgatggctggctgttcacggactagctgtacctactgtttttttcttgggatcaatatcagcaatgcagttcatccaacgataaaccaaattccccaattaagaagcaaaacattttaacttggagatatattttagtgcaatccagtaacatatagagctatattacagcatggagcagttcattcagtataaagctccgaatttattcatggggatatcatggacatgttcctaacaacatgcagtttgcgtctccatgtttgctagcccacgcccaatgcctgaaaccaaacatcatgtcatccatactgattttggtacattagataatcttgtaatgcgtatcatttttaagaactaaagaagaaagagttgaacagaataatgaaatgtgatgtgtgctatagaagctctcagctggaaagagttgaacgggataacgaaatgtgatgtgctatagaagctctcagctggatttctaacatcagatatgatatgtaactactaccagaacatgaaaatggtgttgcagagcactgatgttacttacacgactgttacagcaagcaaatcatgctccgcaattacatatcgcctgtgcctgagcttgtaacttctaggccattgcctgtaacaggacaaaactgtataagcaatcgtagagttatgtttgtcacacgaaagcattacataaagatgttatcaattttaattcaagttttgtttcacagctcagaactcagaattgctatcttgagtcacagtcaggaaggtgactacttttttgatacaataggaaggtgagtgggtgactatttgcagtccataaacttctgcattcagtcatgcagaaatgactagtgaaaacacgcatgacaagagctattgagctaataccggtaaagcctttggataagacatgagtcacacaccactaaaccagtcgcatttttgcaagttgaaggagaacaaataggagcaaacatttggacgattggtgtcacatgcacaagctattggcttgctagtatgccactctgtttcaagcttacagtatcagctagttgtactggagatcagcacatcgccagacagagcaagcacttctatcattagaatatacttgctacattcacatggagaaaatggcaccaggaaactttctacagaagtagtcagggttatgaaatacttttagcaaatcgtagatttccacagaattcttgtaagaaatacatgatatgatagcattctttgaaattacagaaaataatctaacactagttagaaggcaatgccaaccagatactgactaaaacaagtgaatttctgtcttgagcttatcttaaatcattagacagattgctatctattggtggtttttaagcaaactctggtacattgtgggaactaataccagtgaattttcagaatctattccaaagagtgtgtactactttaatgactaatgacaacagatatctagtgacattgtccttgattactacaagctgcttaaaaagagagacagaaaagcaattacagaatatcttactacactatgatcaatttgattacaaccaacaagcatcaacaatgaatagataggcatatgccgcagagaacaaatgtgtaatttaacaaatcctaaaaatcatggcataataagatagtatagctaatatcactgaacttctctattagaagcagcccgtaaaacataccaaatcgcaataaaattctgcattttgactgcacatcatcatagggatgttatctgtaatggactagtaaaccctacacggtcctccatcagaattcagaactatgctgcatattaagcaacaatagaatttcaatatatattacgatttttacccccagaaacaccacatatcagccttttgtagcttctattgctgtaatgccaagaataacttcttatcaagttttattttctgacacgttgtttaatttcgatacacctggaaaacgctagtgaatttatactagaaactatatgatcgaaatgataaattgcatacagacttacgagatggtagctgccagaactagaactctggcattatgcaggcaaacaagcgacactcaaatgcaacagacacgtgattggaggcaacattctaggaccttcattgacagaatagtatcggatttctataccagaaaagcctaaacatggcactgtgattccactgatactcacaataattctgtttcggaacatctaggagagccacataattgtattcccaatttccatcaagaaccccaagtctaatcatagcacaaacaaacaaacgcaaggttgaaaattgtgaggatcccaagttgcttactccaactaagatacgcaacagagctacctaccacagagctgcaacaggtaaccagaatgtcccaatttctcatcattgcaagcacaaatgccaatcaatcgcccaggagcagaatcaataaatacccggagcctctgggatccaaaggggcgctcaccatcggggtcgaagaagaagacctggcgcgtgcgcccgtcgggctgcgtcttctcgaacacgtacgtgccccgggccttcagcccggtgaggaacccgtcgtagtcggcgacggagaaggcgaggtggtggcgcctgggcagctgcgcgggcggggcgcccgcggcgcccggggcgacggccgcgggcgccgccgcggggtcgcgctcgatgatgtggagcgcgacgccgggcgtccccgggaggcggagccaggcgacctggaaggccgggtagttcggggagcgacccgctcgaagccgagcacctcctcgtagaaggcggcgaggcggcgcacgtcgtctgtctcccgcgcgacgtggttgagctgcagcgtggccatcgcggcgagagagcagagaggagagagagcggagcgcggcgtaggcggaagaagagtgagaggagaggacggcaatgtgtagtgccgcgcaccgcacacgtgtgcgctactcgaagagaggagggggttcgagcgcagtgtcacatatttacagagtattaacatctatatgaaagagagagtataaacgaaaaaataattaattacacggattgcgtgtaaattatgagacgaatcttttaagcctaaatacgccatgatttgatgatgttgtgctacagtaaacatttgctaatgacggattaattaggcttaataaattcgtctcgcggtttacatacggattttgtaatttgttttgttattagactacgtttaatattcaaatgtgtgcccgtatatccgatgtgacacgccaaaactttacacccctaatctaaacacaacctcagttttgtttatctacttcgtgtttgtgttggtgtttatccctatgaacgcttactagacacttccaaaagattgaatcggcataccttaagattaatgaagtcagcgttcacaatacgtgcaatcacctatatgaacacaaccttacccctaccctataaacagttttcgaaagaatgcattggtatatcttaaaattaacgaagtacgaacatcccgttgtcgataaatacataattaaccataaatacaaatacccgtgttaaattaggacttaaacctaagtaagctaatttcaccaaaaaaaacctaattagttgagccatgtccactccgttattgattgatgagtttttaaggtcttgccaaattaatcgtgtagaatcgtagttgaatataacaagtcgtggaatcgtagttgaatcctggcagaatttgtggaaaacagaagttctagtcataaaaaagacagtaaaatgtagtaaacgactattaaaggtcaaggattgttccactcatctttggaggacattgtcattacatagaggggatgagaattgctctcattcattttacattaatagtagctcataattacaattccgttaagaggaaaatcgctttcggagatttctcctcagcttacaattaacacatacatccatcaacaagcatttgatatggaatgatgcaagatgttcatcagcttcattcattcaggtatcacggccttgtgttgcgtccacggtgacctatctatcttttgcctccccatctcctcttgaagttgcgctcatcatcgcttgaatcctcgtaagtaaggctcctggaactgtgactggacctcgctctgctgtgcctgtcaccaccggttggagatgaatcctcgtaagtaagcttcctggaactgtacctggacctcgctctgctgtgcctgtcaccaccggttggagatggagaagacgcgcgcattctcttgctgctgcggtgatcctcggcgtaatcactagagcggtgatcctcgacgtaatcaatggagcgcctatggtccctcctgtcagagcttgacctgctggtcttgtaactgggatcggtgccatgagaagagctcagacgctggttacgctctgatgatcgagactgattggcaggttcaggttctttgggcttcgccgccagccttggacgtgcagcgtcttcgtttgcccagtgaatcatagattgagtttcccagctgaagatgacgaataaacgaactgttaagtgttgaaatggaaagaggggttctacatgactgacagccaagtgtaatatagggaaattaaaatgcaacctttctaagaatctcttgaccaaattgttctattagttaattttgtcgtcattttactattagtactggtgagataacaagtctgataacatacataccagtgagtatttgccaaattgccttgcattgctgatggaaattgcagtggcatgttgccgatggaattgacaccataagggcccatcggatagccaccataaggcatgcccgctgggccgtacatgtaaggatcggttaaccaaggatacccactgacgtaagggttgcaatacgcagggtcaaatggaatgctgtaaccatagttagcattgttaggatgaacaattttagttgaatctgccttcttgcgcttcttcttcaattgatcagtcttggaagctttgggttccatggttcctgaaatagtggccggctttgaagtggagtcagttacatcttttaatctggcatcagcagttggtacaatcttctctaccaatatccctgcagaattgccttcatctttcacttcgagatcaacacctgttgtcaatttatgctcaagatggctaacatgttctgtagcaacttggaggccagcatcaggagcagctgatgatatgtggtgatccttagattgcttttccaaggcagctgaaggagtttggcttgctgaattaggatccacgttgctgcctgaagagctcctgtgcttccctgtaccactagtgatgctgctagcccttgttgccagcatattgctgattgtgctccgaagtgtttggttgggaatcaggtcatctgcaagaaccttgactccacaaatgcacttggattgtgtaatgatgtaatcacgaatgcctgagagaagaacaacacagttattagctatgcagttgaggacaggcaggaaatgctatcacagagaccgctgttattaaactattaccgttgaaaacatgtttaagcatgtatttagacaaagttttgagtattggtaaattactaaatgtttatatttgtcttggaaagtacttaacagtgctataattttatcgagttttacaaatatagtactccctctgttcttttatgtatgatgttgtttagttcaattttgaactaaccaacatcatatattgaaggatggaggtcgtacaacaataactattcgtaatttttcctgtcaaataccacgtcaatgtccaaaacaacatgcttctgtgactaatttgaagcatgactagccacatttcgaatatcaaagtaatgacattgttcatatccacagcaaagagttaaggagaaatacagaatttactcacatttatcacagaaactgtcgaagcagcacttgcttgtcaacaccgcatctgccatcactttattacatagccggcaatggagctcagctggcaagtcgtcaacaacactcacagatgcagctggggcaagagctgatggaatgccatcaataggacatgcagatacttctggcacaagagtatggggcttcttgtaatcgtcaaatttgggatcaccaatggtcgggcaatggtgaataaaatgccctggaattcggcatctgtagcagacatagccagatggaggtgtctttctctcctgttggcaatgttgaatgaaatggcctggaactccacagctgcggcacacatagcctggtggaggtgtctccccttcgaccggtccatgaccttcagttataatagatagatatgtcaaaacaaatgcagcgcaatcatataatttacataacaacaatacaaagcaaatcattagagttctggcatcagaaaatggtgaggaactgtctagcttaaccaatgataagttcaagtgaaaaatgccattacaatgtgcatgaccatttgtctcataacaaatcaacaaccatgattttttccattttttaaccaacttagtgtccatatcataatcataactgggacaacagaacataaatctgaaccaaagaggattccagcattaccataacgtcctgacgtaaaccttccaccagtctgtcctcttttagatggcttgtcttccctgcatgcaccaagatacaaggctgtcattaggaaggtgccagaaaaaattgatacctgtgaggaaagaaaataagatgcactaaccatttgagttcagctgcatcaattatagatgcgattgcagcatcctcatcctgtacttctgtagaggaacaagattttgaggttgattcagtaatctctgacttgtttgaagctatagcaccatcttctataacttcccgcctgcaattaagcccacaatgccaagtattagtatatacaaacaaacctctcctcagctgattcagattcaatccaagcacttgaagtaaaatctcaaataaaagattgtggagaagacatacgaggagaacaagacgattttctctgattgttgcccagaagttcggcggaccaacacagtcgagttctgcggtatcatggcattttcatctagaaattctgttttgagaaacaaacacagaaaacagaaatgtcaaaagcattgcactcaaacaatactccttttattggtgaaacgaagtcttctcatgtacaagatgcgcttaaacaacaaaactgaactgtccagatgaaattaaagaatattttagtaatagatcacaaaactgggaattttgtgggaacaactgaggtgtaatccttgtgaaatctgggttcacgtacaggatggcaaaagaagacgggatggtggaagtacaatttgcaagtacaaaccttccacaaggattactggacaagatgtacaaaaaaaaaaaagaaaggaaagtgatatggcaaaacttctcatccaggaacaagctcactgaaaaaaaaaacttatatggacatatctcgtcaactggcgaaaagatgaggccatcttccactgcaataataatgtgctaacacctgtgtccgagtacagtatcttaagcacgtaaaatggacctccattacaatcacaaaacaggatttcatcctctctaaaatacaaattaggatgtcacagggatacagaaacattgaccatcagatgggaatcagtgacacgcaaaactgatagccaatgccattactggaacatttcaacaacaacataggaagaaacataataaaaccatctaataagaattcatgaaatgggggaaaataataatcagggttgtaataacatatttaggcatgtcgaacatgcgcagactgaaatgagcttacacttaatatcattatattgacaaagcataaagatcattaaaaacatctgaatagcattggtatgagtcccaatattgcattcagatcaaccgaacaacagaatatgatcaacacataggagtgcctaatagaactaacacatatctagattcctaattcatatcttgcaagaacgttcaattcctaattctgatcaccttacaataattactagttactaataatcggattgacactttgcccaacacttgacctagttaaacttagatagttacattgagtaggatatataaaataagtttgtttcacatcagcaaaatattgggaacttggatgcacgcagaataatagctaatgggcaaaattgttattacttatgatgtatcttaagctttcctaaaggttacagcaagaattaataatcgacagaggcgctaatatgccagcattcttcattgagaagaaatgctgggtacaatgccctgactcagtcctaattggtaaaatcatgaaccaatattatcctacaggctaaaaagataatccatatggacaaaagaaaaaaaatactattccaagtattatccaattcccagctttgtgatcatacaatgatttgtttcagtgattcaagccaattaacaggaaactgatgcggttacggataaacgaatgcgttgtacagatagttaactaccttcgccggtctgggcgttggagaggacaatatcttctctggggccgcggccacgggtgcggccacggccatgtttgtcgctcgtcaagatgagctgcttgagttcagaaacagagacaaaagaatggggcacgggcacagaaatagtttcctttgaactcttatatttgtaatacacaacacccatggtgttgatatcaagttttttttccccttctcgcctcttctgcacaattatttttttttctttcggcgagagaggctgagactttttccctcagatatcaaaatacacaaataatacacagagatagagagttacagatcgaatcgatctacggggggaatcgcgtcgatcggcggccggcgtgtcccttcgccgccgaggaggaagaagacgaaccccgcgcgagtgagtcccgagtcccgacgaaggaggcctgcccggagtcggaacgcgagaggcgggcggagtagaggaaggcgccgagtcgaggcgatggcggggaggggggggggcgagcgcgcgcgggcgggcggtcgacttccgccggcgtcgctggcccggatgcggatgcggatgcggaggcggagtcctcgccggaggcggccggagagctagggtttccgtcgcgttcgccgaatagaaggggattttggggggggtggaatttgggggagaaatccgcgagcggcgtgcagttggagtcggtggcggtttataggcggctctggcgcgataacgcgtgacgggaaggaatccgacgcggtcacgtctcttggcctctgcttccgtttccgtggccacgaaggttctagctttcggtgtgctggaaaaagtgatctatcgtgtgtgcgcaatactcgccgacggcaccccagtgttgcggatgtttgtgcggtcgcgaccggctcgttactgggccatggtgggctcgcgcgacgtgtgggccatactgggccatgtttgtgcggatgttgatgtatcgaaatgatcaatttacaagttgttgtacttatttacacccaccacataagtttatgtaccgtgagcgcaaaagaagataaatgtttcacacgtgtatgatcgttttagaatggtcatttcattcataccgctgcatgcaaggataacttggcatgcttacgtggcattttttgtgtgtccaaagactatattaacctaaataattaatttgaaggatttgtttggacgatttgaaacatagaggactgaaatgagcccgaagcgaaacttcagggaccgtattggctattcaccctttttattaatagcctagcaaagtattcctacgttgcaatggatgaagtcaacaataattgcatacatggatgattataagaaatatatcgatactaactcaaaataaaattatattttacatattactaagtttatttgtcttgattaggtcacaaatattagtagttactttattccaaaactttagtgattttattttggaatccatagtgaaatcaaattgcatttttttaaaaaaaataatcaaagctagctttgtttggcatttgcgagcttcatggctgaaattaatttgacaatctttctctgacaagctgcatgagttcattttatttgacattgatgtcctgaaattgatatgaatatcagatggtgtttaaggaaaagtacttaactaaactattttattttagtaagttatatttggatccttaaactcccatgagattagtagttatattgattattgacgtaatttctatgaatctgcatgtccaaattgatagcattagcaaaaaagggctgcatgcgcagaaagtaaaatatgaagctagtgctagtgctggccatatttatatgctgaaaatcatctagagtatctaggcactgtttacatcccatcccataatttttcacactatcatatcaaacgtttaaacatctatgggaagtattaaatataggcttaaaaataactaatcgcacagattgcgactaatttgcgagacgaatcttttaagcctaattgttccatgatttgacaatgtggtgctacagtaaacatttgctaatgatggattaattaggcttaataaattaatcttgtagtttacaggcggaatctgtaatttgttttgttattcgtctattaatacttcaaatatgtgtctgtatatccgatgtgacacgccaaaattttacacgaatctaaatacccccttattagtcaaatctttgaagctgcatgataaatctagaattcagccttacaccggaagtccttcgaatcaagcctgtgtctggcatgatcatatcacacaactgaataattgttttttccattgccttgcaaagagaagccaaacccaggcgagcacctgacagagagacacatgcaggtaaacctgttgttgctatgtctcgaattagggccttcccaaacaaaattttttacgttgtcaaatcgaatattttaacatatacatggagtattaaatgtagaaaaaaaaccaattacacagttcgccaggaaattgcgagacgaatcttttaagcctaattgcgccatgatttgacaatatggtgctacaatatttatttgctaatgatgaattaattaggcttaataaattcatctcgcagtttcctggcggaatctataatttattttgttattagactacatttaatactttaaatgtgtgtccgtatatccgatgtgatataaaggggcaaattttttttttgccaactatacagtcccttattcctgtcctttggtaagagaggattttagcattgcatcaaagcgcagaagcaaatcttcctttccaaggggaaatcaaacgtgaccaacgtgtaggattcacgggaacaaacgaaaacaaaaccaaaagaacgagatgcatcgcgctgtgtcatgatcaagaaagcaagacccttcacatggcactctgctcccgttgcattctgctgatttcatctgtcaccgccgcctgccggtggccaagttcagtccacgaccaacatgttccagatcacagcaagcgtgagcgacgcatatgcgcgagcttttggaaagcaaagcgcgatagttttaaggctacatataccagcgaattaaatgttccgtctcaactatcggagtagtgggaaacgatgggtgcggtgacaaggtatagatggccatatgctctgaggcccatggcctggcccgaagcacgccattttggtccggcccaagcacgatacggtccgactggggggggtcatgtctatgccggcccggcccgacccaacagctgggtcgtgcctgggctgcaccctcggcacggtgggccagcctggcatggctcgatcaaataaaaaatatatatggatgcaaaatctataactaatataaatattcgtatttttccggtcgtcacatctatttttgtcccgcttcgtccacgtacgcaatccgattcggttagcaataccatggaaaaaaattgcaaaaaaaaaatcgcccccctccccccaaaatcccaatcggaatccaatcaaaccccaaaaaaatcccaatcggagttcaatcacacaacaaaatcgaagaaagcatgatgcatgtacacatatatatccaaataaaaacaaaaaattagatcgaagggggtcgccgccaccgccgtcgtcgccgaaccaccgccgtcgccgccgcagggatggctggccgccggcggctcccctcctgctggatctggtggaggggagagtgccgccgccactgggacgccgacaggccgccgccgcctcaccttccgctagatccgccgccgccgccgccggcggagggcgctggcggaggggagagcgccgccgccgcctccccttctgctagatccgccgctggtggtgggggagggctccgccgccgccgctcgcggggcgcctctcctcccgctagatccgtcgccggtgatgggggcccctcccgctagagccgtcgccgccaccgccgtcggtggtgggggagggctccgccgccgccgccgccgctcgcgggaggaggggcgccgtcgccgccgccgctcgggggcgctgaggggagggcggcgaagagagagatgggagggaaggaaatggactagggtttcggcggctgagggagggggttttgtttccccgatatcgacgctcggccgtccgatcaaaaccctagagatcagacggccagcgttggataggccgaaattggcccaagagggatcgagagtgaggccacttttccggcccaagcctaggttgcggcctggggaggaaaagtgcgcccgcgcgtgcgcaaaaggctgtgggccaatcggcaagggccagaaataagtctatattaggtccctcgggccggaaaaaagagaggttcatttttttcagaagcatttacaattatacttattgaatgtgtttatttctaagtaaacctaaaaggaaggatttttatctttttccaattaaataattattaaatgatgtttgcattattaaaattagcaattaagctctgaaaattccaataagattccaaagagcgtaactaatcatggagaattcaataaaattaaatttaaccatgtcattttatttctcacacttgctttacttgtatatttatttaattatacacatacctacttaaaaataccaaatatttcagcgaatttgtattttaattaattgcatatttttctgatctgtacgcttcccggtgcaacgcacgggcacttttgctaaaccaaacaatacttttggtcaatatacacactccgtaatcacccggtgcaacgcacgggcacttttgctagtagacttaaataaccgtacacggcaaggccaaaagagaagagaaatacaaattagactcattttctactttgactcccttaaaagtgacccgaatctaattcatgaccctcaaccgtaaaaccggataggacgactccccaaactattgaaaccagtgcaatttgactcccttagtggttttggagggcggttttgctgatatggcgctgacgtggcgatgttgacctagtctttgtcccacgtggcgcttacatggcagcaataagtccactttgactcccttaaaagtgacccgaatctaattcatgaccctcaaccacaaaaccagataggacgactcccgaactattgaaaccagtgcaatttgactcccttagtggttttggagggcggttttgctgatatggagctgacgtggcaatgttgacctagtcttcgtcccacatggcgtttacgtggcagagcggagcacgtgcgtagaagccaccaccaccaccgccgccttcctcggccccgacttccccatccaggagacctcccagacggcctacgtttcgccgactcctcaagatcctcgtccacggtacgcgcgtgcgacgcgtgttcttcttgtgttattggtcgagtcgtggtttcttcttgccttgcttacctacctccgtgctcttgcctcaccatgttcatcgcttcttgtttcggtggtgagattcttgatctgaggtgttgaaatgttctgaccgtaatatccagaatcgtcgtttgcattttaatttcattaaagaacggagaatcaactggtgaaatgcatcgtatgtagcaatgccgtccaatttcttcagaactttttagtaaaatcgtggaatcatgcgtccgggtaatatttagccatcaggtgttcgaccaattgaccaagagaatacatggcagtgggacccacaatatttttatgtgtgaatcacagatgggtcccacagatatttcttttaattctaatgccacataagcgccacgtgggacgaagactagttcaacatcgccacgtcaataccacatcagcaaaatcgccctccaaaaccgctaagggagttaaattgcactggtttcaatagttcggggattcatcctatccggttttgtggttgagggtcacggattagattcgggtcacttttttaagggactcaaagtggacttattccttggaacacatagcttaagtgcttaggctcaagcttgatataaactcgaaccgagtctatactaacatcgagtttacggttaggtttgggcttggctcgaacgagcctcgagcctaatcgagcttgctcaaaaacaataaaatacaagcttatttataagggaacatagcctatgtacacaagctttctatacacactaattaacaaatgtcacaaaaaaataaaaaaaaattgtagtgcttgtagtactatctatggaacacacactgacacaaaactactgacagcagacacagtggcggaactatgtgtaagttgtgtggtcgattgaccctgcagtttttttcactattacccttactagtcttaaattttccatataaatccatttatatttacataaataaccccactaaaatatcaagtaataataattgactgcagagtaaatttaagccaaaatatagggataggttttgtggggtttgcttcattagagcaggtacaatagcaggctattagctagttataaacatattttaatgagataaacgatgaaagagaagagcagcgggctatagatctgtagccagctgtagcacggtgttaacgaccaaatttggtaatctgagtatcggagatgaagaaggaatcgaaacggagttcgagatggagatcgtcccggaaacagagtaaagatcggctaaagtctgaatcggctgtgatcaggatcggcaaagtctaagttggacagggttagctgattgagctgaatccgacaatatgacacggcatatgttgtcgggttaggttgatgtacttcacaatgattgccaaacatggatagagtcctgagaaggcaactgtatctattaattaggatattttatgtaatttccttagagatttgtttgggcaatagtctgccgcaaagacttatggtatcttagagtttgttagagataagagtcgtgtaacatattttgtaatctcgggtataaatagaccccgagccccatgtaatcaaaacaacacacgttcaatataatctcggcacatcgccaccctttaacttacgttttgtttcgacgagttcttactttcgggttgagctgcatcggtttcgatcttcaacaagaggtaaaacttgttatggcggtttgcgttctcaggattagtgcttccatctttatgatactctaatcttgcttacgtaattcgtcgagttatcatatatcttatataatctttggcaatatcgctatctaaccttcaatcggctaacgtctgttactggaaggcatccaattaggttatataccgacattgatttagattatataagatatctaccactctatgacacattgaacagcttgattgtctagatattgccattcttttcatacttatagctgcatcagttgagtttgatcttatgagtcgtgattagaatctcaatctctagcttgcttttggctgctgattagggtagcatcggggtttcagcctatcttacctgatttaactacttttctcttatgtgcttgattgacacgttaaatctgcctttatattaagatcttgttgcatttaagtatattaggcttttgtttggtatattctacttgctttgatatcttaatatggagtactattagagtattagccgatacatgctagatctatctgatcgactatgctataaacatatatagtctcattgttaatatatatttcgatctaagtgatttatactgtctcggcatggtaaccgatctatcccaatcacttgatttaagcatatatcgacataatgattatatattgttaatatctatagccgatcgagtagatttagctctttcttacttatttatgattgccgatcaatccacatatgacatcggcttagagataaatgatatgtcatcggcaactagccgatcggctatcgtttatggatttaaccgcggtctctttgtctttatttcttgttgattgcaggatcaaatcaactggcacgctcatacacctaaaggcaagcttttggatctgcactggagttaagcagatctcccaggtctcgtgtttttacatcaacatacggactccaagacacaatgtgtttatgacaggtgggactatatattaatagtataataagcaactattgtatgaattggttattagattcgctatagataaattgaaggtagtagtggactgtactattaaacttgctcttaggtaagggtgcatcattcattgttctttttagtttcaatttaaacctacggcttaattttttgtttcatgtcttacggtgctcttttagggtgaagctgaatttttctatgctggccaaggccacaacctctacgaagccctgattggattctgcttaggcttcttcgactgcagcttgcagtgatcgcatttgctgccatcttctacagaatcaacgaagcaaccgtggacagaaggaccgaactgcttcttttatcttttgctttgtccttctcaaaaaaatgctaggacctttatgtaattcatccaatcacatggagttgtcatgtaaaattggctatgtacccggtctttggtctttttttttttaaaaaaaaaagacttacggcttaattagctagggttttcattgataagggttatggttttttctttacaatttggagctcaaattagctcaaaattgtggccaagattttaatatatgaagattcacattagaaagtgtattcatccctcgaggaaatatccccttatttcatgtataccatctaaatagtcataaaaaaatttaaaataaattgataaaatagattaataagaaatatatcactctacaaatatgcaagttaaaattcaacttctacaaattataacaaaataaaaaatataactacgaatttacaataactattttcattttttttgctaaaagttgaatttggcattgcatgtatgtggagtgatatatttcatattaatctatcttgtcatttttttaaaaaaaaattggtaactatttacgacatgtaagcaacgagtggacatcctctcgcgagggataataatccatatctgattcacatggttattccattatatgcgtggcttaaaagatggggattatgtgctactccctctgtttcatattataattcgtttcgactttggtcaaaaagtcaaactactccaagtttgcttaagtttgtagaaaaaatagtaacatttttaacccaagataaatatattcaattatagattttataaaactaatttggtgttgcaaatacaactatatttatctacaaacttatctaacttagagtagtttaacttcgattaaagttaaaacgaattataaagtggaacggagggaatagttcttagtgcgaccccaatctagttgactagttgttctaaaagatttaagtataacccgactactgaaatgaatgctaaggacaaagcctaaacatccaagcctaaccctggcgctgatggagtgatgatgggtggactgttgcgacacctaggcatggtcgcggcaaggcacagaaacaaacattgaaccagactagacgcttgcgaccaattgtctcaaggttttcagtgtcaagtttcatcaacttgtgttgctagctaggtttctattaggggttatgattatgatgataacaaaatgtacaacctgtctgtaaggtctgaaacatcgttttggagtaattcacacttgaagtgagctatactattgtgtacttgctacattcacggtgaattcttgtttatcatgcctgaaaaaacgtcagccatcgatatttctctgctcgtttctgcttataacatacaaatgggcgaaccaatggatgtgcaagtacccggatctc

SEQ ID NO: 226 - DNA, 24599 bp, Oryza sativa
ttagtattcatgccactaaatagttagccaaatggctccttcgaatgcaacctgaggatgtgttattttctcccctttaattcccaacttatactccctgttttctatgggcacgcttcccgaactgttaaatgatgtgtatttttgtgaaacttttctataggaaagttgatttaaaaattatattgatctattgttcaatttttttaaactaatacttaattaattgtgactagttttatacagttcaaaagaaaccatgaataaacattcatagtagagataaaaggtgataaaaggtggtgagcaagtgatcattgttggtcgtaggagcgagagagcggataagtggtcaataattaggtgggagcatgctgggaacgaattaaagcttacaggagttgaagtaatttgatacaatagcaatgacggccaagaattaggcctcaaataccctcgagttggcccttgcccttttaactagagaacttttacggtaccgtaagtatatactatcagtatcagtatatgatagggtagatttggtatttgttaaaaatctgaaaaggttgtttagtcatttaaaatagagatttatttccataggatgaattttaaatcctttggttgttttttactggatctcgtcatccgcataatttgagcaatttttgctttgtaatttgagcttgtaacagctgtttatttcagcccaactctatgctgcattgctccaaaaaattgtgctgttaaattggattctctaatatatcgtctaaagttcgaaacgatgttaatggttttggagtctgaacattcttctttcaaggccttctctggaagactggaacttgggagttgacttagatagtagtcacagaattgttcatacattagttatattggcatgtaaccatgctaattacgtacattagttatgctaattatgctgctctgccgctgccacctgccaccgctagtctgccgctgccctggtcctcgaacgcgccgatgatgccgatgacgaaggccgtggagaaggactgcatcgccgtgctgttggacaccctgtggaactggagcggcgtcaggaagaggcgttcgaatcgatttttcagcgccttgaagatttggggatttttggaagaactaggttttgggtgaagaaaaggtgagggaaatcgaatcgattcccgatggcggcggcgccgattgtggttgttgacggccgcgcagcgcggcgtgctcgcagaggcagtaagcgacggcggtcgcccatgcgcgcggcttcgagaaaaattcgctttgactaggcgcaaaaggccggatctgactaggtgagaaacgcgaatttacaaaattactcctcacgcaaatagataaaaagacaaaaatgccctattcaatttatactgcagaataattgggaggaagatcagatgaatttacatcgttagatcaaatatactggtagtatatacttcaaatagaatgtaccgtaaaagtcctaaactatttgtacacgaatcttagacaaccatagcccactgattggtggtcccctgctgttcaacatatgtagatatatatctttggatatatcatgctccaagcacatgccatacataattatatctgtaatgattcacgtttagaccaactggccctctccagtctccacatacaagttcatgatctcattccctacacaaagatcagaaagagagggagagatcagaagccatttgttggcagtactaaggcccaagcagacagtgtcccccacccttgagtaaataaaaagaagattcttggggtacaactcaagttaacacatacatgaatgaacatcataatacctgaccggttaaatcaccaacagtgatgagtgagatggatgatattaacatcaccagtgtctacaccctttctactttccagtgttggatataaatctttgtttctaccattcacacacaagggtgggtaaaaatcgcggcgaaatacaaagtgcaaatgtgcactttgcaggggcttcataatgggcgcgtgcgcgctagctgcctaaccagcgcagccgcgcacgcccccttcttaggcctctcctcctaaacgctaataatgccaattagcattgatgatgttaattattgctaataataattgttagttttagttttttaaaaaaatcataattagaacttttcactcaaatttgaaaactttcaactcggatttgaaactttcaacccagatttgaaaactttcgactcacatttgaaaacttttaacttgctatttgaaactttcaagtcaagatttgaaaactttcaactcagatttaaaaaaacttttaactaaagatttaaaaactttcaactcatattcaaaaaaaattaactcaaatcttaaaaactttcaactaaaattgaaaatgaaatattcaacatctaaataaaaaaatcacgaaaaaagggcaaaagaaaacttaaaaaaacgcgtggacatcgcttttccagtaaaaaaaataacttacaacgtggatgccgttcgcttcatgcatgcgccaagttatgtggggcgtgggcctcgtgggcctaaaacacgcgccgccaacgcgcgcgcaaattagctctcgcgcactttgcatacttggcatgatatatttagggccctttgactcgcaggattgagaaaacgtaggaatagaaaaaatgtaggattttgataggaatgtaagtgtaaaacaaaggaatgtaaaacgcataaaaaacacaggaatgaccgtttgactgaaccgttaggaaaacacgggaattggatgagagagatagactcaaggaaagttaccaagaggttgaagctcttgctaaatttcctccaaaatctctataggattgtccattccatagaaatttcattcaatcctttgtttcaaatggctttataggaaatttttccataggactgaaatcctctaaaattcctatgtttttcctccaaatcgaaggggcccagtttgtcgtcgtttttaaccacacataatgtaccaactctactaaaatttgatagttccaaaagttctcccacaaaaaaactattgaaatttggtactgttaaaaaccaaacatattaaatgctaccaaaattttgtaatgtcaaaatctagacagattttagtaagattgctcgacaaactgaacaattccttagttacaccacagaaggtatgggccaagaagtagacttttttttaagaaggggagtagctgtttatccgagtggcaaaacttcaggataaaaatccaaaggcttgtttacaatttacagatgagttgaacagatatcagtcaaagccactcaaataagctgggcctactagcccaacatttcctctctttcagttacacttgggagtactactctataggcctaaatgtcatttagagcaagtttaatagtatagcccactactagttttaattcatctatagccaatctaatagccaattcatataatagttacttattatactatgaatatatggtcccacctgtcataaacacattgcgtcttggagtccgtgttgcagctggctacagatctgtagccctctgcttttctctctaatcatttatctcattaaaatatatttatagctggctaatagtttactatcgtacctgagacagcgtatccagaaccattttggctgggctccagaaagataatctctcggttctattggcaagcagtgcaggattgtagctcattaatgcccttgtctcctattcagcggccagctactccacccctacgaggtagccactccctgacaacaatttcatcaactagtagtaaccctagtagagagaaaaagcaccaacccatgtcttccttttctgccttccatagacacaagaatgctcggacgtgatgattgggctccattatttggtcagcactgtgtgggctctcatgtttgtactgccctaccttggcttcactgatggctgcttgtaaaagaaaaatgtccctttgtttccttctgaacaagaggattcttttaaccttttctagtgagtaagaaaagtaaaaggagaggatgaagagaagctgctctgaattaatcagatgctagctagaaagaagaaaagtctgcacaaaagcattcaaactaagttattacttctactcctttctctatcccaaaagaagaaaagtatagtatagtttttaatgtgaaagagatagataatgatctaatcaacttgagttcttattccatccgtcccaaaataaatattactcccccgttatcacatatatagttataagattcaaattttatacactatataagtatatatcaaagacaactattccaatgcattggaatccaagcattttcaaccaattaggttcttctaaggagaatacaaataattcagaatttaaaaattgagcactgagatgactgaaagtggatctttttctttggtaaataacttagaaatgtttatatttaagattggatggagtagcttaatactttaatctacatggtttcttaccatattaaggcacgtaccaaggacccatcaattggctgattataatctataacggcttatgtgcgatatatctttagtgacttaaaaatctaatgctgaaaaagaaactaagtaaaggaaatactgtaaaatcagcacaaaattaattttcataggcttattctcggtaagcaaacgataatgctgcaaaacaaaaaacatgtgacagtactctctctggacatgtcatatgcaggaaatctgcgtctgattcatgtataccccggtaaggagcgcgctcacacaagtggcagttgcgcgcgtacactgcagagagcgcgcggctgcggactgtgcgtgcgtgcggttggctgccgcgccgcgccgccggtttctgacggacggcgccgtgtcctcctcgtcgctgcggcagcaactactactgcctctcacagatcgcctgcttctgtctcacacatcacatggccctctcgacacggcgacgtgtaggcctggagctccacctgatccccttgtgctggttgctgccacacggatatgatctgctcctcctcctctgctaccctgcccttttttcttctccatgccttgcactgttgcttccccaactgctccaaccattctcgggattggaggtagtagtactggaatctccttttgtgtggggtttacagccttacggttttccttcttttttgagacacaccctttgacagtaacagttaaaagagcaattggatgcagcactgcactgtagttgtcctggttatccattttatttttaagctactatttacatttacaagtatgtaaattttaataaatcagactcatataattagaaatagactgagagcccatacttaacgagtcataccatataattagggagaaatggtggttacttttcacgtatggacgcgctgtgtgtgttgggatgacaggatgaaaggagaatgattctgtttttaggacagtagagatatcctgcaatagtgaaagatgcacaaacttttatctggaggtcctcaactatggaaggatccacatgagcttagctgtttagccaaatctctgctgattcatatgcaccatttctgtacacacgcagcacagtagcaaaggtgccgtgcaaagtgtccaaaatataatcaccacctgatatgtgtgcccgccgactcgcattgatcacttgccgacccagctttctttagaaccaagcaagcaacacaaggggtcgcgagaacgaacaaaaagtgaaaaaaaaaaaagaaaagaagctcatcactactcgcagagagaagcaacaatgggattactgagtactgacatggattagccgtgtctccccaaagagaaaaaaagttagacgaggttaatcaagtggccatcgatcaccacggtctctctctttctctcgctcagcgatgatgctcttggtccggaccaaaatacagcagcagcagcagcagtacaaagctctgacgctcgggtcccacatccgtcagaccatccgtccgtccgtccaagattcaggagacgaagcccatccgttggatggaccaaaagatgccgcggtcgatgcatatgtaaggatgcagatgcaggcagcatgctgtcgtcgaccgacccgatcgatcgatcgatctgtctctactgcagcacgacatcgccgtctcacagggcactggaaatgatgggtcgcctgcctgacctctctacacaaatcttaagcctagagacagacactgatataataataaatagagattgaccgggattttggtgctgtttgttaatggtgaccatccgacaaaatgctctatcaccgtcctctgcgtcctcgctctgcaccgactgattcaccacacttcacgttccacctcaccggagggtaaatacagcaatcaccgttccacacatttcgtacaattttgcttgtacaaaagctgatcaatttcgtgctcaaattaatagtacaaacccagccgaaaagcgctcacaaagccaaacaaacactcaatgtagcagcagcagcagcagcaatcagcatgagtgcccaccattgcttttttttttttttggtgccgtcttctccgtgttgttcgtggcacaacaggacatgatcgatcggtcaaagggtgaggggagaacgagacgacggtgcataaaaatcaaatggaatggaagcgagaagggagagaggagaggagcatgcatgcatcgttactccagtacgctgcgtacagcggccggccgcgccacgatctcgctgtctgctgctgctgcttccaactgctctctgctctgctctgcttctgctcctctcttcctctctaaaaagcgtcgccccaaccaacctgccccgtcctagctaaagccatagcagtaggcgggctacgcatcatctcccgatttggcaacacccatattgctgcagtgcagttgcagttgttgcggttgcagtgcaagagggagaagaggagtttcttggtgagggagagggagagatgagggacgtggtggtggcggttggcggcgggacgaaggcggcgagcaggcagcaggggcagggcggggtgacgttggcggcggcggcggcggggtcggggtcggggtcggcggcgtcgccatgcgcggcgtgcaagctgctgcggcggcggtgcgcggcggggtgcgtgttcgcgccctacttcccgccgggcgagccgcacaagttcgccaacgtccacaaggtcttcggcgccagcaatgtcagcaagctcctccaggtataccgcacgatcgctgcttcttctctcaatctatcgtcttctctccctagctgccatgccatgacatgccttgccttgcctcctcgtgtcgtgtgtacgcacgtctcacgagccctcaattccctctgtttccgtctacaatctctgtaccgccttctttctctgtatcatcgcgctcatgcacacacagacacagtcgagttactaccagttcttggatctttttttccttttcagttccgtgccaattcattagaaagatgtgatgtttcttgccattgtttagcccacagtttgtcaaatgtgtagtagtgcacaaaattgatatcttgtttcgccagaaatggattgcttatttttaacatatatggttaagaaagtttccccgggccataacgacgatgctagtactagggataatattggtttagtggtttcgtttgattacggtgttttcccaacatgtagcctgcaattctcaggaaaaaaaaattgaacgaaggcctgataatctcagaatgatatactgtattagatggtgtaatagtagattctgaatacaccgagattttgacaaattcggcaactatattttctgtttactagcagccagcctaaattcatttcctgggtatgccaagttcagaattgaactttcagaattttgcacttgttcttcagttttcaccgtgagtggcacatgtactgggcatgtgcatcaaaataaacatggcaaagatcctactttcactgcccactgggtcctcatccatgcagcaacccaaagcatttcttatgtgctaaagatcacctagccaaagaaaagaaaaagaaaagattgcttttttttttgtgagcaagttcgagtactgcagtgtgttgtagtactaattaaatcgacagagacctcagcatagtgatctccaaactgaaccctcccccatgtgtcgagccgcctgaaacagtagcccatcagtggtggtatacggcctcgtcctcacagtctcagcagccttgggcagtcaccttcacacaaggctcgcacatgctgcgtaaaaagaaaaagaaaaaaagctttcggctgcaccaaacatgcaaaaatgtccctaaaaatccttccttccattcccttttcttggaaccagagagacacccccaaatcgccaccatcttttctcaatttcttctccttggccctagcctcctagtagccttgtcacaatgtcactggctcactgtgtgtgtgcttgcacgattgtcaggtgggaatggacgtttcttctaccttgtcatgtactggtgcctgcacaaaaccagatcattcagatgtgacttgactgaaactctgctgctatgacaatcatatgtctgaaactttgggattgtggtggaatgcaggagataccggtgcagcacaggggggacgccgtgagcagcctggtgtacgaggcgaacgcgcgggtgagggacccgatctacggctgcgtcggcgccatctcgtcgctgcagcagcaggtggaggcgctgcaggcgcagctggcgctggcgcaggcggagatggtcaggctgaggatgagcaacgactacatcggccgccgcctccgggcgcgcggctgcgacggcggcggcggaggcgaaggcgggagcaccaccaccaccaccggctcgccgtcgtccatgtcgtcgccggccaagacggcggagccggagccgctctgcaagcccacgccggagctggacatggtggtggaccagccggacttcggcttctggtcctactagggctttgatcaaggtagtactactagctgattgtagctgtgatgatgatcaggtgatgtttttggagttaagtgacagatggtatggtatggtatggtatagtagtagttcatagtagagtcaagcgagtaaagtatatggcaatgtgtgcgcagtagcagcgtgacactgggagggaggtgaacataggcagagaggcctcctcctaaaccttcttctactgggatatatcaggggctttttttttggctgtccttctatgagaaggtagaacactgttacagacattgggtgtgcattcactgagttgtgttatccattgcaagaaactttgttgctcgtgacaatttacttggttgaaatagctgaactatgctgtgggaaatgcagatggtgctatctatgtttgtacaaatgttctttgattctgggcttgttttatgacatgtgacccattagcagagatgtaaaatgctttagtttgattaagtagatatcagactaatattgcaacttaaggttgccatgaggcttaaatactttcacgattgtatctgcaattttacaaggctggctcccatggatactatgggcaatgaattgctacccattttttacaaatacataaataaaacagacaccctgatgtcggacagaccccatcacttcataacctaatgcaggttcatatgacccaaaaattgcagctgcatattggacgccacacctttagatgcaataagttaatccaatcgaataacttcacattatctgcagttcttacaagaagttagcataatttgtcatgataaaaatttctcagcatatgaatcatggatggtgaaacactttatttttgtaagaaaccttaccagaagcgggaccaatgtgaagcatatgctctatggtaagcttcggttcagcaagccttggaaagagaggtaaagatctttgttgtctggaccaaagatctcttcagccttcttgagagtatcctggttcagatgtaaatatgctattgtaatcatgtaatgacataatgtaatcatgtctcataaactagccaacagatgcaagtgtggtacctctcttgattgcttatgagcattgagttccttgatgttggctaagaatgctccaaattgttcgtatgataggcggctcctggaattataatagagttctatcaatgataatacatctatcttggtttcgatttaaaatttgaagcgcaagatatcaacagacctggcctgacggaaaaattcttttccatcaatacgaggagtgcgacctgaaaacccaagcattatattacattccatacaatagcttcagaaaacatataccttcagggttcaggataaatgaaacctgggttgggacgtccccttggaggtgagttagctgctgacgattgcttgcttgaggggtaccatggtgtcatggacatgtatccttcaattcgagtttttgatggtgaagtagttccagacatcaattttggtgttgctgttgtagacattcttctcggagaagcagaagttgacataatttttggtgtagcttctggagtaaggcggggggtgatgtgtgatgagagggcatacttctgtattggaggctttgacactgtacctaagagaattagagaaaattcagtgcatggaaacttatgttgccagaataattcaacaaaatcaaaacaaacaatgagcgaaaagctaataataccttcttggactgtgcttccaacatccagagaggtgctcagtagatttgttgtagtgtgggtgatagaatctccatctgcaatgttcaatgaaaatattagtgagagattggtgccggacattttctatgacaaatatatgaagggcattcgaatagggcaaaacctccacaagatgatgcttttgatgatattgactgatcacatgtggtaatgtcaaccgtttcttgtggctgcttgggaggattcagcagagaatcaagcgcaaagaacaaacattactacaagctagagaagaaataataaaaatggaccaataattgctcatagtccattatgggatccattggatgagtagatgaactcaccgatggactatcatcacgtagtgactgcatcagatgcctcttgaaggactccagctgatagaagcaaagcaaaggaaagaaaaaaacagaattcagagtgttgtagaggttagatattagaaaagacagactgataagctgaacaaacatcttactcattgcttaaacagctcaaaagaaagtgaaaagaagaacagcgcctcatttttttcagtcctaaaggagttcttgcatcccacagtgggattaccactatttttgtgatcaactatccagggatcaacatggatgtgggattggacgggcagtattcatttcagaagaaaaataaccagctgatggacaatctttacttgcctttacattggctgcaatcagcaaaatgacccttcttcgctatcgttataaatggcattaaacatctaacgaactccatacttactccctaactcactccaatttgcagcataaaagcgcactttcccctgcttctcctaaaattaggcagcattcgtttggaggacattgagggagaaagcatctcgttttctgcacgcacgcttcccaagctattaaacggtgtgttttttgcaaaaaatttctataggaaagttgctttaaaaaatcatattaatccattttttaaatttaaaatagttaatactcaattaatcacgagctaatggctcacctcgttttgcgtatctacccaatctcctcaatccccttctcctcaaacacacccttaatcttcatagatagttcaattagaggcgtctagtcaaaggtggaccatctaataatacaccgacagacatctacaagcaagcattcgaacaatgaagaagatcaaataaatcaccttctgcaggtcccgcgccagcttcttggacgtctgcgccaacgagtcccgctccttgctcagcttaatctgcatccacaaaagcagacaccgaaatcaaatcaacaaatcgaggggaaataaaaaacattaacacaagagagccgcggggcgccaccgacgttatcctcgagcgcggcgcggagcctggagttggtctcctgcagggcgcggtcgagcagcgcgacgcgctcccgcagctccccgttctcgcggtccttgtccgcggcggactccctcagccgcgccgcctcccgctccagcccggtcacccgccctgccacggccagcgccgtgatgcgccgcgcaagatccagctgctcgtacgggtcccgcggcatcaccgccaggacctcgtccgccagcgcgaactccccctccgccagtggcattgccgccgccgccgccgccgccgcgcccgcgcgagatctcgcccgctctctgcttgggtttcgccgccttcggaagaaggggaggggagaggagaggagagcgcggagaagggaccacgcgacgccgcggagcgcttggagattttcggatttgaaatggggggagagggagaggcggatggggttgggggggacagtgcagagcggctcggcggccgaagcgaggtttgaaattgtttttgggggagagggcggccgcgttggcctcgtttctgttgttgagtgggcgcgcgcccaaagtagcaattgtttgaaacgacccgccttgtttccaagcaaaccccctctaaaatagtagtacttgggtgtgtttagttcacaccaaaattagaagtttggataaaattagaatgatgtgatggaaaagttgaaaattcatgtgtgtaggaaagttttaatacgatggaaaagttgaaagtttgaagaaaaacttggccttgcttggagcaaaattggaaacgttttttcttcgctcctaaggagtacttaggctgagtttagttccaaactttttttcaaacttccaactttttcatcacatcaaaactttcctacacacataggggctgtttggttgatggtcataagttgccacacttgaggttaggcaagtttgaccatgttaggtgagtgtttggttggctcccataagtgtggcaagattcctcttttgtaatctaggtctcacatgtaactgactctgaaaagtgtagcatggttttattttgttggctagagtgtggcttagattttgaaggcctcacctttggcaagtttagctaagagaagtatggtgaacctaggcaacgttagtatgtgaaccaaacagccccataaacttccaacttttccatcacatcgttccaatttcaaccaaactttcaattttgacatgaactaaacacacccttactacgtacactatggatgtgtttagttcctgaaaaaagttggaagtttatatgtgtagaaaaatttttatgtgatggaaagttaggaacgggggaaacggcctataacagatactacacatataattagaaatagatcaaattaacttcaatggaccaggcccatatatttaagaagtgacggtgattatgtactaatgcactgagcatgttagcataaggggatggaaaaaaaacaactccgcttttaagatagtataggaaaaaaccataaatgtataggatttttaagaatttctcttctcccaacatataaaaacctaatttaactccctccatccttaaaaaaaatataaaaaccaggttcagggatggagggagtacacaggaacgttctgattttgattcagattcacctgctattttcaagtgaaaggatgcaaatccctcctgttgcatgcttccaaaacgtacatgggatttatgggccattcggttcagttcggtaccaaatgcagccaaagcacgccttacacatcgaaacaatttcccgtgacaacattcgacgaaagagaacaaaatcacagagccatcggtaaattgtcttgtaacaaatccaaatcgaatataatttgtcagcacaaaattgcattgacaagctacacaattcttttgtagaacacacaggagcgcagcgcaagcctgcaatactgcatgttgcagttccaacctatatagggtacaaaagatttcaacagaaaaagcaaaatgagatgagctgaagaacatttctgtacaagaataggccgggcttgcccattcagacggtagggaatgtacacatgtcatgagtaggtacaattcagcaaccttactcaacaacgaaaaagaaaagaaattaacagattctgcagcttaacgcggtatgttcagccgacacaagtctgcaatgcatattcgtcattatcctttgatggtggagcgggcaacatatcagcttgcttaataacataggcaactttcgcccaaccgccctccaccagtgttcttcgtctgcaattcccttctgttttccttcctatattttctatgttacctgaccattttcatttcgaggtggatcagtgtaatcttgaccatgatcacggacatctctaaacatagagaagaaagatactatgccatcagaagctccgcctcctagcaaccacaataaaagggaaccaaatggattcaaggagccagagcctgccggagcattgccaggttgctgagggttttgatcttgatagtgcagaggattgttggccactaactctgcattttcaattggttgaccctcttgttggttcctgttaggctcatccggaaccagcagggcatctgcttcacgagcagcaccaaggccctcattcattgcgccagggtccctcatatttacccttgctatatgtaatgttgatgtatagatggttgaggatgtgatctgaacacccgtttgttggtgaaggtgagctcggcttctaatgaatctctgaagggctggcacctaaagcaacacaagccaagtaaatacaatggggacatggactttttttttgttttgctgttaaacatgcattaaatatacaatttgtcccctacttgcgtgaaccctaatctatttcctcagtgaattgaccaagttcaggtgatcattccagtttaataaatgaagatgaaagcaaggctagcactaaatcctaagcagtgttcagaaattagaaatggcctaatatcaaaggggaaaatataaaaaaaaattgcaggccaaagcaataaacaagcagtaatgactgataagtccaaaataaagaacaggaaatacacaggtaaaaatgcatattagcatacctcgaagcggttccaaaaatataaaattagatgttgcatgaacgccgcggtggcagaaaaggccaggtaggagaagcctgataaatacagaaatatgcaagtcatatatcgataggatattccagtagtttcttgccaatataggtcaccaaaaagacatatgtagtcataccatatgtgtacgagaagaagtaaatgtggaaaaccaagaaatacagcaagaaaaagcgcgggaagaactgcattgatatagatgtcctcacactgcaaaggacacaaaattcagtaaattcagacagaccgaatttgctatgcatgacaacaattctgataatgcatgcttgaaagttgcaaatgttaaatgcacctatattatgctcaagtgcctactattctaatctaattgctctctcatatgactaaaccctgtttgtttcctcataatttcacatgaataagttagtaggacagacgcttcacagcacagaaatctcacatgattaaaatagtatttcctcgaaatagtaaagcattccagcaatatgtatatggaaacagtacctgatcatcgtaaatagctcacacaaccatacaagagtcaaaactagaaatgcaagcaactgatcatcatagaactcaaatagaaaaaagaggatcccaatcattatctgcaatgatcacaacaaagaaattagtaagatatgagaaatctgttgagtagatacatctaaacagccacaaaattttcagctcattaaggaaaaaaaatatcataccggaacaaaaaccaatgattcgataacatggacaaatatcagttgaaatgtggggagttggtggcgtgcatgatgttgaagctgcactgaaattttcaatgaagaaaacaaaatattatttattaccataagataatatcataataacaagttgagcatctagcaggccaagaaacaacgtaaagcaataagcacaaacctgtgaacctaagcatgcgggattgcgtctctctcagggtaaatgaaacagacatggtggttgtgaaaaaaacaaagagtgacattaaaagtacaccacatttcgtcacaaaataatctgcaccacaaaagttgcaatagataagatttaaatacgcagaaatgaaaataagatatgaaaggcaacaaaatagaattatcaggtggcatgtaagctggtggaatcatctggtacaaatttataaagcattaaaaccactaatagctgaacacattataaaagtgcagtcattcaggtgaacatatttgggatggcaaattttgtaaaatcagcactatacaaacctccaaatcttgttggacctgctggtggttcatgtccgtaactgagatcataaagctcctttgtttgaaagttgtataaatagcctgcatatcaaaccaaagtacaaaatatgtgagctaactaagtttgcgacagttgcatagaacatcctgatagttaaaagtaccaaaagcaaaatcacatcagaagcataccatgaccaggggagttcactaagctgtttgtaagtatagtgtcatagccaacaatgctgttgattaaaagctgttgccacctgaaaggttaaaaaagagagattggatagcataagaaaatagcggtgggcatgaaagaacagtggagcattatcacattctgcagatacccactacagaagcaaaatgaaagaagacagaacgaatgcaaaatcttgtttaagttctcaatataaatgacagatttttaagtagcaattagatattccatatttgtaacgctagaatttttatgcagctctttgaaactcagtaaatgttccaactatttgggtacaagagcaatataaaacaaagatcaataaacaaaatgagaaaattccttgcatgccatccaaagtccttacacgccatccaaagtttatgagtttgtttcctaatatgccatgtcgaaattattgttccattcaccaatgcctaaacttctcttgccttttttttttttgccattctcatcatcctaatgttagcaaactgttacatgggcggtaagatgaccattgggccctccatatcttcttcaacttgtctccttcctcttccattctttcacgccacttcactgcgcctacctcccatgcaactgctcccccggttgcacatgctttctcgatctcattgccccacagcacacaaccaggcatggaaggcgaggacagcaccaccataccatctgtcatggcatcacagcagatgcaagcatgtgtggtatgcagcaatctgaatccattttttttcttcatgggcacggaaatgaaccccagtctgcagcaggcgtacatacggtgcccgtgctcctcctggcaacccccctcccccccccccaacaaactctctctctctctctcctctctttagacataacaaaacaaagcaagcactggtatctagccataccacacatagaatggccttgctaagctgccagttcaacagaggtgggaagtgagctgccaatccaccatgcggttcacgccatcataacctagcctcactaggtgaagggagcagtgatgttgaggccccagctttcgcatccaatttgggaggaactctctgaatctatgcgcaaagagtaatttcaccattatcacaagaaaatgataatgttcctagctgtgattgttgctagctaacggaagagcgacgtggatggcaaaagagggcaaaaaaatttggttcgatggcatatggtggaatgacagcttccaatgcatttaaaggaactcatgaactttgaatggcatcaaacaagtagacttgccagagcaatgaattacacaaacatgaacttttgggcagaatcaggacataaaagttagaatctaatctaagtagcatgaagtagaaagatgtcaagtggaaacttttggagacacatctagtgtgatatgcccattatgaggagcaagtactcgataatgacctatttccaaagcaaggatttcgagcagaaattgtgatatttatagtccgaacaccatgacgaactttggccccttctgaaagcaagaaatatccctgcaggaaagaaggcaacatataagagagttcttgaagtgagtgatagttgaattctccagtcatttctggcaaaagttgattcttactttgctagggagttcataaagaagtaatcaagcaacttaacaacatactagaacaaacataattaagttgaataggtgataacaatatgccaaaatgaaccttaccttctccacaccatataaataggtaggttcaaatgctttgcttcgtctctcaaaccactgtactgtaataaacaacataccacgagaagttagagaaaatgagacccttgtgagttgacagcaaagggcaaagataagaaaagtcatataggcaccactagatcatatgaccagtttactgccagacaacatacctattgttgaaacaagatgatccacgcttggtaattgaatacccttgatggtatggaggaagtcattccagtttgatctgaactgttgttaaaataatcaagaaaaaataaccctcggtaaatgagtgcatgttactttgtttaactaattaagtgatacagataataaaaagcacaaaaatcagcatcacacgaatcatgaaagagtaacttgatcaaaataaatgttatttcactgcatggcattcaaacattccttaatccaaaacttgatgaatatcatttatatgagtaagacatatgttgacaaatcaatactactagtccacaattctccaagtgttcctcacacagcaagttagatatcaaggtgacatgcgccaagcaaccacatggactaactactactccattacccgcataaatgattctcccaggtccaactatacaagaatcttttgtaataccagagtaacataaagggaacatgaatgctgaaatgataacaatcaacttcttaccattaattgaaaagtattatctgaaagttgttttatattcctccagaacgagacaacacgaaagtaccactttctgaataaatacataactgctgctttaaatgattcttttgcggataatggatggtatgcagaaccctccacagttgtcttcgaatccgatactcctgaagtggttgcggtaatagctgtgtcagctgcattctctggttgtggttcaaattccttgtctcccttccaagttctgaacataattttgctccttctagctccaggaccaacccaagttgaccaaaacttagatgccaaaatattgaacctatcaccattaacctctagaattttctcagctgaacgccccaggttctgaagatccataatgtaggatgcacctttgctgacccatagtccaccactgattatctacaaatttaaaggcagggaacaaacaagtcataccaataggaaacatgagctagtattgcaagcaagggaaaaaacataaggaatattatcacacttgagtcccaagtgcaaaaaggagaaaatgctcgacacacttcacagaatagcaaagagtctaacagcaagaaatgcaaaatagtgacaagcagcaatgtgtaccttgatttggacaagttgcgcttcaccaaattcaatcccagaaaactcgcttgaacagccaggcttcacatgaaaaaggtaactcaaagttgtgaggctacatatgcacactagactattatggaacaaggtaaaggaaaaagaaacaaccagataaaaaggtttggcatttttctttatttcaaatccaggatattgtgtttctaagttgaacaggagatagctttcagcatgtaaatatatatgaatgatactttttaggagatttaagggttgtagttgcatgcacttacaagtaagttatgatgtgtgcacaacgcagtatacttaagacatggaacggaatggtttatcaaacttctattttgttctagtttccacgtggtactaaatcaattgcataaggatcaacaaacacgtcaaactggatgcaatctacgttaacactaacacattcctagagagtatataatctcgttcatttgaagtgcagtagtatttaccagaataggaggggatcactactacaaagttagcttacgtagcaataccctcatgctttttcatctcgatatgttcacactataacagaaaccataagcatattcatacacattcgaagaaaaaaaaatcatcttaaagatttcatattaggcaaaccaaatgcaaatttggcatgctgtttctgggggagcaatgaatagaggaatagctggcatatcatagttttacagtagcgtgggactattccagaacaagcagttgcagagaagaacaaaaaactagcatacaccaaatctgaaacaatgcggtattgtaagtacctctgcaggactaagccagaagccaggatggtcaggggatcactaatcgaaattactgttacattacaacttaaaaagttgctaaaattataagtgtttcctattcagtagccaaactagagaaatccagcaactactgcgcagtgcgcacacaggtaactttgatactagcctcaggcttgctcaattttttaccagggcgtcgaattgacaacattggcgaacccaggccagggcagttcgcacaaaattcgcaacacccaggctagcacgaacgcgcgcagtacaagcacgggcagaagacgaagaagggcgaggaggggcgggatgctcacctgctgcacgaagttggtgtgcatgacgacgagcaggcagaagagcgcgacggcgccggcgaggtagaggtactcgagcgcgaggcggatccgcggcgtgagcagctgcgacagcatcccggacagccgcgcgtgcacccgcaggaacgtctgctccggatccatcccccccccctccgccctcgccgacgccgacgagccccaaaccctaaccaccgccgcgccgcgccgcgggcactccacctcccccgcccgcccgcctagggatcggaaaattcgaggcgttcccgatgaaactggctttaggcgacggtggaattattcgggggaaattggggagtgattttgaatttgtacgtttcgctttcccccctctctctgttcctcgcctctctgtcgtcgcacgagcactgcgagcctgcgattatctctgcgaggattctttcttggggaatgggccaagaggtgggtggggcccgcgcccgcaggaattttttttttcctttttttcctctggcgccggcacgttggttggccctggctctgcgagcggttggccgctgggattaggccgccacacgagcgagattttcttcttttttgtgtgatcggatggtctcgcgttattttcggaggagatcggacggtccagacgtccactttttttgctggcttggccaccaatttttaccgccgtggacaaattgattttcgcgtaggaagcacatagggtgatcgcgtcgaactatcggagcaaaaaataactatcgttttatgttgtgtgatgcttatattttaaaatttaccattaaaataaacggttggtttgttttacagataagagatgtggttagtgcaaatacccttatacattgtatattgtcaatttcaattatgtacaacataagtttaaaaaaggagcagttttacatcctcaaggagctatggtatcttttttttattgtaaatttagtatctcttaatacctagatactattaggtactaaattttacattaaatttttgatgtatcataatacctcatcaagaatcgtaaaatttctcttaaaaaagttaagtttagcaaccacttaaatgttcaagcataattataccaaacgagatcatcataatttgggataacgctagccggacctgaaaagctggtggtgaacagctcggcatgaattttagaagtgttttttgctggtggatgcaacctgataattggtgataagattaattaatcttctttcttaagttcagtagcaatgcttgaagcgctatcaggaaaagagaattgcaacatttaggaaaagaaaacaaaagagagctttttatctcgaaggatacgaggtggtgggctggtttccttccggaaacagatcaaagtgggcctctttccccgtgttggatataggctgtgttcggtgggagtttccagcactttcttattttcggcgcgcatgctttttaaactgctaaaatatacagtttttttaaaaaatttctatagaaaagttgcttaaaaattatattaatctattttttaaaaaaatagctaaaacttaattaatcacgcgctaaacactacttcattttacgtgcggtgagtgagccatagacgtgttagacccaaacattaaacggtattaggcactactatttgcattggaaataagttatttttcaatttgacgtgaagttttaaattcatttctcaaaaaaaaaagatataacgtgtctttcaactccacaatgtaaacttgattccaagatggtttgaatgacgatttctgctaaggtgatatctatgtggctagtttgattggggttatcatctcacatgttgttgatgtggcacttgcaatcataaaaagtcggtaggatccacatgtcagtgattatatggttaaaaaaataaaaaaaaatacaatgggtcccaccttttttttcctttctcttctcttctttctttcttgcttcttctcctcgttcccttctattcttcttggattattttttagtgtacctttttctcgctcacgtgcccaggacagacgccggcgcggtggcgggaagcgacagaggagaggcagcacagaaaggggtcgccgtgggctggcgtggccgagcgccgcaacgccctggtttggccagggcgctggtggcaagtaggcccgttgggcggcggcacagcagtgggtggatccgtggatgggcagagcgaggaggttgctcgcccttattggtagctcgggaggaataaacggccacacgacgatagccctgaatcaaggcgaagacggtggcatgctccggtagcatccctgagcagtcgaaggcggcgtgagctccatgcaatagcatcgacctcgatgccaactagctccattgtgaatttgtgacatccagattggtgtctagagtgagctggccttcgacagtgcacctcgcatgtcgtcatccaagtcgtttgtcacgtgtcgaacctagcaacaaggcaaccatgtcgatgctgccgccaaactcctcctccctcccgctagtggctgcgatgtacaacccgccgcgtccctcctcttcgccactgctccccaaccgtctggacccacgcgtctggaaaatgaatatttttatatgcgggcagcccaaccgtacaggataaacatttttccatacggtcggattaagtggaccgcactggataatcgattatcccgtacggtcaatttatatctcccgcacgcaaaaaaaaaacccaaaaataaaaaaaacgcgaacatcgtcgactgcccgcatccggccgccgctgcgagccgttgagcctgcccgcctcccccgagctctacggcgaaactcgtgaaactactacagaaactcgtcaacgagcggaggagaaacttatcgccgttgccgtcgcgagcccgcccaccgccgccagttgcgtaggctgccgcctcgcctggccgtcgcctcgcgcgccgctcgctgcttgccgctccttcgccgagcaacgcgctgccgcggccgccgcgctgtccgccgcccgtcccgcgcccgccgcagccactgcgtcgcctccgccagcagccgccacaccccttcgccagcagccgccgcgcctcgccgacggagccgccgccgcagccttctcccgccgagccgctactccctcacggggaggaggggagggggagcagccgccaccgccggggccgccgccgctgttgacggaggaggggaggggaaggaggagctaggggaatggttgagaagataaggtagagagagagaggagtggttgagggagaataaaaaggaaaaaagaagagagataatgtgaaaattttgaagtgagtggaaaggaaatgagttaagtttttttctgtgcgatccacttgaaaagcacgcacgtgaaaat

SEQ ID NO: 227 - DNA, 529 bp, Oryza sativa
aagctggagctccaccgcggtggcggccgctctagaactagtggatccccctgagcggtgtagccgagcgcggcacgggcgtcgagcgggaggcggtggcgcgtggaggcgtccacctccttccactgcgcgtaggtgagcgagcaatcctgcgtgtggtcgcgccccggcggcggcgccgtgaactctatccctggagccgcgatgggtggggaggggctggccatcatggaagaagacatgacgaagaaaggaagacgaaggagtacagtaggagagaaaaagaaaaaaaataatattccctaataggtgggtcccacaggagagtgagcctttattggggttcaagggtaaaaccataatttcacaactgtttctctctctattttctccagaaataataaaataatgtcgtgagtgtacatcagctaattaccagtgttttacgatgctctccagcatatacacattcttccggtgttcttcggctaattacatgtcctgtagcaaattttgccttatgttaatg

SEQ ID NO: 228 - DNA, 648 bp, Oryza sativa
atcattacagataatggcacccaatttactggtggagtgtttaaagacttctgcgaagattttggtatcaagatttgttacacatctatagcacatcctatgagcaatggacaggttgaacacgccaatggtatggtacttcaaggcatcaaagcatgagtttttgactgactgcgtccctatgccagcaaatgggctgatcagctgccataagttctttggtctcttcgcactacacccagtcggcctatgggccaatcaccgtttttcttagtctatggtgcagaagcaatgttgccaagtgaggtggaatttgaatctctgtgatttcgtaatttcaaagaggagcgctacgaagacgaccgagtaaatgatctcaaccgactggaagaagcccgagaagcagcattaattcagtcggctcggtatttacaaggattgcggcgctatcacaatcgcaatgtcagatcacgcacatttttagtcggagatatggttttgaggaagattcaatctacgcgagataggcataagttatctgtatttcagaaaactgcaactatagtgataaaactatcagtttgctgtaatggagtgtacaaaccatggggattcaatttcgattttgctttatgacccgtggttcgc

SEQ ID NO: 229 - DNA, 1586 bp, Oryza sativa
cccttatattatgggacggagggagttgtcattttcggctttctttttgcatatgcagtgaaagtagctaaatgagatgcattcttctgtcaggtcgaatgaggtgtctagcagccttggcccgttgggaagatttaagtgcattatgcagggagcaatggactggctcagaaccatctgcccgactagaaatggctccgatggttgtggatatatcttgttatcaatttactgtgtatctttaacttgtagttctgctaatttaagttctaatttccttttcttttttttttctaggctgccaatgctgcttggcatatgggtgagtgggcccacagggctgaaatgtttctcgtctggatgatggggatgaaaacaagctccggatattgggtacacaacagctagtggtacggaaccagcaatggtgcttctttagggctgttctttcagttcgttgcaaaaaggtatgcttgcatatttgttgatttctttttccatttcttcttgaaaatttggtcatgcttttggttacttggcatttgttttgcagtatgaagaagctcgtgtatatgttgagagagctcggcggtgtttggctacagaacttgcagcattggtataacattatagtcaaatatattctttacataatctccattattcgaattttcatattatggagacatttgtttttgttcatgtttagggatttgccattggtttttgggtattgtggggtggggccctaaatactagtagctcttactgtcataggcagtgggctgagttgtccaggccctaggggtagggatctgttctagaaggaaatttcggtgatcttttctgagacctagaacaaatatttggaaaacagacataatagtattcacgggtcaggtgctggttgagaatgctgtagaatggacattgaattgttagctgataggatgtaaaggctaaaaagatgaacttctgatttttaacagactgtatagatcgtttcgatggttggatgaatcatacaaccactgatcaaggggataaatggtgacaaagtaaatttgaatgtgaagcaattaggtgtaaaccttggaactcaatatttataagataatataacagttgaaatatctctcatgtgactggtttgaataaattggttaagtaattttctttagttctttttttacttagaaagcaaaggtgaatgtttatagtactgatgactaatatcccctcttagagttcagtaattgtaacagaacatccttgttttccctttcgtgatcctattcttgtgaccaggtacttgagagttatgagcgtgcttataataatatggtgcgggttcaacagctttctgagctggaagaggtatatcctcatttcggttactttctaaagaaacttattgtcttgctaaccaaatatatgacctggacttcaggtgattgattactgcactcttccaatggaaagtaccaatagctgacagccggagggaacttatccgtaatatgtggaatgagcgtattaaaggaacaaaacggaatgttgaggtcatattatgcttcttttaactg

SEQ ID NO: 230 - DNA, 1149 bp, Oryza sativa
agggtaatactttcgcatccattgattctcctgtataagctctcatccactatactgcctttgccaaaggcaaataaaccacctcggacgtcagggtgtcctgtagcatttcatattgttttgttgccacggcatataggcctaaaatgctgtccctgatcaagcacagcagtgccactgagaatggattcatctgtgttcactttaaaaagaccagctgctggtggggtcacaactcaccgcttgctttcctgatgcaaatttttcagccttctgttggtcgtgagttgtttgctgcgggctttgcaagttgctgggcccaaatgaatgaaacatcccaggagcaacttgtgagaagtctcaagactgcattctcatctcagaacatacctccagaaattcttgccacactgctgaacttggtaaattactaaatttaccattagattttttaatcatttttacactttgtcatcttgcttctaatcggtcctttgcgtaagtaggcagagtttatggaacatgatgagaagccgcttccaattgatacaagactgctcggtgcacttgctgaaaaggttagttttactttatgcatcttcggcaaattttcgtgttcccatgtaatctctgtttctgttgaaacctttgaacttttttcagtgtcgagcatttgcaaaagcactgcattataaagaaatggagtttgaagctgtatgttccaagaagatgggtgcaaatcctgttactgttgttgaatctcttattcatattaacaaccaattacaccagcatgaggttggtttctatgtcatacaaagctaagaagagttatgtgtcgtggcttgttaatcctcttgttatttatgcaggcagctattgggatattgacttactcacaacaacatttagaagttcaattgaaggagtcctggtacagttgccacgaacctatgatcccctgctctatattttgttggattaaatacattctttttacattttgtaaaactatcaaacacttttgaaaaatttaactgtaatgatatatgtaaattttgtggaaacatggatcactctagacttcatctaagatcttgcttcaatgcttgctttaattttgtgcaatcaggtacgaaaaattgcaca

SEQ ID NO: 231 - DNA, 726 bp, Oryza sativa
cctgtaagctatcatcaacaccttttgtcgtggatgcgcaagcaatagagtagaaatacccagttactgctgcaacaacatattttcctgcaatatctggtcgaccacgcaaagtatagcgggacatgacttcagtgttgaacaaggcccataagtgccatgccttgccccagtccttggcattaagtgtggcatttttgtaagagaccaatatttctggataaagaaaaaaagtatatttacatcaaaacgggcaggcagacaaaaagtaaaataactattttttcaagtctcaatactttggtaggcaatcttgcccacccacccctcaagagggaaataaactgaagttattcagaccttgaatagaatcatcgtctaacccaggtgataatgctctcttccagctagcaagtgtcaaatagacgcgagcaataagtggtactccagcatttgatgtggcaacctggcttgctaatgttccagaataactatttgttgcggtagcaagctgcacagacaaatcctataccacaaaaccaaaaaggaagtataaaaaaccacttaaatgcagaataattctgcaacttggggtcaaagacgaaggacaataacaagctcacctgtagcctgcaaaacgcgtcccttcgtttaagctcatctccaacagcatactggtacttcagggatgccatgactacttgaggatgtccatgatacagcgtc

SEQ ID NO: 232 - DNA, 2146 bp, Oryza sativa
attcctgcagcccctaattggatacgattatgtaaatagaaaaggaaactcgggccgtgtccagcagggtttttctccttttaaccttgtctttgaacctgtataagaatggtaggaagccccaagaacataaccacaactcgatcatcagatcaataaacacttgacggatccaatcctgaaaacaggaatataatatttcttctcacctttgctcatccactttatctcgtgtgctacgccttttctcattgctaatttctagaatcggcacatatgcacgtaaacacaagtttgaagctataatattcggtctggacacatacttggttatcttaatttcactagacttgaacaaacgaactacagtcttttctcttagggcaaattttatagtaggggtaattgtcacgtctaattttattcatataagataagaggtgatatatacaatacaccacatctacaccacctctatcattgtaacctaaataattttattttatttgtttgtccaatcccctatttctttcatctcattttccttggggtttgtgtggaggttgctccttgcatgaggggtggctcaccttctctttcctcaattattactcccacctcatcatctaatcgtatatggtatttttagagagaacacatcaagcatcatagtacttgcccttaggctgtgttcgggagccccacttccttgcacggaaaacgaaccagtccactagcatgtgattaataaagtattagtttttttttaaaatgaatcaatattattttttaaagcaactttcatataaaagttttgtttgaaaaaaaacacgcaccgtttagtcgttttaaaaacgtgcgggcggaaaatgagatgagtgagttgggaacttaaagaaacgaaatcagccttaggtagtcttcttttaggcggtgattttcccccacgtttccaacttcaactatcttgtttttcacgcacatgcttcctaaactgctaaacgtgtattttttgaaaaaaatagtttttcacataaaagttgcttaaaaatcatattaatccatttttcaagcttttttttttgctaatacttaattcatcacacgctaataggtaacatcgatttccatgcccagccttaagccattgcaaatttgtcatattagaaaaatgccactactgtttacaatatcggctagatgccattagaattttgtcaaattggatctataccatagccatcacgtttttagttcgggatgaaaacggagtggacacggatagataacgctcgtaccatattcgtttttttttttttgccgaatatggattatctcgaatatgatcggacacgatcacacgaatacggaaacattttttcctcagaacacaaaaaccaattcaacttctaatataaacaaatatcaacatatataattagctcattttatataaaatataggataatttataaatagttttaaataattaaataatattaatagtgtggactagtgtcaagacataactactattaaaatctaaaaaggtatattgaaggtcatcggacatccgaattattatctgtatccgacggaaaccccgataccatattcgtattcatatctgggagaaaatatccatagctgtatctatattcgaaaggtatccatattcgtttttatctggagcggacggaaacaactatccgcttcattttcatccctattttcattcttcatatggaccaaatacccttgaacttgggacccatctgtcagtttcatctccttcctccatccctcctccagcctcccagcgcctctcttatgttcgtctgcaacctccgcgcccgtgacaaccgcttcaggacagcttcaagtggtccaccatgtcggcgaggtgggccaggtacaccaggagcactgccgcagcgtaccataaaattcgattcgaagttctcatattttaaaattaatttttaatgactattttcgcatgcggtcctattaatgaggcgcatgcaaaaatctattttcgcatgcaaactcttaagtggttgcagcgacggcgacggcatcggtgggcggcagcggcaggcggcgagggcggcggatccggcggcgccgtctcggggctgcagga

SEQ ID NO: 233 - DNA, 3893 bp, Oryza sativa
cgattaagataagtcaatattttgtcatgttgctgccaaatataaacaaacggtaattagtatattaagtataggactccacataggaagaaccgaacaatcaattaccattgttgggaaaattgactctcggcatgaaaactttgaggcaattgcgcactgccgttttccacccattgccgcgtgattaacatgttttaactcatgattattaccataattatgcaatcacgtgcattgattggtagcgcccaaaaccttatgtttttggaaagcccccgattcccctcagtgcaaaataaaatgggaggccgaccctagaggaaggtgacaactttttctctcggtctcaaatctcaccaacacaaaaataacgtaatcccgatcaagctaaaccgctggaggggaaacatggtacagtccaggccgatgcaggtggaggccggaggacgctgccagcctgccacatcatctctgcttaaactactacgccgccaacgaacaccagagcagttcaagagactccatcctcttctttcactccggttccaagagaggaaatcgcaacaagtgcaatggcttcaaacaatggttagcgcccctaatattccgcattaggtgatcttttaggcttagcatattatgaatcttaagtagattatgaaatctacaatcattatgacttcccatatcttcaaatgtcgagctgacaatatatgaggtttttgggtcatactgggtaccactttcttcatactgttgccaagagataccacaaaatagctatagaatgcgtgtaccttgtggtatctcctcaaagaccataaaaggctcacaatttattatgtaaaaaagaacatatgtaaaacaacatttagaatctcaccagatcctgatacataagtaaaagatgaggagatatatagtctgaaacgagaacatattatttcacaatgggtactgcacttccagtgggaatcatagatagtgagttttgccaatacttttgagatttatgcaaacaggggacaagagatgcacggctaacactcacctcgtcaacacggatattgtagagtagaatcgaagagtcatccgttccaatagctatgatgttattgtcatgcgggtggaatgcgaggaaagttgcagagggtggaggtgctatgaaagtagtcatggtctgtgagtgattccacaaaatcagttaagtaaaagaaaggccatgatcgatgcaactatgaaataaaaaatattttccggaagtagtcatgacctgtgagagatcaatcatgaaattaccagattattgtgttacatgactgaagaagacataccttgaaatttaacatgttgaacaacgaaactttgccaccagatgcagaaattagatagcagtcatttttggatagtagactgcaggcagctgcttcttcagggttgccattagcagtgtcattcattagaatgtcactttccggttgccacacttgaggtgggacagatgtggtggactaacaaaaagtagtgatggttttaagaaaacaaccaaacagaactgcgctgttgaaatcaaaataatttagttctcctgtctaaccatgccagcaggattcttgtcattgctctcccatttccacagcttatgaacagcatttgagctgagagctaaaagtcccttcccactttttctataaagcagacagataacctataaagaaaagaaataaaacacaatgcttatcagaattgtataccgatctgaatattctagtgaactgccagaattgtataccgctctgaatacagcttataagttataccactatcgctttgaattctagtgtgctacatcacaaaaatgagaaatcacatccaatgtcaatatcaacaaatatagacgcttgtgaaatatttacatgcaaatatcaacagatactgtgatcttccttgcattaaatagaatgtaaggtcctatgtttcaggttgataacttgatatttcatggtcaacgtactaatacgaaaagatgcacgtgcaaacatcgctgaacatactttgcttgaagatgcttctgtaactggcatacgcagtgctcgaatacggccagagctaacaatgttcgccttccaggcctcatttaccaactccggggttctgctcacatgcatatatgcctgcattttcaatacaattagcaaataatattgaacagcaaacgaacaagaaagtgcagcaaactcagctggccactcatgagttcctggctataactacagtacacacattccaaatggaaccaagggcattcacaatcaggggctgcatggtaaaaaaaacagtggttatttttcctctttctcccagtttcttcatccaacggccaaccaagctcaacagcagcaacggtcttcctgtggcaggacacggcagtagatgggtgtcgaagcatctccacgtcatgaagaaatctgcagtgaaatgaattggcacagaggacagtgatggtggggagacgtcaaccagtactagagaacacagtcaagccagagatactcagagttttcaatttcggaaattgttattctgtgggagagaacaataactgaggcatcagccaagttagaaacatttgcatggtggtgtatctctgaggaatcggcccggcacccactgacagtttaaaccgatggagtcactaccaggtcaccagtgcacacttgctactgcaggctaaagtagcatacctccggtttgctcgctcatgtgtatattgattcacgagaacgtgaactcaaatcaagaaggaataagtttaaggaccattggtaacttaactcgaatataaacatggtgcaactagtagcataggccctcaagaggcctgtacctcataaagatattgtaatcaaattgaaggccaaacatgcatctaggtacgttttttgcaatatcaaatgatagacaggacatgaatttttctactcgtataaaagaagggaaaggaatggatataggactaattaaaagaagagaaactagaagtggctagattcgactcctagtttgtgaggcataatataggggaagtaattacctttactacaaaaagcaacatgggaatgaattaataagatgaaccaacgttggtctatcaatgtgcatgcatgatcagttcctacctcttggtagggtgagagcacagcttgttcgtcttgccatttggtttgaacagttgggtgtttgggatggaccgcagctgagttcatcaatgcagcagccacttcctccacctctgacagacgggcatctccacatttcagtactatggtgactttctggagcgaacttcttccaagcttctcgaagctaagcagcttgtcaaaaccaagctgggttgcatctttcaggaaccgcatatggacagcaaactcgaggaattcaagacttggcatgataatagatgctaagcttctattgtctgtgatgttgcacttgctgccgtgcagatcaaaccagatagatgtaccaagtatccttaagattctcaacttccgaaagtagccaacatcttcagtatgaatctttatgctaaccaattcggtctcatgcaaacgcagcacaaggcagcggagctctggcaacctcgcaagggtttccatgtcctgctctttcacaattagcacaaccacatccagacaggagaggttcggagcaagcgatgatttaatccatgctggcagtccagagaacacaaagcaattcagacacaggtatcggagatgcaggcaggagacagatcttgcactgcttgtcactctccttgtcactaggggtgggccctcaatgtgcaggtcccggatattgtgcagcttgcttagggctgcaggaat

SEQ ID NO: 234 - DNA, 1102 bp, Oryza sativa
acaaccgtcccactgttgacgcaataaccttatttttcctttaagaaaataaataattattgcgtaataaatcggtaataattctagaaattcatttaaatagctcaaaacttctaaaattcatatttaaatcgtcctcgaatctgtttcttccgtgccaaagaatggtgacaaatcaaccacattgaatgtgttactaactgtgtaatcaccgggaagatctatcttgtaagcattgtcagtgattttctccaaaaccctgaatggcccatctccatgtggcataagcttggacttccgcttctccggaaaacgatccttacgaaggtgcacccaaactaattcaccgggttgaaatagcatcttctttctgtctttgtttgcctttgcagcataggactgaattatcctctcaatggtctccttcgtcttctcatgcattttcttcacataatctgcacgctttgttgcttccatattggcacgttcttgaagtggcaggggcagcaaatcaagtggtgtgattgggttgaagccatacacgacctcaaacggactgagttgagtagtagaatgtaccaccctgttatatgcaaactccacatgtggcaaacaatcttcccattctttcaagttcttcttaatcatcattctcagcaacatagaaagtgttcgattcaccacctccatttgtccgtcaatttgggagtgacaagtcgttgaaaacaacaacttagtcccaagcttagcccacaaagtcttccaaaaataactcatgaacttgacatcacgatctgatacaatagtgcgaggtactccatgcaagcgtacaacctccctgaaaaacaagtcagctacatgcgacgcgtcgtcgcttttgttacagggaataaagtgtgccatttttgaaaatctatcaacagctacaaatattgaatccctccccctccttgtcctaggcaatcctagaacaaagtccatactaatatcctcccaaggtgcattaggaacaggtaatggagtgtacaaaccatggggattcaatttcgattttgctttatgactagtgacacacctttgcacatacctctcaacgtcatgc

SEQ ID NO: 235 - DNA, 528 bp, Oryza sativa
gcacatgatacttctcccagcctttcccatccaaacacttagaatatggatctgaaaattcactatccttagagtacaattctttcaaactctctaaacttgaaactttcacgtctaattgagtcaaaagcacactcttgcgagataaagcatcagcaaccacattctcttttcctttcttatatcgcacaatgtatggaaaggactcaataaactcaacccacttagcatgcctacggttcagattagcttggcctcttaaatatttcaaagcttcatgattagaatgaataacaaactccttcggccaaagataatgttgccaagtttccaaagcacgtacaagagcatagagttctttatcataaacagggtaattcaattgtgcactaccaagcttctcactaaaatatgcaatgggcttaccttcctgcatcaaaacaccaccaataccgattccacttgcatcacattcaatctcaaaagttttagtgaaatcaggtaaaataagcaatggtgcttcagtta

SEQ ID NO: 236 - DNA, 1647 bp, Oryza sativa
aatcaattgtgttaacatctctatttttaagaattgggatgatgagttggcatttggagtccaccgttacatgtgccttccttgggcaacttagtgcacatcatgacctccagaaatgtggtactgattatcataacagatattatagctccataaatcactttccatgagatgttggtgtcacttaactcaataccaagaacaatgttaatggctgccaagaaaatacaaatcctacctaaccaatggtggtactggttccaacatttccgcacctgagaatccttattaggatgaaggaaaaatgcaataacctgtaacatgtagtacatccaatggcttcagacataacagaaatgaatcaaatgataggcattagcagtcaggatggcaaaattagttgcatgatcatactaacctgaagagaaccgagagcaagaactgaaatgccaaggcttctatgcgtagtaaaatttgaataggtcctgttgtacaatgcaatgccagaaacaacacccgcaaacccaatgatgtaaccaagaaattgcacgaggacatgaaggtaataccaaagtgggtccttatgtctgagataacgagcagcaattgctcccagtggtaccagaacaccccagccaaaaattgcaaatgcaccatggttcctcttcaattggtatggataataagtactaacagaatcacctgcgtagaaaaaagttaggttcaggtagtattgaaaaaacattttctaaaagaaaatttacattgcagtaaaaaatgatgtgaaaaacagataaggcttgcacttgtactatcttttatgttgaacttttgctgatgtatggtgctaatattttattacttctacaaaatcagttgaatgtagaaagtgttttttaaatgtttatgttatgatgtggtatcaccatatagttgatctggtaaacattcttcttttacgagttctaacaaacattggctgaaccttattatttaatgagattgtctttgtgacaatcaggtaactgattcagctagatcgatcgatttttttcactgtatgcattgcataatgtattagctgggatgttttttcatgttatccaatacaaatgtcaacaatttttagagacttggttttatatccaataatcaccctcttctcaactgctcaatacataccctattcctttgctgtctgctatcaaacaccccaggaatttagccatttatgtgaaggccccatttattgcatgtaaaaattactccactcctgtagaacaacggtttcctgtgatggagttcaaattcctgcattccagatggagttcaagttcctgcaaatttcttgtgacattccaagtggggctaaaattgtctctgctaatttttctacttctatttttctggcgttatcttcaggtatcactgatcagattctgttcagcggtctcaaaagtctaatgcatattccccttaatacaaagatgcgctccctgtgtattcccaaaaaaaaagtctaatgcatccttctgagatcagaatttaaatcgtatttacatatgtaggtaatattcagaaatgcaaatgcccggtttttggttaacttttctaatattttctgttttggggggcgccagatacaca

SEQ ID NO: 237 - DNA, 564 bp, Oryza sativa
agatgtcaaactgacatgttccaacattgaattgcaggagatggtctggctggcatgaagcaaggggatctgataatttggtatgttgagcagcagaatgcccaaggagcctatagttctacagcagaggtgaaggaagaagtgaagtgcatcaaggccatcatagaggtaaaagccttcattgatcttatcatctatgtatcaatttgcctgcattgatcctatcagttcaacagtatggtatggaaattaacctaacaagactacatttaaggcatttagctgcatcaatttgcctgcactgcaagctcaacattgaccatttatattgagcattacctcagctttccatgttgctaaaagttatcaatcgatttgcaaatgcagaggttaatacagagggatggccatctcatagtgatagacgaaggagcagccccagcggctgacgacggtgctgcacgaagaacatcagagagcagaatcctggcagttaatccgaactatgtcatcgattaaccatctgaattatgatacgcagctaacacaatccaatcgatgtgg

SEQ ID NO: 238 - DNA, 745 bp, Oryza sativa
aaatttggtttatcaacattttgggaataaatggtttacatttgctatctgcgtcgacattttaactatttgtactagccttcatattgttttttgatatgttattactggaaccatgtgaaataaatctgtgaaacttgaggcctatgaagtcaacaagacaatttaatctgatttcaaaattatttaagttatgattgggccatcgatagtaaaaaagatagtttgatttttcagtgctattagcctttgtagtcatattttccttttgttataaggacatattttgaaataaaaaaaatggatctttgcttccagatgcaccacttgtgacaattgagtattttgttcctcaattgattgttataacatctaaacaaagaccaagaaaactgacaattcatggaagtgatggcaacgattatgcattcttgctgaaaggccatgaagatttacggcaggatgagcgtgtaatgcaggtttgtatatatatgacaatcttttcttgatctgattctgtgagttcttttgatcaccatagaacctggaatgatgagcatatttttgtattctgtacccatcaattgctttgaactccattctcctatgtggagggggcagctctttcgtttttcagtacccttgtgctgctttaccatatgaatagtaatgtttacgaatcgtcattttctttatctttgattatacacaattaaggaagactagtaatcaggacttgatcaat

SEQ ID NO: 239 - DNA, 700 bp, Oryza sativa
gcaaacgagcgcccaatgtcaactcccactagatatagaagcagaaattaacagaaaaatataattgcatgatataataaggatgttgcagctttgggatttaatacagcaaaaaaaaacatgttgggttcaaaaacagacactttttaacatgtgcgtactgtttttccaagtaaagatccacaagtaaggaaaaccagaatatatcacatcataatcactacaataaatggaatggtttacaaagttcacacttacagctttgttgtcaaataacttcggcatactcctatctattatatcctttaacatccttggtgctaagggtacagtatcagagatcattctcaaactctcatgcaactgagaatagatttccttcttccttgcaagccatctcggttggccgatgaaagcagtaagtgatccaggtggagtgaagttgttcacaagcatctgcaaacactctcttaagaactgatctgccactgcagcctggatggtaaatcgattgatcagaagcttatatacagatcatccagggcaatgtgcatgtggttgtagaaaataataccaatctggtgattaatgacaaaagagcatcccttgtatcgctgttcaagtaccagatagacatcgtaaatatctgaaaaatagtgccttcagtaagatccagttgattcagcaaaagacataaagt

SEQ ID NO: 240 - DNA, 7027 bp, Oryza sativa
cggaccaattaagtggcgcctgcaaaaaatcattttcgtaggcgccgcttaattggtccgcctgtgaaaatagattttcgcaggcatacatcaaatttcaccccaatttatatttttgtaggcggtcatttggctctaaatgttatgtccgcctgcgaaaataagacccccacgtcgggaaaaatactttttccggtagtgcaaatggctgctctccgtggctacttccagtcagccaaggtcgccgaggagcaggcggtggagatagccgcagtcctggcacctggtggcctcccgcggtcccgccgtgctcatcagctcggcgccgagctcaagctcccgcgtgcagcaggccgcgccagcgaggtccagctgctgtgcaagctgcatgaacaacgtgtccccggtattggcgcaccgccagcgccgccgaccagctggcccacggcgtggaacggaccatgcatcatcgtcgactttcctggcgccggcatgtatggcgcggccggcgttgtgacgaacccacgagcacggaaaccagcccgagcgcgtccacgccaaccagctgcgtgccatgcatgtccgatccacagcctgctcgattgccatagccgctccacgatagtcgtgtcacggcaagcatgctcccgagcgaagtggcgtacgtgcatgcatgcatgcattgatgcaaccgatcgatcgcggaggcgcggagcttgagctgaccaagcagacatgtagcagctagaaatggcatgtctaggtcccgtgagatctctcaaggaaggagccaattaatattgtggcggtgcgatgtggtatgtctcaatgaattccggactccgtcttcgcagcggcagcatgcaaaggtttcgcggcataagcgttgccgcgcacaagggccgctaagatatatatctaaggacaatcaagcggcgacgacggtgaggacttgtgggttgtgttcttacccagttttcctcgattttcaaaccgttaaacggtgtgttttttataaaaaagttttctatacagaagttgcttaaaaatcacattggttcattttttttaaaaataaactaatatttaattaatcacacgctaatggattgttctgtttttcgtgcgcactgtttcggttgggaacacgctggagcgaacacagccggtcgtgtgcgtgtggcagcgtcgaatggtcggcagacggtggctgctgccagcaatagcggcgagcatatgcctccaccgtaccgtcggttgcacggccacggaggctagaacgagcgcatccacgcggaccagatgtgccgccgccgcgttagaaccctgccgagagtgccatgggcggctcgatcggcgtgcgaaatccacctcgaggctttccgcttctatcattgactgggggcaccgcgccaccgcgccgcacgcctagctacttcaaacggcgccggggcaggagaacgcgcgagctggtcgcgtcctggactagcagtgagcgagcttggacggccgccagcagcagtggcgcgcgattgtctctgtagcagcgctgacgagagtcgagagggccgcgaccacgaccacgcgctctggagtttctcggcaaggcgccggcgagcgcaataggccgcctatcgatgagttcccacgttccacgccagctgccggcggcaagcgtcctgtggttgcggagagtacctccagcgccttctccttcacgaccatggaaaccgtcgaatgtttggagttggcacgcgcacgaactctagttctgagactcttcgtcgaacaggcgtgggcgctaatatgtgaaaaccacgattcaaacagctggactaaactgcaaaattttgaagtgtcgctactcgcaaggggggctcctagcgcgcgcttgcgccagaagatcaagtcgcgagcgcgtggagctgactaggagtcatttcccttttgctacgttcaacccgtgtaagtgcccccctcctactgatactaataatgtgattagagttaattgcatgattaacgctaataaatacagtactagctaacatgaagatttaaattttagattcggagtcgaaacttttgaaatttgaaactaaaagttttgaactttggacttgaaagttctagaataggaattgatttttttttaaaaaaaatttggagttgaaagttttcaattttggatttgaaagttttgaaaattcggatgaaagtttttaatttttagttgaaagtttttgaaaatttgaattgaaagttttaaaatttaggttgaaagttttaaataattgatttgaaagttttcaattttaagttgaaagttttcaaaatttgagttgaaagttttaaaattttagatgaaagttttcgaaaatttgagttgaaagtttcaaaatttaggttgaaagtttcaaaatttcgagttaaaattttcaaatttgagtttaaagttttaaaaaacgggttgaaagttttcagatatgagtactcatgttaatcacgacacctaatcaaaaattagaactaataatgaagaattatagcgttaattaagctgtagattgatttgcctcacttgcccgactgccccttcgcgttaattcctatctatactagcacatgcatgcatcggcgctttcaggaagaaaaaaattcctgcacatgcatgcgtcggcgctttcagaaagaaaaacaaaaaagtcaaaagtgtggttgggccttaggcctggctaatgatgggccaaaacagaaacgcgcgctacttatttatctagtgcgtctgcgcctgcgccgattagcaatttcgactcgcaagtcgcaacgacgtatcccatatccttccaataagcaattccgaatttccgataggcgatcaatcgggcaccggaggcgaacgcgatcgctccacctccacccgcgccaagccagcccacccaacctaatcttccttccacgtgcactttctttcctttccaagcatgagcccaacaagcaattcctcctttccaggccatgagcccaacaagcagatctttagcccgtccaaaaaatcatatacgaagtactcaaatatcaatgtacaaacttttcattaatatacaaacttcccattcaacttttttctatgtacaaactttctttgtagatactttgttctatatcgatatattttcctatatgtatatataccttctatgtagataattttttcatgtataaactttctatatacaaaatttctataaatatttaaacttttaaattttgatgatatagaaactttcacaagaaacatgccactttctaacaataaaaatttcagattcaattaaaaaaaacaacggtattcagcccaaagatgacccagatagactcaaagtgtgagcgcgcaacccatacgttggaaaaaaaggaaaccataaaacaggctcaaaaagagaaaacgaaggaaagatggttgatcgctcgcacgatgcgcgcgacccctcgcgtgatagccttttcgctgatcttttgtgatggctacgaatccttgatgggttctatggttttgggccgaagcctgcagccgattaccgccgcagcctaaaatgcggcctgacacagtgacactgagggtgtgaaaatatgcagttacaccctctgtttcatattataagccgtttgactttgtttagtcaaacttctttaagtttgattaagcttaaagaaaaatatactaacattttcaataccaaacaaacatattagtcgaacctaaagaactttgatttaaagaaaaagttaaatggcttataatatgaaacaaacgagtacaaattaggcctactatcatagtgcgtttcatatatactgtacatatacattgacaagcttcattgtcattgggtgatccatgagccctccagatggaatctgcatgtcaactgcttgctagagtattgaattattttccagctgacatcaaattatctcttggtctataatgatccgaaccctagttgacactggagctgaacttgtaatggttatatctattgtctggcttgattgatccatacatgtagatgtctcgtcaccacctttttcgacttcattacttagctcagaaggcttcttaggatcatctaataagatcacgcttccagaactcagcattgcggcgacatccggcatggtgggccgaactgttggatcttcctgggtgcagagcaatgccacttgggtgcaccgaattatctgatcaagttcatacacattccctaatgatggatctacaagctcatgcaaccttccgtccctccacatatgccaagcctgaaaaatatgtatatatatcctttaatataattcacacatatatttgaatatatttagcatcaaatgttgcaatttagatttataactagaaaattggtgcgccgttagcgcaccatccatatagcaaaccatattaatactatatatactatttattgttattcgtaaaagcgtaaaattttaaagagatattttagcagtttttaattttatgcctacaagtctgagtaaacattatatttgtaaatatttaaattacagaggaaaaaaatgatgtcaaatatatgttggttgatggtcgatttaattattattaataagataaggctaaaaggtgaagtcttatatgaaaattgtttgggactataataattagaggtttcttataatagcactaacagttgggattgtttttttaactgcttatgaaaaaaaagggaaatgattttgttctttttcttcttcccatatttttattttctttcggcctaagtataacattctaaattctcttcatttattttacttttacattattaaatcctcgatggttaaaaatcttatcatttgtatctctaccacgctctctctttttttcccaatatttgcttatattctcagtagtcgaaaatattgtcatgactcatgactacgagagggccacatagttcacacactatttgaagagccacatgtgaatggagagggacacgcctccatatcttcttttgtgagtagtacaccatttagatgtcacaattcgtagcctcatatgtataatttggaaaactatagctataccacctctcttagggcgttcgtagtgcaagaccctcctcaaagtatcacgtaggatgagctagcatatctcaaatttgtttatcctataatgcaaagtaactctagagatattcttgatttttcatgccgggccctcatatttcttactttagttcttatgtttttcaaatttatagaatagtccaatattacactaaataccctaaaaattagaaacaaatatacaatctcacatccctatcctttcccaattccctgcttccatatcctagaaaattggcgcaccatcggcacaccaacttatagctaggatatatttactcatttagaaaaattattgttgttgttgtctagagtttcaaatgcagtagatttagaagaacctatttaatgaattttgaaaagattgaggaacgattaacttatagtaataactgtatttatgtaaagatttaagcgttgtaaaagaattaatacataaagcaaaattatgtataaaaattatgtatagtacttgcctatttgctttcaaacctttgtttttctcttccattagacagagtaattaacacctattattaattggtaagattagatcattagtggaccgaaaactaaaggatatagtttttgacaagtctctctaagagaaatttcttctgctaatatactagtgtcacctactcctctctgtagtctcatatacgatactcccccatcttaaaaataatacaagctaatcataggtacaatcaaacatagttagagcaatattatcaacaaatagagtaatatggttaattagtgtatgcatggctaattaattcttctctaccgcatttagatagccatacttctctgctgtatattataattcaacttgaaaaaagttttgctaatgaaagattaacttgtttaagcgtctataagtaccttgaacaaatactttagaagacgtgtcttttgaattagtacaatttacagaatttgtcaacctatagaaaaattacgaaatttatgtaaggcataattttttaggctaatgactctaattgtcagcttaatatgcagagccagtctttgtattaaaagattactctttgtattaaaagttaaaaccagtcttaaaaagttaaagcatcaaaggtcttggaaatcaatatgtgactatgtgagtactgacatagtttgtgcgtataaatacacgtgaagaaccatgttatatcttaatttttctagagacttcggaagggttacatatccaacttcttcacaagggtcaggcaaggtgatttattgactcctgacttttcctaagagttcagtggacagaagaatgcagtttaattatgtataggggaggacacgtggcataatttcagagtagccctagaaaattttgtagagtgccacgtggcccaatggcagcctggatgctgcaccctgaaatcgttatttaagatgtgggactagtaactcagagaatcaggaacataaaaataatgagtgttcgcttacatcccgtacaagatcacctatagcatccctctgcttataaagtatggaattctttcgtccactaatgatcactagaaccaagacaccgaagctaaacacatccgtcttcactgaataaactcctcgagatgcatactccggagctttgaaaccactgaataaagaaagattaaaacagtcaagtcaacacaagtaaggaaacttatatttatgacatgtcagaaaactcatacctagtgcccacaacccttcttgtatgttcttctgcaacttctgaactcagtgaactggatgatccaaaatcggaaatctttgggttcatgttataatctaagaggatgttatctggtttcaaatccctatggacaatccataacatgga

SEQ ID NO: 241 - DNA, 11329 bp, Oryza sativa
tttattatttgtcgctgacatgtagggcccatgtgggccccgctattttaaaattattcttttgtgtgtagctgacaggtgggcccatagtttttattgttttttaaaatataattgccacgtaagcgccacgtcaataccacgtgggacagagacctagtcaaacaagccacgtgggcgccacgttaaccaaaaccaccttcaaaaccgctgagggatcacgtttgcccgattttcgtaagttgggggacgggtcgtacccggttttgcggttaagggacgaaaatcggactggatgataaatagagggacccaaagtgaacttattcctaaatagattgcattatgctcgtgggccaaaaacaaaggtactccgtaccagttagcgagtgggccaaaaggcaagccggcacatgggccaaaagacaagtcaatacgtgctgctcatggctcatgagatagaaaccgaaccgatgccaatcgggaaaaacagaggcagatcatgcggcatcgttctggaaaaggaaaacacacgtagcatccaagccggcctgaaagcgatcgcacgcggtgatgaggtggcgcgatcgatcgtgtactagacgcccgcaggtgaggtggctgcgttgcacggttgcgagtgccagcccttcctgccggtgctgttcacatgcagtgttaagtgctactccctccggagttgataatacttcgttttggataaggacacggtttttaaaaaacaactttgattattattttctattataatatgtataaaaatattaacaaatatattatcttaataaagtatttttaagactaatttatacatgtagtcaccaaatttgaaagataaatattttaaaaatggttcataatcaaagattctaaagtttgatcttacccttgtctaaaacaataagtattattagcctggagggagtaactcccagctaatgcaatgcgaactattcacatgcagtgggaaggtaattataacttactgtgcgtctgtgctcattagtaaaacggtaaaaacgagtattactcacccgtcccattttaatcgcagtcatgagtttccgtattcaatttttatttattgtccgtattatttaaaattattttatgattaatatttttattgttattagatgataaaatatgaatattactttatgtgcgacttatgttttttatttttttaaaaaaagtttaaataagacggtcgaataaagttagacacggaaactgattgatgcgtttaaaatgggacggaggaagtatatggcaagcaagcaagacactaatcatccaggtagcagagaactaacattgcaagtttccaacgtcttacagatgatagtttaaagcaacacaaattattttcgctcaatcacttgtcttttctgagtttccattggtagtatcaagcagtcctcttcccagggagcagacctgattgaaaatgagagataaattaggaaaacagaaaagggattgcaagtgtggataaactattcctggtattaaccgaagagagtaaagttaggaataccataataattgcatttccagagaattacagatagaataacatcgaacacgatttaccacaataataaccctatttattaaagtgcatgcacatatttcataagtatactccatcaaaagaaaggttgaggcgcacattatatatgtaaactagattaaaaggaaggtttaggtacacatttcatttgttgggtcctattttataaaacacatttttttataactttgataggaatgtaattattatgaaatagagggagtaatacctagtaaagaggtaggcacctctgccctcttcagcttctccacagagaatttggtagaagtacttgggatggtgatggtaccatcgtaccccttgaagtggtctgcggtcaactccagctcacaacggtacccagtaacctttcaatagagaaaaaccgataaacaaaacaggagtataatacaaacagcattagtgtactgtatgctggagaatggagatgaataggagtattaccttggtggcaacccacctacttcctggggcgaaattggtgggagtgtatcccttggactggagcatcattaccatggttctagaacttgtagtcaatgccttcccgtgtcctggcagcagagccaccgagcccaaggcagagcacaccttgcactatagtacacagcattcaacatacagatataaaagtagaaaacgattgtgtaaacaattgtactatgtattaatggggtgggaactaaaacacaaaacggagaagtagattagcacataattaattaagtactattagctattttttaacaattaatatgttttaaaaaatcaactttctatatattttttctttgcaaaaactcacaccgtttaaaagtttgagaagcatacgcgtagaaaatgagtaagttgatgttgagaaatggaagaaaacatcacaataactctcatatttggttcatggcctatttggttcactaccctaccagcacactaaatgaaagaattagcagtactaaaatatagataagatttttgacacttctaattatttggtaacttaaagtttatattggtcatgattggttcgctatcaacgtagagtcaaattgtgaaactatagtgaagaatattctaaattgctagcaaatttagtatgtgtattactatatagttgcatggcttcaaaccaaatggattgcatatactatttagcctaccagaatatttgtaggacacatttagtagggcgtttgatatcaaatccaaaacatccctaaataacacacaagaacagggcttttttggttaagaagcaaatttttgctaacaaaaatattagtagttgcataaccttggtaggttttagtactaacaaatttggttgtatataacttgaactaatgtgggcaaaaaatggttgcaaaccaaataatcgtttgacactgttaaaattgccaaaattttaattgggcaaaattagcttaaaaccaaacaagcccactatttagactaccaaaaccacacaagtgctatttagagtaccaaaaaattgaatgggtaaaatttggcactaaaccaaagcagtcctaaatgttgatagtactgtgaaggaacctctaggatgtatccaaatagaacatattcaaccaattgtctaacctcagtccaaactagtaccacctctatcattcaaagccaaacaattgccatatttactatttaaagttgccgtttttaaagatgattttaagttgccaaatcgtgactagcagtgcatgctatgttctcaagagaataaactccaacctggtggtggttaaatcaaaatctgaacctcaccttacggactactacgtgtcctgaatccgggcaggtggggtagcaagtatacctccactggttcttgattccgggcaggttggtgcacgaatctggcccaggcacaaggcacacgtctctggtggtaggctctccacaggtgtcacaagaaagctgcaaacacagagaacataaaaattccagataaacaggagataaacgaatcgagaattcgagggtatcaagccctacacgttaccttcaggtagtacgcggcagcaggaccgttgaaacctccacccactggctcctcaacgaaaagtccaaagaaagccatcgcgttgcgagagatgcttgaggtgagaatgagattgattcggagcttgagacgagacaggacgcagcgtagagaagaagacgagatgggaagaggagaggaaggggagcagttgggcgaccagggcgaggctacgggctaccaagtactgtactgggcttgtgttgtgtcagctttttctttttaccattcaccgcgcaatccccgcttggagccccagctgtcagtgcctcgtgtatttagataggaacactctagaacacgcagaaaaagtagagtaaacgtactagatgaaacacaaattcaaatttaaagtgctactcttatactaacttcagtagtctagtattacttgtggatgacgaggatttcatatatacgtggacgcatgcatgccatgcatgcgcatgcagcatgtacgtcatgcaaccatctaggcatctaggagtacatgtctcgattctgtgccggcgccggcacgctagctgcggtgtctggtgttcatgactcgcgttcgcgtactccgtcgcccccaatgccaggatcaggacatacgcgtgcccgcgcacacgcgcgacggcggcggcgagacatgcagctgacgctctaaggacacaacaatcacaacggagcgtgcgctgcggcgccgtcgcgacgacggcacggacaagggatgaacggcctaggctaggcagttggcgcggggccagttggcgccagacggtactatctccatgtcgcggatggacgtacgctagatcgagcgcatccacatagacaaggatgcgctgcggcgttcgagtcctgacgaggttgccatgggcgcgcgcgcggctcgacgtacctgcaaacaccacctcgcgacgcgaggcgttccctgactgcggacggcactacgtacagcagcggacgacgaggcgcacatagtaaccaaccaaactaaaccaatgcatccggcaccggcgagctccacctccagccatcacaataggcgtctcctaggagtgcagactgcgccgccagcaccaccacagagaccagccagaggcccggaggccggagcgcgtccactccgaccagctatgccatgttcgacgcctgcccctacccgagagggcccaaaggctgctcgccgtggctacatctagccaaggtcgccgacgagaaggcggtggaggtagccacgcgcagtgcacctaggagctgctcgtggggcctcgatccattccctggtggcctcccgccgcatcagctcggcgagctcaagctcccgcgagcagcaggcctccaacgagatccggctgctgcgcgcggtcgcgtccacgccaaccacagccacgccgcggcgtggaacggaccatgcatggtcgcgacatgccggctggcatggcatggccgacgttggcacgaaaccacgatcatggacaccggctggagtgcgtctgcgatgaccagctgcgctccatgcatgcatgtctccgacgcagcccttgccgaagcgcgcgcccacaggctgctcgccgtagcctctccacaatagtcgtgtcgacaaggcaagctagcatggagatggattcccggcaagcatgctccagagaagcggcgtgcgtgcatgcatgcatgcatgcaaccctgtatggagcttaagctggcgatcatttattcatttgcatatttgcatgcatcattggaccatccgtacgtgaccactatagcagcgcatgcaggctgcagcagataacaactggcatttctatttctcgcgcgactctcgtggaaggaaatcggtagtagcatgcgaaggtttcgcggcatacgccgatacgcgttgccgcgcacagcgcacacgcgcgagggcggcgaagatagcaaaggacaatcaagtaacgcgcagcgacaactccggcaacgacggtgaggacttggccgtgcgtgccgggcacgacgaattaatgactggaagacggtggttgctctcgctacgatctccatgcatggctgctgccagcaagctcagaggcgcgcctccaccgtcggttggatggtcacggaggccagatgcatgcgccgccgcgtctaccgagagtaacagattaagatcaatctggggtggtgtttgacgtctgctttatctcacggtgaggagaagcaaattaaaccagtcctgacacaagggcggtgaaaataccgcacactactgtattgtacaactttatggaccagatgttgcgagtcgacacgagacgggatgaagttgaagagggaggagacgagaggaggtgcaagtcatccccaaggctggcgcggcagggccagctgccacgctgaggtgcaccccatcgacaacgtgttgtccacatggaccacataggtggtggaggtgaaggtggacgacaaggcaaatcatacggcttgtgcggatgtcgacatggccggtgatgacgatcacaccatgcttaggttggagcagatcattaagctatttcacttacatatgggtcccacgtggtttttttctttgcttcttgtgccacatcacccaaaaccacctttaataccgcgttaggactacctttgcaatggttttggaagatgagggatgcgttatacccagttttatggtttaggaaagttattcaaactcgacgtcaagatgaggaacctaaagtgaacttattccttcttactacgcaagtagaacgggcatgggctcaatcctaggtagaggcagatatgcttgccggtagcttcacggcaagttgtgcaccgtagctgacaaggacgtaccaaaattattatcaacaaaaaaaaacccagatacaagagatcacccccaaaaccaagattacaagaacaaaacacccccaaaccccaaatcacaaggaaaaatactaatacgccacccaagaaaagagctaaagctagtgcatacatgcaaaaagtatgccgtcgcggctccactgaaaactccccgatgggattgagctcgaggactccctccatctccacggcggcgaagagcccgtagcgaggcatggtgagagatgaggcggcgcgcgttggagatggggagagaatggagttgaggaggaaaggagtgtaccagacaagaggagcttcgagaccaatctggggtggtgtttggtgtctgtctgggatggtgtttggcatctgctttatctcacggtgaggagaagcaaattaaacgagtcctgacacaggggctatgaaaataccacacactactgcattgtacaactttatggactagatgttgcgagtcgacatgagacaggacgaagttgaagagggaggaggcgagaggaggtgtaagtcatccccaaggccgtcgcagcattgccggagggcagcgtctgctgccacgcggaggtgcaccccatcgacaacgtgctacccccagaggtggtggaggtgaaggtggacgacaaggcaaaccatacagcttgtgtggatgtcgatatggccggtgacgacgatcacgccatgctcaggctggagaagatcattaagctatttcacttacatatgggtcccacgtggtttttgtttgcttcttgtgccacatgacccaaaaccaccttcaatactgccttaggactacatttccactggttttggaagatgagggatgcgttatacctggttttacggtttagggatgttattcaaactcgacgtcaagatgagggacctaaagtgaacttattccttcttactacgcaagtagaacgggcataggctcggtcctgggtagaggcaaatctgcttgctggtagcttcacggcaagttgtgcaccacagctggaacaagtacgtatcaaaatcattatcaaccaaaaagaaaccttagatgcaagagatcaccccaaaccagattacaagaacaaaacatccccaagccccaaatcacaaggaaaattactagtacgccgcccaagaaaagagctagagctagtgcatacctgcaaaaagtatgccgtcgcagctccattgaaaactcccttgatgggatcgagctcgtggactccctccatctccacggcggcgaagagcatgtagcgaggcatggtgagagatgaggcgacgcgcattggagatggggagagaatggaattgaggaggaaaggagcgcaccggacaagaggagctttgagatcaatctggggtggtgtttggcgtcagctttatctcacaatgaggagaagcaaattaaaccagtcctgacacaagggtggtgaaaataccacaaagtactgcattgtacaactttatggaccagattttgcgagacaggacaatgccgaagagggaggaggcgagaggaggtgtaagtcatctccaaggacgtcacggcatcgccggagggcagggccatctaccgcgcggaggtgcaccccatcgacaacgtgctgcctccagaggtggtggaggtgaagatggacaacaaggcaaaccatatgacttgtatgtttgtcgacatggccggtgacaacgatcacgccatgctcaggctggagcagataattaagctatttcacttacatatgggtcccacgtggtttttttttttgcttcttgtcccacgtcagcaccacgtcacccaaaaccactttcaatactgccttaggactacatttgcactggttttggaagatgagggatgcgttatacccggttttacggtttagggaagttattcaaactcgatgtcaagatgagggacctaaagtgtcgcggctccgttgaaaactcccctgatgggatcgagctcgaggactccctccatctccacggcggcgaagagcccgtagcgaggcatggtgagagatgaggcggcgcgtgttggagatggggagagaatggagttgaggaggaaaggagtgcaccggacaagaggagcttggagatcaatctgtggtggtgtttggcgtctgctttatctcacaatgaggagaagcaaattaaacaagtcctgacacaaggggtgaaaataccacaaattacttcattgtacaactttatggaccagatgttgcgagtcgacacgagacgggacgaaatcgaagagggagggggcgagaggaggtgtaagtcatctccaaggccgtcacggcatcgccggagggcagcgccatctgccgcacgaatgtgcaccacatcgacaacgtgctgccccaagaggtggtgggggtgaagttggatgacaaggcaaaccatacgacttgtgtgtttgtcgacatggccagtgacgacgatcacgccattctcagggtggtgcagatcattaagctatttcacttacatatggatcccacgtggttatttttgcttcttgtcccacgtcagcgccacgtcacccaaaaccactttcaatactgccttaggactatatttgcgctggttttggaagatgagggatgtgttatacccggatttacggtttagggaagttattcagactcaacgtcaagatgagggacctaaagtgaacttattccttcttaccacgcaagtagaacgggcatgggctctatcttgggtagaggcagatctgcttaccggtagcttcacggcaagttgtgcaccgcagctggaacaaggacgtaccaaaatcattatcaaccaaaaacaaacctcagatgcaagagatcacccccaaaccccagattacaagaacaaaacacccccaaaccccaaatcacaaggaaaaatactagtacgccacccaagaaaagagctagagctagtgcatacgtgtaaaaagtatgccgtcgcggctccgttgaaaactcccccgatgggatggacctcgaggactccctccatctacacggcggcgatgagcccgtagcgaggcatggtgagagatgaggcggcgcacgttggagatggggagagaatggagttgaggaggaaaggagcgcaccagacaagaggagctttgagataaatctggggtggtgtttcgcatctgctttatctcacggtgaggagaagcaaattaaaccagtcctgacacaagggcggcgaaaataccacacactactgcattgtacaatgttatggatcagatgttgcgagttgacacgagacgggacgaagtcgaagagggaggaggcgaggagcagttggcgagtcagggcggtctacctctaccgcgagtagtacgtactatgcatgggtcagctttatcccagctatacccatggttcgtgtgtactaccgtatatgcattttcttccttttagaacactctagaacacacacaaaaaagaaggtcgcaattcaaatttaaaatgctatagtacttggtgacgaccgcggttcatccatacgtgtgaaggaacacacgcatgcaagagctggcgaccatgcgaatttctgtttgcacatgcatgactggaccgtggaccgtacgtccgcgccgtggcgtaccggcgtacgtgggtgacccggagcacgtacggcgttgcaacagctagcagtggcatgtggcggcaccgccagcgcgcgctgcggtgtctcgatgactggcgtcatccgtcaccaaggcggtggccggcatgcatgcagctgcagggccatatacaccctccttcctgcgcacacggccacgacaacggcggcgattgctgcagtgcagcgagacatgcgcatgcacccgaatttcgacacagctatgtacgctccaaggacacaacaatcactcggggcatgcgcgcgctgccccaacaccacggcgccgtggacaagggatgaccgggccaggcactaggcagttggctacttggctggcgtgcgcggcgccgcgaccactgtcgcttactcgtttgcatgggcacggaagccagaccgagagcgcatccgcgtggatcaggatgcgtcgcgcgcggcgttcgagttccctgccgagggtttggtgccatgagcgttatctggccggaggagggaggggggaggccggcggcagcggcgacggtgcggggcggcggcggcggctcccctcccccctccctcccatatctggctggaggagggaggggggaggccggcggcggcggctcccggcgtgggccggcgatttttttttcgttccttccatttttcgcaggcgggccgttgccccaactgcgaaaatcgttgtggtgcaggtggacctatctcccgcttgggaaaattagttttagccgcctgcaaaaatgctttttctagtagtgttggcgctctcggacacggacaggcgtcgaacgtggcgtatctgatcggcgtggacgcgctctcgctgtttctgtgtggtggtgctggtggcatagtctgcatgcgctccgaggcggcgcctatcgtgagggctggagctcaccgcgccgcctctcctcctcgccgcttccgccccccgccgccaccgcccgccactgccgccggggagagtagaggtgaggggaggggagaggagaggggaggggagaggccggtgaggagaggtgaggggaggggaaaggaggagaggtgtggaggggaggagaggtgtgaggacttaaaaaaaattagggcccgcaaatctatttatatttaattctattttcgtaggcgga

SEQ ID NO: 242 - DNA, 1915 bp, Oryza sativa
cttttagcattcaaaattgtcccaaaatataacttctcccgctgcattctcttctctaccaatcacaaccttccaccattcaaattctccgcctatcgcctcctcttctcaaccaatcacaaccttccccatttatttccacctactttcttaatacccgtgactaactccaaaaatccttatattctgggacagaagtagtaattattttagtttccatagcaaacatgcagcaaatttgtcgctttcttgcttaactgagaataactagagactcactttattggtcaggccctttttggaggaaatgcttgtgctgaaaagcttgatggtttaatggttgttttttgtgagcacctcaagtcatgtaaagaacatggtcgcttaccccaggtgaaacagatagtcaatacttacgttttaaagactttcttaaagtatagcaagttcgataatatgattatggatgttaaaccaggtaataatggctaaaaactgtttagtgtagaaacacgcgagtatcagttgcatctatctgttatgtgtacgttttttctaatatcttatacttgttgcccagtacgtggcgttgcgttggtcctgtacatattgttggcagacttataagtcacttattactcctgcttactgtcctgctctagactttataggatgagatataacttctgtgatgcatttctgaaggagttttgtttctgggatccagaggtgtttcatgtcttgtaattattgaatgaagttcatgaatcatgagataattctcctaaaactggtattttgatgctaaaatgaaattatttgacacctaaagtatgttgtccttactatataaagaaaagaatcctattgggcctgagttgaaaataaataaatgtgattttttgcaccaatatatccttccttttttttctccacaaggaagattcaatagtgtctacactttgaacacactaattgtgaaattaactgataattgcatatatactccggaatttggtcactggcacctttccgtattaaattaactttagaagacaaacaaataagaatataataggtctgctgtgcaatattaattgtaatattttgcgcacttcattacaaatgcaacatagatgtggtggctgcagactcacaaccagtaccatttctttctgaagtatatacagataaatgaactattttaccctgtattgttgtctgttggttcttcatagtttggtttgaactggacaggagtttgacattctgaagactatctttcgagcatctgtgctaagggtgcacaaatccaaatttgcacaggttaagattaaccttttttttgtgttaactagattcactataattttgtgagtgcaccatgtgctattcagcattatatatttattccatcgctctctgcttcgttcttgttatctgattcttctgctgtaaatttgcagtttatcatgttttatgcctgctcactggatcctgaaatctgtggccttgaattcgctctcttcctctctgatatctttattaaaaaggaagaggattcaatttctaggtatttttttcccatatcatgcatacagctaacgtgcataccttgtatttctttgtcttgtgaacttgtgatcatagctggcattgggtgctgagtgattacttagaacaagcttcaccttttgcatgtttggtgaggtggtcatttttgtggctgaaattttagttgcaaccagatctttggagcacaaaattagctttttgatccacctgtcatagggcacacctttttgccgaaaaattctcgcttagtttggcagaaagtgtatatttattggcctgggctcctgccaactttggttgtaactgtttatcgaggggattgctgtagactgtatatttg

SEQ ID NO: 243 - DNA, 864 bp, Oryza sativa
tgatttttgtgactgttctgagttttgttcgtcttcgtctgtttccagttccacctcctgaagcagaggcagctgttgaagcaacaacgggagcagcagctcgccgcggcaacagcggcgacgtggggcacgcaccgcgccggcgtcggcccgccgcttggtctgaactcgtccggctggccaccgctgcagaagtcccaccagcaggcgtcgtccgcggccggcatgcgcgccgtgttcctcagccctccaggaggcaaaccggaacgcacgggcaccggcgtgttcatcccccaccagggcggcgcccccactgagcccaagaaaaagctaagtgcgcacctcctctgaagcaacgcaatgctcaccacccagaagcgggtgcagccgctgccgacgcatgccgctgcacgccgtcctcctcccggacgtaggactgcagctcggcgaggaagtcgccggtccgtgttaaggcgagcagagcggcggcgccctggaagatggcgatgaggacggcgggagcaggagcagcggagtacgacgaggacagagggagcggccgccgcggcgcttgcggtggaggacggcgaggacatagaagccggaaccctcgtgcggacggcggcggtgagttcggtcccctccttgaaggggacgcggcgcgcacggcatgggcgtgcgagcgaggccaagatctgctgccgcacgaggcccacccggtcggcgacgacgacccgcagtttgcggacgccgaggaagggctggacggtgacggtgccgaggtcgacggtttggtcgccgtcgacgaagacgacgggcagcacggccgtgggcggcggcggtccgcgtgctggtggttgagct

SEQ ID NO: 244 - DNA, 721 bp, Oryza sativa
ggatccccctatgactatcttacccctcatcgccaaagtagaagtatttcagcatgccctagaaaacagtgaaggaaatgaccttgcaaaggtactgtgctgtttttgtcatgccaaattggtgctttctgagacaatgtttaacattaatctacctgaacaaacttgtgtcaggttctctggcttaaaagccgaacctctgaagtatggcttgagcggcgcacaaattatacgagaagtctggctgttatgagcatggtatgatttactgtcatgttctgtttttgtttttgaattaaatgttcttttccatgttaagatgcttcaatgttgattttctaggttggctatttgcttggtttaggagatcggcatccaagtaatcttatgttagatcgttataggtacatctacaaaacttctcttcctgttcatcattgggcaattgttttcattgcgtcttctttttttgttgcttcagtggaaaaatattacatattgactttggcgattgctttgaggcttcaatgaatcgtgaaaagtttcccgaaaaggtaaggatgtgttctggacattatctctctccaattaataatttattctgtagctcgatgatgtatcattttatggtcttcctttgacatcaaattatttttcatgtgaggttgtcattatctcgtacgcattgatccataagagtatggcatttcattattgtatg

SEQ ID NO: 245 - DNA, 691 bp, Oryza sativa
ctcctcttcttcctgctcttctccaccaccgcgctctactcctccacctcgtcgtcctcctcctccgccgtgctccgcgccacgacgacgacgacgaccaccaccacaaccaccacgaccaccaccaacaccttcaccctctccttccaagccaacccaaaccctcccccatctaacctctccaaccacactgccctggacgcggcgggggcggccgggcacacgcagagccacgtggtggtggggcggcatgggatacggatccggccatggccgcaccctgaccccgtcgaggtgatgcgggcgcaccggatcatggagcgcgtgcaggaggagcagcggaggtggtatggcgtcaaggagccgcgccatgtcctggtcgtgacgcccacctactcccgcgcgttccaggcgctccacctcaccggcctcctccactccctccgcaacgtgccctacccgctcacctggatcgtggtcgaggcaggcggcaccaccaacgccaccgcgtccctccttgcacgctccgaccttaccatcgttcacatccccttccctgaccgcatgcctcatgactgggctgaccgtcacgcaaccgagaatcgtatgcgcctccacgcactgcggtatgtgtgctttacttcaatactttccgctttctcatagttagtaattttctttgttgaattcc

SEQ ID NO: 246 - DNA, 729 bp, Oryza sativa
cagcaacagtaccaaacttgctgttcttggtttaacgataggacatgtcatctattagaaggataacctagagaacatatcaacaatgaaggaactggatttatagcacaggtctgcaggaggcttgatgagatattttaaaaacaatgaggaaatatttgtctattttctcacttgttagttttctttcaatgttttacttatgtcctgttttcctctattctccagaattgaatttgcttagccttctagtagttatatgcatttcaaatagttgtgtatatcctaatgctgctgaaacctgcaataccagttaaaacaagtatgactggtgaccacctgataggaacccattagaaagtttacctacattagtcttgacagttattttacatgacctaactattgttttggttactttgctatcttaatcaggcattgatgtatcctctgttggttgcttgcaaatcaataagcatattaagacaacgagcggcgcaagaggtcgtcgataagatccgccaacatagtggaggtcttgttgatcaggttagcatcagcacctatggggtctgtaaaaaaatattcatttcactcctgatatttctgtgaatgttcgttgttccaggcacagcttgtttcaaaggaactgatacgagttgccattctgtggcatgagatgggcatgaggctcttaaggaagctagcaggatgtattttggtgagcac

SEQ ID NO: 247 - DNA, 4601 bp, Oryza sativa
caatgttcatagcttggagctgtttgatgaggtgcagaaggtccagtggatgggtgcggtgtctgtgggtatactcgcacatactggaacagcagaccagccacgacttagtgaagaggacaagcagaatatgcctcttccagttcaaggccctgcctgcaactcttctgggcacctagccgggtggcacacatttaactcattgccttttgccgggaaaactgccactgttgttggagaggcagcaccggttctaccaaggggtttggagtgggctggttttgtgttgaactctaggattctttggaaagaggcggagggaaaacctgattgggtgaaggatctggatgctgtgggtgagaacggcgaggaaatcgagaacccccttattttgttgaatgatccatcctccgttgagccattggggaactgtgggaagaagatcctcttgtggtggctccgtgttgaagcgcgagctgacagcaaatttcctcaggggtgagatttattttggaatttttcattacatttttcactggttactttaaactcgccattatgttgatgcaaaatattgaaatgctctatgcacctttgttcggtacttcaaacaacttgtgtagccacaatctaagtcatagagtctagagaatcccttccataagttagttatgctgaccagactttctagttaggcactcaactcagtattttctggggagaattggacaagccaaccatccaatattttttttcgaataagagcaaccatctaataattagttattcagcaactgagactttgattcagtttgaatctagtaatggtactgccactaatatggttgcactgagttgagtctggtgctagatcgaacggtgtgaattactcataaatctccttgttagtaattcacattaaattaaatagtccattgtctagtctcttagttgtttgacttcttgtttaagagctccattctgcacttgggatctgggattgggaactttgcagacccaagatggcatcctgcaagatgtcaaatttaactctgtttttgtaaaatgacctttattttgttcttttttccttctataattacttgcagtggttgtccttttttttttttggtatttccaatcagaaatgcgtctgtttttgtttattttaatgccactgtgttacatttactgctgtagcagcagcactagaattttgcatttccaatttaaccaaagtgctcaagtataaactttggctgcaacaaacgcttttgcaagtagcattcatgtgtacccaacacttgttggatagccaccactcctctgatacgtaatagaggcagtgtaggattaggtatttaacaactgtgaccccttcaactgacatgctgccatgtggtagtggcatgaaagatgccaaaccatcaataattaactaattatcattatcaacattttgttttgaaatttggacacaaagttttcattgcattcatgttggagtcaatttcatggttgaccactgtcatcggtcacatggtaaagaaagtttgtgtccttgtatcagaaatatgttctccaaagccatggatatggagcttcatcgagagaaacttagctttagagaattagagttataaaggatgtttccataaactgcaaatttcatttaaatcaactaaaacaattgattgaatattaggttcttctaaccaaacacaataacacctggaatcatcaagaatggctgactatttaattgtttgttaatgtttcttcccttatcttttatccttaagttcatgagtttttatgtttgctaagctgcaatgaaatgtgttctgcaggtgggtaattgagccacctttggacatagttgttcccgccaagcgcaccccatggcctgaaactaccgctgagctttcggctgaattagtagattccaaacaagatcaggagggtaggcggttgtcaagaaccgacagatcatctcggtcccgaagcaccacaaagcggaaggagaactgaagcaaaataaacacatcttgtaatgtatatcttacatctgcacaaactacaataggaaccatgtctggttaatctggtgggtattatgtttattttttttcctgatgttttgctaatgtggcagcgcttcatactcgtatgtcttctgtagaagactgtttttttattggtagctgtattatctatgttgtaatatacagtgcaatcttgaatcaaggaaatggaagctggatcctggatatcatatacgctccctgaagtagggtttcgtgctcgttttatgtgcttctgtgttggtgatctctgttactattcttgctgttggcagtggaatggtggaaaattcactttaatatagcgtttcgacaacggttctactaagtattgccgcttcattccaatcgatttggttgtgtattaacccttttgttaacagcgccaagctaataatcagtgcgcagaaagaaccttaagtatatatgatacaatttctttcgtacaaactatctcaagtttatactcactccgtttcaaaataaatcaaattaatacaagtgagatatcttaaaataaatcaaattaatacaagtgagatatcttagtaagaggcacgtttagattcgtattagagaatacattgctaccatactttttttctttttgtgtaacaaatctttggcctaaatgcttgatgggactattaaagattcctcgctcaattgacaattcaatgatgtatcgaataccagaaaatcttggagacatctgggacagaaaatacatgtaccaatatttaaagcactcattttctgggtacaacattatcagattagatcagaattgaggcgttttggtcccactgaattagtgatttgaatgcatcacagcatactgctgctactcctatcctatgcatttgatgcatgagcactgtcgttacttttttcttttggaaccaacactgtcactatcttatatttggatgatggaatggaagcatcgtggtccctttattcgattgcatcggtcattttttctgcccatgctgtttctgcctccatgttgttagtccatatctaaacgaggttattacaatttcgtataggctttataccataatctccttgtcttattgaaataaaaataggatgctctactgccaattttggagatggagttcgttttgttgcaaaccggcacattaacacattataaacaaaatggccctacacagtacaggcccactaattggcccaactgacctactatctacagatgggccctacacgggcctcaatgatgtgatgtgcaggcccatcagaaattgggccgcgaaattggcaagcggccaagcgggtgcgtgagcagaagaagaacccgcacccggcgccacgtgtcagtctggttcgggtcggataaatcccgcgtctcccctgctcgcccgcttcctctctccttcctccactcccgcaaaaaccctagctagggccgcctcctcgccgcccaccgcctccacgccgccgcctccctcctcccgacgagccggtgaggaatcccccatcccttcccgcctctaggctcgtgaggccaccgccctacctggtgctgattccgattcagtttggtaggttttcttcaagcgcgagattattctccaagggaggtaaggtgtcgggtcggctggcgatgggggcggagctgcggcgcgacgacatggaggtggcggaggaggacatcagcgactcccaggcgttccggttcgtcgagcacgtgctccagtccgtgcggatggtatgggattgagctccttgctcctctgctcagtttttatgtggggggatgggggtaccatgatcagctttcgaatcagtcgtacgatggctcagacattagttttttgatagctccatgggtagaatttagagttgtgttcggtctcaagtggttagtcctgctttggattgcattcccttgtaaattagcattccgaagctccgtttttttgttttattttgtcctttgattttgatacctgatagttcaatctgtggagggatgccggtagacaagttgatatagtaaaactagttcaccttttccaagttgtttctatggacgacaattcgacagaccatattgccatatacaaagcaaaaaaaataaaataaaactgtaatgtgacacgcagctttcatcttctatgttatttgccatgtattgaagtcagacgacggagctagcagtgtgtgcccatatgttaaatactaagagctctctttgtgtaagtttgcagtctgagcaacgaatgcattcacttataatgctaattctaggatagcattttttttctcaaaccaaaatcatacctctttgtgttgtttcacaatccaaataaaaaatacggccactcatgctatggataatacatttcttcagacaaaatgggggcgtgcagtgagttacctagtactgctttcaagttcgaaatccaagggtgttttgaagatgtgatgaaatgcggcagatgcatgaaccatgcggagttaggaaatacaaaggtgactgttgcc

SEQ ID NO: 248 - DNA, 17116 bp, Oryza sativa
acccgccgccgcagccgtagtacgccgccgagtgctcgtgcggcaccgacctgcacttctccatcgtcacagcgaccacgccgccactgacgatttgattccggtgaggtcgcaggcttcttgatgagttcttgatcttgagagggatgaggagaagctgggtagtaatggagcttagctgagctgctagcttggaggagaggcagtgctataattgaggtgagggaggggaaagagatgggttttctgcttgatttattaggccataattatgcatgatgcaccttgggttgtatgggtattctaaagttgaccctgtctgttcttttttctgaccagaaaggatgaacccttgctttttgatcataccaatggcattatctaaaagagtgacataaaaaactgtcacacaacttaattaatttgagagtatcattaagtgtttgactgctcatgtgtatgttttcttagagaaaaaaggagcgtttctgggtactctcccgaatcataaacatttgatgtttaggataagatttactttaacttttaaaactttgactattaattttgtatttaatcaagtttgcaaagtctaataagcatttgagaaactattgccaataaaaaaattgtaaaggtttaaacaaatcttattataaacgttaaatatctattaacttattaaaggaatagaaaaatgagcctccacgttcgctctcacggcttagaaatttttatattaatcggggtaaaagaaaaaacagagtatatatagaaatacaatttaaaaacagctaaaattcggaattataaataaggaatatagaaaaagagacaggagtccataccggtttataatttagaactaattgaaattcggaattaaaaaaataagaaaactaaaactagaggtcaaagtccctatagaaatacaatttaaaaataattaaaattagaattaaaaataaggaatattgacagaagattctataacccatatagaatataatttagaaaagaatgaaatgcggaattaaaaaataaagaatattaaaagataagtttagagttgtcagggttatggataccacacatacctaactgtagttgactaaatctcggcaggacccaccacataccatgtcttatacggaaactaacttcggatatggagagagttccggataaggaaagacaaccagagttctacatagaaacgacaagggctcctcggattgtatctatattggtttccctaattctacttagacaaggggacacctatgggtataaatacaagctcccctatgaggagaggatcgacacccaacagaatcaacacccaacacaatcgacatagaagccacaacatagaagcctacatatgccaagatacgccgccggatatcaacttcaaggataagcacggctagtcccctacagtgtctccggatactgtcaggagagacgaaagcgctatctctgatctcgccgggcacggattcgaggaggaaggctaccctgttgtcgactacgagtcagctcgtcagaccgccatgtcgacaacagttagataggctaccccaaatattgtactggtgttattatcatgaataagagcaataccggtttcggccaacaggatgtagggttattacctgacaattcaggggaccgaacctgtataaaaatccctgtctccatctcttttaccccagtctcgcgtatatcctagtaccaacgatccccatgccatgcaaatactgtagtcgagacatcaaacgtcgacagtggcgcgccaggtaggggaattttggtgcttcaggatttcgacgagatgggttcaagagatggattctccaacaataagctactcaacgacttcggctatggggagatctaacctgaccggagcatgcccccgacaagatcggaatcaacgccgttaacttgtcgatccggcgagatcgaccaatctacgagatgtcgccgccggggataacgcgagatgtcgccgccggggataacgacggtttgatgtttcccaccgggaagcctcggccaggtcaaccaacgactacatcgaatccgattttcaacagcggacaatgatggacttcggagaaatcaactgctcgtcagctcggatcaatctcacaacacgcgacgtgatcaggcaaccgcgacgactacaaggcctgacatcgcgtggcatgagtcaaaaatactgtaccgtgaccaacacccataaatacagtacacgtacacgtctctatgagcacctgtacgtgtgcgaataaatatatgttggtatatacagagccatgatacgttggttaattaaggtaattagtaggttaattaattttattaacctattaatttcgtagatatgtccggcatatatctacacaggtatttaatattttatctgtaatttatcgtatctattcagatcatacagcattgtcagatccatgatttattatgtttacctagagcatattttttatacaatatctattgtgcaagtgtccccgatgttaaatcgactacgctttaacgttgggggctcgctctattttcttctgtatgaatcatgcttgcttacggtttacataatgcctgatatttacatctgctcgttatgtcctaataatactagaagattcatgcagttttttcagtgcatacccgatattctctgctatatatcttgtcttctagaaaatatttttcaggaacaattgagcactcgagtaggttatggtcgagtacaccgcattatcgagaacgatctcgacgaatgcagagtcgtcgcgcccaacctaccaacaaagatcgacgacctatctcatagcaccggccatggctggactactcgagaaaaggttgttaacggataattctcgtgaatgtcgtcggcttgatcacccgacatgattgcgaacggacatccggatatgctataagttgggtgcgtgagtcatgctggccacatgagacgcacttgtaataaaccaactctagcacctccattggtgttcgagagataattctacacgtttgctggtcctcgaaccagtgcgtagcaatctctcgcaccgcaacctccattggtgttcgagagataattctacacgttcgctggtcctcgaactagtccgtagcaatctctcgcaccgcaacctccattggtgttcgagagataattctacactttcgctggtcctcgaaccagtccgtagcaatctctcgcaccgcaacctcagatggttgaggtacgactacagcaataacgcagcggtcctcgtaccacgacttcaaatgatcgagggacacctactcactagttctcaaccagtcaatcgtagcgatctctcgtacaattacttttagtggttgagttacgactactacccggttcttgaccagaggtgtagcgattctcccattacctctacttcaacaagtgttttacccagagatcccttaccacaaagacacctagtgttgaaacctttcctaatgtccttttacgccatcttgacaaagcctctgaggaacctaagggaacttcggctggggacgcccagagcggataaggctatgtcggatccttcagagacgaaagatcttgtaagatctggtcgtgtaagagttctcgccgtgcgtattaaccaagccgtgtaatcggaaatggattttccaacttcacggctgggggctaggatcagtgcttgttcaaccgaggcaggtcaaaggtccaagagccttatcctccgagaacgattctccgatgacaaggctggggactagggaaagtgtataactcaacaaactgactgatcgaagtcggtaaaaaagtagacgctcatatacaaaacattggtatgtaaatttaattcattttcagttttctatacattctataacatgtcaccctttgagcattcgctcgggagctatttctatctaatatttttttctgagtattgattccaggaaaattctattcgacattgtcgaagacttcatggctctatggttctacaccaagatcgactaaggcgagtacgacaaatgttgacaaggctctgtcgcagactctgcgccttctcgagaacggttggtggatatcgacaaggaatacggaatgaagagatggtgtacccgccgagataaaatttattgacatcaatccaaattctcgattacagcaagacgggagacttagtcgcatgctctgtactttcttggttgacgtcggagattgactcagacaaaccctttaggtgcccgcacgaggctgataaaggaagtctaacgttatctctgaactcaccgagaacggtcacaagagctcgataacagttcctccaaggtctacggttgagaatatgaactcgctcatttgcattgaagtcggggggctactatcagggttatggataccacatacctaactgtagttgactaaatctcggcatgacccaccacataccatgtcttatacggaaactgacttcggatatggagggagttccggataaggaaagacaaccagagttctacatggaaacaacaaggactactcggattgtatccatattggtttccctagttctacttagacaaggggacacctatgggtataaatacaagctcccctaggaggagaggatcgacacccaacaggatcaacacccaacacaatcgacatagaagccacaacatagaagcctacatacgccaagacacaccgccggatatcgacttcagggataagcacggctagtcccctacggtgtttccggatactgtcaggagagacgaaagagctatctctgatctcgccgggcacggattcgaggagaaaggctaccctgttgtcgactacgagtcagatcgtcagaccgccatgtcgacaacagttagataggctaccccaaatattgtactagtgtgattatcatgaataagagcaataccagcttcggccaacaggatgtaggattattacctgacaattcaggagcccgaacctgtataaaaatccctgtctccatctcttttacctcagtctcgcgtatatcctagtaccaacgatccctatgccatgcaaatactatagtcgagacatcaaacgtcaacaagagtccatatagaaatacaattagaaaaacacaaaaattcggaattaaaaaataggaatattgaaagaagagtctagagttcatatagaaatttagaataaatttaaattcaaaattaagaaaaaaaaaagtacagtttagagtccatatagaaatataatttagaaataattaaaattaaaaattaaaaataagcaatattaaaataagagtcagactatataagaatataatttattttggaattaaaaaaaggaatattgaaaaaaacttaaagtctatataggaatataatttataaaaatagaaattcagaataaaaaaagaatattggaagaataatatagggttcatataggaatttaaactaattcaaagtcagaattaaaaaattaaaagtagaatttagagtccatatagaaatacaatttataaataactaaacttcaaatcaaattttaaataataagcatgattgggagagaagagtctagagtccatataagaatataatttagaaataagtaaattcgatattagaaaataataaattactattaatacaatacaaaattcaaaattgtgttgctatttttaatataccttaataataaaatataaaaatatttaagctattatatgagaaaaaataacgatactaactgcgtaattacgcgggcctccatgctagtttataataagagagtatattacaggttctgttcattgtgacgtaaaaataatagacacattgattcattgacaaagcgcgcaacctgtaactcatgtatatcttttatcgtagtgtccctcgtgtttagcctacatttaacattctatgaccaaggcaaaaacaaaaggtgaaaaaaaaaaaaccaacccaatgaccattacacaactacaaaagtgtttaaaagaaaatgacaaaataaggagagaataaaaatatccccccaaaaaaggggctccttttctgcttttgcaaaatttgaataaccaaaaacctagtgtgtctttatgtgaaatcactggagtttaataggctttttatcaaggaatgtggggaagggaatgatggaggcgctgtatggagtgggggctgcactcacccgtccgtgtgacccacgtgtgctgtttgttggacgcgacaattaagccatcttttcctcgtcgcccaaattttttcctctcctcctctaattgcgttgctttgcaaattaatctgcatttgtttttctgcatctccttcccctaggccagatcctctgctgccattatattgccatcgatccgtgggtgatccatctgttgctgctggaaatctgtgatgaacacatttctcagttgactcacagattggaaaccgtaggttgcacataattgggagatgcaatagtgaaatgtatcggttttagtgactcataagaagaaagttcagggttagtaaaaccggctataaccgttttggtgtgatccgatcgaatttgatatagctcgagcgataaccaacggttgtgggtcgaataccaattctccatcgtttttgtgaaccctaggaagaatcttgtactctacctatagaatcttaataataaagcatgttaaattgatcaggaagcaaaggtagcctcacagtgagtaagctttgctgcagtgtcttattccacagtacccaaagctaaaaatgagcatctatatggtcaatcagaaagcaagcaatgagatcatagctatctacaccgtcaactgggtgatcagacgatgatacatacgcacaccacggacaggttcaatgcacaggttgtatcagatcaaccagacaaaaaagaaggaagaaaaagaaggcgaatggccaaagccatgaatcgtgtaggtagtggcgctctagacacctcgcactctctgctccggccaaacggccccattgtctcgtttgtggggaataaaccaaacggcgtatttacaaacgaaaaataatttatatgtaaaacttttatatatgtattcttaacgatttaaaagtaagtgctaaaaaaataaacttcgataaaaaaaacctcaaaatcaacttcaaatttaatgttaaaaatttaaatcttagttgataaacaaaagtgtaagcgaaaagataagactgccaatggatcaaataatcctttcaatcgaccaaaccaatcaatctctgggcctttcgctttctcctagtagtacaaccctacttatcatcaccagcagcagcatgatgctaccgcatgatggcacgatgcccttggtcgtcacctacttggccttttctccgatccctcgtgccgctgaagtggaaagagagatacaatgggtagtagaatcatttatatagtaattacgcgacgttttatatagtaaatttgacttgcgctaagtagcattttgttcagactaaagtttgttttttttatgacactgaagattagcttttttttttacggaaggagtattgtgtaacaatagtcaattgctaaagataaatgtttggttttgatgagtttctggcagcgtaggttatatatattcttccaaaatcctcacctcttcaaacgttttaagattctcattcaggctatgagaatcggtagctacataaatcaaaatataagctaatagttaaaatttgatagatcttttttttatatatactcaccggttactcgttagtcaccagctcgccttagcttacatgtgagctgatctggttaatttcactggctaattaattacacgtagacgtaggagctcatcgaaaggaataatcagttcgctgttgctgcttggatggtactacgacgtcggcgtggttgggttgtcgcctccgttgagctttccacgtcgacggcggcttctcaatagatttgggagcatcccctgcactgcatttgatgagtggaataatactgtgctgtccggtcttattttaaatttaagatgatcgacatgtttctcatcatctagattatttactttgctttgcataagcatgtttggtttgatcaattgtgttgtgagatccatgaacatttcgcagagcatttgagcgtcatggagtatgtacggacttttagtaaagcagtgataaactgtagtacaattcggtagacatctagtactagtacagtaatcctacttcgcactctctctatcccgaaaaaacgaatctaaaattagatatagcatattatagtacaacaaatctgtacaaatattgatttttatgggagaaaggaagtatcagaggccatcgtttcatttatttatggaataaacgaaacggcatatttgcaaatgaaaaataatttataaataaatttttatatacgtgttcttagcgatctataatttaatattaaaaatttaaattttaacttataagaataagcataagttaaaagatgagactgatcactgagtgattatccagtgacagtgagcacaccacttccactgtcagtatatcgctggcacatcaaatgatcttccatcttatggccatccatccatatggacaggcaggaggacgcttgaggcacatcaacccggtctgcctctgcctgcaggtggatgtaaacgcacgggcccgatcgataccgacgaatagtagacagcagcacagtgagtctgttcgcgaatcgtacgtgattccccctaactgctagtggacgccacggcaaacagggcgtgcagctttcgtgtccccggagtcgccgtcaccggcctcgcgcctgtccgccggatgggtgtcatgtcccgtcccgtccacgccgcatatccaccattccattccaccgtgatcccccacgctcgaatcgctcgtcgcaataggcgacacccaccggtgcatgcagtccagtccaccacctaagctacactgcactttaccgccaccgcccatcacattctgatcggatcagctcccctttccgttaacatatttggcaccggcagatctggtctccgatggaaaaagaaggggcgaaacttcatggaaagctaggcaaaaagcacaaagcaggagaacatgagagttgggtctcctttgtgcggcttcgctgttgaggccgtgggcaataatactagtactactctgcagtctttggtccaacgatcgttcaattcggttcacagtatgtttctgtatgagcagtctggtttcatattgggaatggggatatcattattaccagaaatgcaccagattgaaacatttttatttgaccaaacagaaacacttccacataacttgttagtagatcgctttacatggttaagttcgagacatgaccatgtatgcaggatcgaaaattcagtaagttcagacttgcataatgtaagaaatttaggatgcggtaactgtataaaaacctcaccctctcttaacatgttaaggaatggcgtaaacactgaatcagatcagttcagaattctgtaacatgttaagcaactgctgaccgaaatggaagcacggcatatcagcttgcttgcatggaaacaggcagaatcagatcaatcaatcatatagcaaagaaactgcaagacttgagcgcaaacaagtggaattttcaccatgagttatgttatattatcatcatacgggaccagatgtatcatagctagcagaagagagcccgaaacatcttcggatcaagcaaccaactgcaacattgcttaatgcataacatgcttaaaggtagttttgttacatccgcacatagtgaagtaacacagacaggtagctggtttatcatttttcaggcattacagattggtatcagcctcatttcttcccgctcttcttcagaccagagcctcccagtgcacccttctgtcctgccttggccttaagctccttcagtgcctgtttgcaagaaatgcatgcaattgatgtcagcaaactaaaacaccagctacaatgaaaaaaaaaaacagaagactggtaagtttggtaaatggtctcaccttttcctcatctttcttcttctgcagatacgcgagatcactctacagaaagcaacaaaatcagaactacaagtctgcaactaaccattcaagttccttatatcatcattgcttcaatcaaatatgcactagttttccagataaagcgctacttacaataccacacattattaacaattcataaactacaattacatccatccaaatcactttgttaaaccaaatctatactggccacatcatctcaacttggacaaacagcaaattcaaaatgcttatctgattttgcgctgcttgattctaataaagccaggcagcgacatgttattcccaggaaaaaaaataaagcaccactatttttctttttctagcaatgcagttccccttcaagagatgtagattatgtttcacaagaaagctggtggaactggagtatcaagcaatagtaaatactagtagtacttgttatcaattatcaatagtcaaatcaagccaaaggctcatacactgaacacatgctcatttcttcaaagcctttaaggtcttagttcagttgaaaattaagatgaccataagcatagactaatgatccattcaagacaacttaaacccatagaagtatatcaagacaaattaagtttaattagatagaagaaatttaggacgagtgagatcatattctttgtattcccatcggacaagtaagaccatacgctcactgtgactggggacatcacccaaaaataacagctagcacaattttagaaggtgagataagttgatgctacactgctaccgaatgcaaattttccaaacatcatcaaccaggtcagttttgcaaggtgagaaaaggtgaaagcatcaagcacacaattccagaccatgaacaaatgatttccatacatgatagcatcaaacatattataaggttagcatcaaacatattataaggttgctcatttcatgttgacaaagtagttagaagaaagtaatttgccctagaaactaggacttcatgaacagaacaagcttttaacacaatcattatccaataataagttaataaccccctaacacaacatatccaaggaatgtaagtaaatatgatggcatatcagccaatccctccgccacggggatttaaggggattgattccacttccacacctactcaatcccccctccagtcccttcctcgtggggattaaccgaacggatccctaactgaggacaaggccacaagtcaatacgcagatttaaaggacaaacagcatcgcgcatgataattctacaaattcaccttcaactaaccaactaaaggataaaaccactatgaactaccccagacacgaaccgatctacaacacggtggcctgcacagtcaaaacacaagcgcggatcgctaacccctaacccgaaacgatcaatcggtagacggaaccacgaatcgggagcaaaggtcacacagcacagcagcatacctcgtcgtactccttcttctcggccttgggcgccttgaggggcttggccttccctcctgcaaatcaaacccacccccacaaaacaaatcatcagaaccccgcacgaatcgatcggcaacgagggtcagcgagatctcgcaggaaccaatcgcgattggaaggaactcaccttgcttcgacatggctgaccggatcggcgagggcgagtcgagaaaccctagctcgcgcgccgcgacgacgaggaggagatggaagaagggaaaggcgaggaaatgggagacgcgagaggcagaggcgtatatagctagcctagcctagtgtagtggttggtcgcggctgcgaatgggaatctcatgattgtggctgtattgggctgggccttggtttgttggcccattaagttctctagaccatcttgtattgggcctcctggtccgttggccacatgtgacgctgtacttctaatacatatctggctttcatcgatcaaacgaatacgtacatacagtaccaatcatcgtatacattcgtatggacgtaagtagtactaccttcatatcaggttataagacgttttgattttggtcaaagtcaaactactctaagtttaactaaatttataaaaaaaaagtagtaatatttttaacccaagactaatatataataaaaaattattcaattataaatttaatgaaactatgcaaatattactacttttttctatagagttagttaaactcatcttgtaacctgaaatggagagagagtactggataagtacatgtacgtccggtcgaatcatccatctatgatctatctataatccatctagagtttagataaggaaaaaaaaaagaaaaggttaaaaagaagcattggtagcttgccatccaaccgagtgatgcgagtgacacgcggagcagattgctgcacagcctgcaaaaatgggtgcagaaagcgagatggatggtatagggtggcgtggacggcggcggcgctgcatgagagtatagatcggttttgggagatagcgcttcttgtccgtagtacggcaggtggcacggacgacggacacggtgggcgccgcgcccctagcttgcttgcttgctgcacccgtcgccaaccgttttctcctcctcgctctctccatgtgatctccgatgcctcgttgcgccgcatcgatggatcgatcgcccgctgtgtatatatgtgcaggtccatccatgagaggttgatcagagagcttgagatctgtcaacatcaggagcgagctctcactgccattgccaattggcaattgaaaatcatcgtaaaccgccatctccatcatcatctcgcgcatggtgagattactgctgctactcctctgcctgcatatgtgttcaatctctgttgcaatgtagtgttgatatatgaatatgaatgttgcagtcgctgctgccgttgttgctgcggcccgtggtgcgcgccgcggcgagcgtggcgaggcggccggcgtctgcggtggcgacggtgctgcaccgcgccggcgcgctcccgaggaaccgggggctggagcgcctcgtcagggacgacatgctcgtcgggggtgaccacaacttcatcgcgcatttcgtcgtcggcttcatgcgctgcctgtgttagctggagtacatagctaggcggctaagctagattagatgcatagcaccggtattgatgaattgatatctgatctgcatttgcgatttgggctccatttttggggggatacgacgttctccgtggctttgataattaaaacagctagtgtagcatgcatttgcagcgatttgagcaccatttctttgcaccctgatatctgttcatgtccaacatatgtcgactgccaatcactcagtagtactccctctttccctaaatgtttgacgccattgacttttttaaacatgtttgactgttcgttttattcaaaaacttttgtgaaatgtgtaaaactatatgtataaataaaagtatattttacaataaatcaaatgataggaaaagaattaataattacttaaattttttgaataagacaaatatttaaacatttttaaaaaaattaacggcgtcaaatatttaaggatagaggaagtagtagaaaggagcagtttaacgatactgtcactgtgggcgcccactttacagcggcacgagctgctggttctgcatagtaagtcgtacaggataaacaaaacaaaacaatacttcttgtgagacgtaaataaaaagaaactgtggtgcattgtaatggtagtacatgtgtttaactagtagtaaagcaatagagaagcaacccttccccgcatatcaatgagttgggaagagccggatgtatccaggtctgtgcctgtacaagaattcagaatcatgaaaaagttagggaaaaggataaagagaattactgtaactttttttcagcaactctttcacagaaaatcatgcatataattctctggagcactcaattaatcaatgaattcaattcaatgttacaatgtagtaaatccctgttaattgaatttagtaacaaactgaaaacccctatcaactgtatcgtgctaatcctccaaccagtgtcctatctagacaaacacctggtacagagaaaatgttatataacaagaaaaacctacatatagattgaaaagaaaaagaaaaaggagaactcatgcacaaatcattccaatcacatatcaagaaagaacaaaggtagagtgacttgcaagttgcagcgaagaaactgtcagaacggcttaattctgaacttgtgcacaggctcaggacaatctagtgcaacctcaggccttcctcagagctctgactcgagcagcaagctcatcaaagtcaggcattttcgggtgcacatgtacagttttgggacagtccggctgcagtgaggtagaccgggcaggaaacttcacatcttcatcgcggcagacggattcccctggcagtgagattgctcttcctggaggatgcatggagcccttttgctcagattgttcttctgctttgttggttggagctggattgatttccgcatctaaacctttcttgctgtagtgcctcagaagcttatccatcattctctcctcctcatcaactccactgcgcgcatcagtattgcggcttttgtgtctcctatggccatttccagttctgggtaaaagattaccaaagtcaattgcagcctcatcctcttctgatttatggcgctgcatgaatccatcgtagtcctcggtgtacaaagctccatttctcctgcctgagtgccttggccggctactaggagttctctgaacattctctccattaacatcatccattcctttgcctccatgaggttgtctagacccatctctccgggcactgccatcattaacagcattctgcctgcttgtgtgtcttctgtgactactgggtgttcggcttgaaaccttttcattggcaggcgcctcatcatagacagcagcaggtgcaggtggcttggcatatttacttctaacagaaacaggtcgaagaggatctttgtcagacaggtgatctgtttgttcagggatagcacgtttgctgtagtcactagcagctcgctctgcaggatcatcattcactgtttccatgttgagttttggtttgatgtaaggaggtcgcacataagctgccctctctggcactggctgtctatcttgcactggattccccttatctgctaaatgatgtggtctagcattcaagcaaccagtgttctcttccttttcagaacatttcttgccggtagatccatccagcttagaataaggaggcatcctgtttttagtgttaccattcaaaggattcactgattgaagcccctgcttatctaggccaagggttctgagacctgaatctgcatgatcagcagcacaaggaatatgtgatctgtggtggtgaccaaggttgctctcgttctccttctcaagatcattgtctttcttaggcttgacatttagtgcaaatgtcttcttgctttctgcttcaggaactttcaatgaaccaaattccttcttaggcaggccattgaggtctagctccaccgcttccattagttccttttcgcaagggcgaacatcttttttgttagctttctgaacttctttttgaatgttccttcttttcatctctgaatcggacactggtttctccacatgccccttaccatcagatttatccgcatgctgtctcctggtgttttcacgtaaccggtcaatgccatcagcaacaggatgaacatccttttgttgttttaaggacgcttccaatttattcttgtggccaagagtagcagcttcagattttcttcctgatggagcagcatcatcccccttcttgctggacaaaggcactgccagttctacctgtttctttgagtcctttgcaggcaaatcctaagggaaaacaacccaagatgccaagtaagaaacatcaaccaatagattgtgtaaattcattcgaacaagtttgtgtaagcatatagtacatgtttggtttctggagtggcccatagtttgatcttaaatgctttgatatcaaaatcaaccaatagttcttcagacacactttgcatggcttgtatcttttcctcattagtgaacactttattgtccagcttctgaacaaactgcaagtactaggattatagatcatgttaagtggtacaccactaatcaattcaatgacagcaaattcgtggcagtagcacacctcaaggctaacaaaaggctcaagaaaatgtccatatctctctgtgaaaatatgcctaaggtcacacagttctggcaaatctggaaaccgagcagcagcaaaaattagagtcgacacagcttcccgagtttcctgggggcaatccctgtcaggaaaaggcaaagatataactgacaactgttgtcatcaagataaatggaaatccattttgtttattcctcttcctaacattatacaagtagtaatgtttaattgaccaagcaaagttctcaaacaatttttttaattctctttaaaagatgatgctttggttaacactaaactaaatcatccaaacaataataaaattgtatatgtttccggatgctattgttctgttggcttgattacttaaccaattaaacaatgtaggatgcattaatgactctatcgaggtatcaacaaacttgtggtttttaggtagacagtttcagcatcacaatgattgctagtggttgacaaaagaaataggaaatcaaagcagatcgttagttacccctgtttctgtaggctgttgagctgtttaccaatgtactcacagaactgctcgatcatatcatagcaagaagcatggttcatctcaattatcagcccatccatctgcattccaagagagaggaaagtagatacaaaatacaacatcagcaattcagtcaccgcatgtttcctctaccacaaaaatga

SEQ ID NO: 249 - DNA, 4076 bp, Oryza sativa
ccattgtcccagtgcctaaagggcttaaacgtgctggtggaatcattatttggtgccacatttcatcaaattcctatgggggacggcgagtcatggcatccagatgtgatgaagttgtctctccatcatcctgatgaggtactattgtgttaagcttagtttattagttctatataaaaaaatagtaaactactgcatcttacccaatctaactctacaaaagcatgtaactacatgcttgaacttttgttattacggatacatttctaatacgctaacattagggggcatgacaatcactatgtttcctttctcgaaatgagcatgccagattatcaatcacactactttgtttttgttactaaaatcaaaatcagcaaacaccagaaataacttttgaatgatagccaagtagacaaagaacaaaattggcattccatggttactgattagtaatacataataatgatggagagttggccttgtccgattggtcatgtactcgtatcctattagcgcatagtgtaaataccgtaaacttgaacaactagaagtatgatgacaggaatctgttacgaaattatttatcaccaatgccatttaactatgtaagatatcataaaatgttatgctattcagagcaaaaaaaatatttcaaaactagtagacccaaaggtattttcttaataaaatgtatatttggattacaattatcagtccatctctttataacgcatatatgaccaattgaattcttctaaggggtagtctaatcaaggatcttggttgctactactatcacgcacccactgttgagagcatcttcttaatttatattttactggcagcaaagtaaccaaaggaaaacatgtttaatgagcagggcaatttaggatttatgtatcttgatctgtactccagaaagggtaaatatccagggtgtgctcactttgctatcagaggggggcgacgattgcaagactcaaattaccagcttccagtatgttctcttgtatatttttatttcatgaataacaagggaattggcatttccaaacattaatgttgaactactttttaggattgttttgtatttccgtagtactttggatgttttaaaaaatgtggaatgcagaattttgcagcctttttagcccaaatatttggaactaaacaaggcctaaggcttgtgtgccttatttagatttattctctttgttccacatagatgaagaacttttgacagcatttaaatgatccttacaaggataatatctaagattcacgccaccgattcacttcattctgatgcttttcagatcgttgctctagtttgcaatttttcaagttcgagcaaaataatggcaaggcttaaccattgggatgttgaaactctgtttcatgagtttggccatgcccttcattctctactctcaagaacggtattttgctgtccttttttataatatttaggtctctccaatgactccaggattgcttatctgccagcataatgatatttgcaggagtatcaacatttctctggtactagagttgctcttgatgtggctgaaatgccatcaaacctctttgagtacgtatgacttgttgctaaaaataaaactttatccattaacactcccgcagggtatctaattctggcttatctaaaatacagcagcatttgttatttaccttctttatcgtagttgagttcaattcacattgcaggttttatgcatgggattatcgtgtcttgaggaaatttgctgtagatgaaacaactggtgatccaataccagaaaagttggtaaaggcacttaatgcttctcggaacatgtttccagcaacggagctgcagcgtcaggtttgtttttctttgtacttcttatttctcacccttaacaattggatttgaccttgtatgtcccaatgtgctgtttcttcactttgtgttattgtgcctccgttccccagattttctattctataatggacttgactttgtttggggagcaaggatccaagccaatggacacaatttctactgtagctgatttgaggagaaagcatacaagttggaaatgtgtagaaggcacacactggcatactagatttactcatctgataaattatggcgctggtaagctttctatagttcaagaaaatttcaagcttcagttttcataaagtataactgctattctttatttcaacattattgcaggctactatagttatctttatgctagatgttttgccacaactatatggcaagaagtatgccaaggtgatccattatcccgcagcacgggtagtgcacttagggacaaatttttgaagcatggtggagctaaggatccttctgccctgttaaaggatttcgtaggtgattccattattataaactctggaggaggaataatccctgacattagctccttgtgtaaagaagtcggtttgtgaaataccattgggagtggagattgggatcattatttttgacattgagatgggttaaagggtcaaagactcatgatatcatgagtcaggagcttgatctgccacagggctgcaggatctagttgaaggtcaagctgaaaaaaataatagtagattcttgacaaagaactgatgaattggttctcaatacaggattgcaggttagattagttgggtggatcctgtttgaccattgctgaatcttcgattttaacttgctgctgctgctgctgcaagggtggtttagttccctgtcagatgatttttcgcatttactccgattgttcggaactgttgttccaaagctacaaagtggctgtgcctgtaatattgacccaggttaatcttcatagcccatcacatgtaatagttctctaaagtgattataagagtgagagatgtgcccatatgatcttttttgcattcttagttggtctcatggatagaaagcatgtttgaggatcatgctcattattgcaaatctcccttcatagcgtaatctaagccatctgaatttagattgaagctgaataggcgagcttctggccgccgaagacgtacaagccggcgatgatggacaagatgaatacaagccagcaattatcaggtaaagaatcagatggcactgccgccaatgcttccttcagggtccaggaaacaactgagcaacatcgtcaacgcctcctccagcacaatatcgaagtaattgaaatttcagtttgcacggttaagtagatgttattgcgataaccgctcgattttcatcgaattttgctaaaattcttacgaattccactgagaattttgactgtgccccggtcaataaattcaataacctgcacctcaagatcagcagctgcgaaacacatcacccagatagtgaccatcacagttaccgggtgaccaggattcgggatgggcagacaggaaagaatcaggtcagcatccatgtcggaatagatctcctcaacttgatttttgcgaaatgtgaatcatgcatactctctccgtcctaaaaaaacgaatctaggatgggacgtgacacattctaatacaataaatctggacaaaggtatgtccaaattcatagtattatgatatatcacatccagtattatgttggtttttttatgggacgaagggagtatgatattgcaactattaactggaggaatgagcagaaattgttcaggttttctatctgcttttgttgctgtaagtctgtaaccaaactaactagtacggagcactgcggtttcaactttacaactgagcatccactgaatttgcagagactgaaccttcagctcaataatcaccattttttttctattcggttcctggatgatctttaacctttctagtattctacagtccaagaatgttgaacatgaatcatcctcatatgagttattttcccctttttgttgattcttcaatttgtggtgcgaaataaaaaggctgaaagaaatatctaacagaaactatccaattatggcatggctagctttcaaccacagaagatatgaaagggaaaaaaaataaaaaaggagaacatgaaacagaaacagagg

SEQ ID NO: 250 - DNA, 7578 bp, Oryza sativa
aaattaaagttacctaccacataatcatccgatgctaggtgttcggatggatttgtgttgcttcgttattagattctaggtctacgcttcggtgcaaattgttgaaaattcaggcatgtcctctaagagtttgaccacaaacttttctaaaacatcaacatgtatcttttgtgttacagaaaacattcaaacctttatcatcagagggtgcgtgtacaagtacaacttaattacaaaaaaaacattcaaacctttattcagagtagtagaagcagaagccggcattaaagagggagaccataaattggtctgcaatttgcaaagtccttttcaaatagctgaaccttttttatttttaatattgccaaattgatgaatgttgacaaacctggtttgatttggagggaattttcacatatttatatagtagaaatttaaaagttcctggatgtccaattgccaatccccaaaccaaacagaggccgtgtttagtttctcctccaaaaatttttttgacgtatacgaacacacatttgaagtattaaacgtagactaataacaaaacaaattacagattccgcctgtaaactgcgagacgaatttattaagcctaattaatccgttattagcaaatatttactgtagcaccatattatcaaatcatggtgtaattaggctcaaaagattcgtctcgcaatttacatgtaaactgtgcaattaattttttttcgtccacatttaatgttccatgcatgtgttcaaacattttatgtgccggattttttcggaagtttgaagaaaactaaacacagtcagaacctgaaaagtacaattgctgaatgttctcaaatacctgaagaaaaaaaattcctcctttttctataaagcaaaagcttcacagagtccaggggcgcacctacagcaccaagtgtaaccagagcttacacaaaaaaaaggcaccacctttgctcggtgctcgtgggggagagagagagagagagacagatggcgacgcggatggctgcggcggtggcggccatggtggcggctgtggcgatctcgctggcggcgggcggggcggcgcagtcgtcgccgagcacgccgagctgcgcgtcgaagctggtgccgtgcgcgcagtacatgaacgggacggacacgccgccggcggcgtgctgcgacccgctcaaggaggcggtgaagaacgagctcaagtgcctctgcgacctctacgcctcgccggagatcttcaaggccttcaacatcaacatctccgacgccctccgcctctccacgcggtgcggcatcagccagaccaccagcatgtgccccggtaaccaacttattttaccctcctcctcctccttctatcccttgttcttttaacagcaaaagagagagagagagagagagaatatgttgtttttgatagaaattatcaccgtggcatcgatcatgagttgttaatttttgtaatattggtatccaaaaactcacccaaatagcatgatttgactgttcctacactgaataaatatgaggccttgttcttgctaatgcattgtttgcctggttgatggaatgatggtttgcacatcgaagtcactgcactgtggttgaagaaataaatccggttaggatgttttaaacaaacggccgcataaactgttcttactgccatgtataatgtcatatttctagtgacaagtcgatgtaattaacacaaatttgtccggcgaaaaaaaaaggtaattactacaaatttgggaaagtaaaggaatgtttttgcctttttgttgcataagtcaataagtggcgtagggaagttggctttgcatttctgtctctatcagggcaaaacgaaacaaagaaaaaacatttaggtgtgaatataagaccaagctccatgatttgggtcgaccagaagtttgtaggcatccagattcctgttttttgcttccccagtcctgtcctgtaataatcgtagtttaatctgaagacgcaacgatgtcagattataccagttcgccttgggtataatactagttgaatgattagtctcagcctaccgttggatatagtattgtagccatttcacatttgggatgatgtttataaatcaactaggaaaatagctaatttctttgacctgatgaaatggaaccatgaaacttaatctagatttgtttagcactgttttgttgtgctggtaacttttaccaaacatcattacaaaattcatttttttttggaagtcacaccagttcgctactatatctgttgtatttggcaaccgtccttttccttagataattttaatacatatatttgtatggttttctgataagtgtcctacaataatattttgcagggaattcccctacgaactctcctccaggtaatatatactttctgaagatagtatgcatggctatttaaacttaagattttcttagcttgttatatgtgcgatacctcactacctgaaactttttgtctggtccgataatttttaatgctatgaatttcaactggaagcagcagcattttgataaagtcatatcagatagatctgtaggaagaaatccctcaacttgagtttgatgtgaacttggaccccaattaaatagatgaatgaattaatatgtatggttagacatgtattagacatggtcccaaggattactgtggactactgttaagcacaatgatttgaaggttcatcactgctgtatgatactacctgtttagaaaatgtttatggtgctaaaaccatagcagttaagacagataataaatgctgcataaagtaggagttagtttggtctgaacaaatttatttaaagatgttacattttaagtcggcaaatcaaccaaataacatgggtgatcaggctaactagcatcattgaaagaggctagaaatggttaacacggacagtttgtgttgacctgggcatctggcatgctattagtaacagtctatcagactgccttacagagttatatttatgcatcctactgctgttagtcagtttatttagcgatgatatttttgcattttacgctcacactagccatgaagtagatgtatcaaattcttcaaaattccagacttgctatggatactcgtgcgttcaatgttcagggatagcaaacactgggtcttttttttatagagctaatgtggggtctaagtgtctacaattaagaagtagtgtagccattttatttgaatacaatgcattatattacttcggtaggaatacatgtagcattagcaaagtaaaggataacaaagatcccattctgcctctttttctcacatgtaaaatagttaaaattaaaagtttattcgaattgattacgcatgtaacatcacgataacactttacagagtacttttttttaacctcaattcttaattctattgtttgcagcctctccatcaggtggcaaaaacgctggtcatcgcactatgtcagttggtcttccaggattgatgagcttgttcctagcgttgtggtctgtattggcataagaattttggttccatatcagagatgttatcgcttatgccacagtagaggatttacatgtgacggtgtttgttgattggctgtatcatcattctgtacttggatcagaattcgttttgctgtgtatcaatgtcgcaagtcagaagacttacattgtgttgtacttagacctgtgctgatcaaagcgtaatggatgaattgtttatcttctactcctgctcaacatattttctcgatgtgattgtccaacacaaatagtttgccaatactagcttcaattgcctgtgatttgatcttcctaaaaagttgccttgcgattttgagtggatttcttcctctctgttttttttcctttttgaaaaagaggatttcaattttcagccaagcactgacgacgaaacctacagcctcatccgatggctatgtgcggaaaatacgccatttggcgtattagtaaaaaaaatataatttgtgattaaaacttttacagttatgttcgtagcgacttaaatgacaatcttgtaaaagaaactatgatgaaaaaaactcaaaaacaacttcaaaattaagttaaaaaatttaaatgttggcattggcatatgctgattgggccaaaagatgagagccctagccatcctagttgggctcgttgtgatccgttggatcaagaatacgcggcccacaccgaggagagtaaagcccagagggatagttttccctataagccctcatacaatattgtatttccgtttacaccctgcgaatatttttcgcatccacgttggacttgtcttaaccgttcgatgaaccgtaggcggccaagatagatccaggagagaatggcgaaaggaattttctcataaaggtccctcacagaattgaattttacattcactttcactaaaccccatccccttcctctcgcccatgctcctccggtgagcagcggcggcggcgacggcgaggtctagactctggagacgtgtggctgtcgaaatgaatcaactgagtgcctccgcaatgctctcccgcgcagcctctctccgccgcgccgcggcggcggccttctccaccgccgcggcgaggccggagaccgggctgtacggcttcgatgtgctgcgcacggccaagggcttccgccgcttcgtcgacgacgccatcgagaggtaaggggtggagatactgaaccgcaacctactcatctggaagctggagccatccattggctgctgagattttactgaaacgcgcaggtcggacgagctcgtggcctacatcgggcagctgccgccgtccgcggagattgtccgcgccatggatgagatatcgaacactgtagcctacttcctcttctgctaatgatttttttgcggaattagtacttgagttggtattgagggagtgatgtgcgttttatacttgatgatttggttaggtctgctcagttattgattcggcagagctgtgcaggaatacgcacccagataagtgagtgtacactggttactggttgcttcttatgaaaatcatactctggagcaatgtgttttagttttgagtggccaattacatgtgtattctgtgccagggaatttatggatgaggcagataaggcatcaatgaggatttatgaacatcttcaagtaagctcgataacatggatgttgcataccgaaatagttggtttgaggaaaaaatgagggagagaacttagtgaaatgaccaagtcagaaccattaaatttcctttttccctgtgattctatgcagtatctgaataccaatactactttgtacaatgcaatacttaaagctgagagcgaaggtgtcatgctcacagaggaagctcgaagggcagccaccaccttgcgtgttgactttgagaaagggggaattcatcttcctaaaggttggcctactagagttatactggtgcttcttgttttccacttgagtgttgctaaaagtataatttcttccatggcagataaactcgaacatgttaatcatctgaaccttgagattgcccagctgggtcgaaagtaggtacatgaattgtataatagacagtggctgtcattgtactattttttgttgaacttttcatattagctttgcattccttgttccagttgcatgtctgccagactgcaacttactatcagcaagcgatctcattatttggtgacatttgcttgttggtaagatatatatgttcaacatatatggtgttgagttcatattaacccttgggagatgcttctgttctgaaaatatatcattatttagcttgtttgactgcatagagtctatagggatgtgtgtcaagctgtcttactgcctgctaatttgctgtatagctgttctgttacaatgcttaaaaatagcgggatcatattacctactaaataattcttagtagtcctcacatcatcatattactaatgtataaatggtttagtttatgcacagactgctagtgctaagtatgaggctaaggtgtatatcgatctgttcaatgatgcacttgttcaatttatttcccatctcttttccattatcattagaaatgcgagaaatgatattgaatctccttgcacacacacaatatgcatgtggcttataagtgtattcgtaaatggtctctcattcaaatggcattctgatcgctataaggatatctattaattttactttttttttccatttaactgcacagttccattgtggctttcctgtttctttgcctgtccagtacatttccctaccgcccctttcttttcactgaattgattctgtgaattgtaattaatgccatgcctgttgatttgaggttctaaaatgtataaatttgcttgttgctagtgaacttactcattttttctgtgccaggttcagtgaaaatgttatgaacaaaccaggttttgtggatatatatccagcttcgcgcattccaagaaatatgcaacgccattttaaatccattcaccgtattaaaccttggggcgatgaggaacaaagaaatcaaatggacactacaaagcaaaagggtctaaggatagtcactgattcaggaactctatcaacagcactgagatgggtctcagatgaggaagtatgttccctttattccactcaccaaccattaattatcaatgtattatatgttatcaacctaacatttccaaactttccaaagatcaggaaacaggtatacctggtaggaaactctgaacctcgtgaaaacattacagttcttggcaagcttataaatgcacgtgacgagcttgcgaaggtaatttttttcatgttattgtagggcatttatttgaaggaaatagatgctataatgccattgtttttaaatttgatttgtttatgatttactacactccatggtgtactgtcaactagatatggtctgtaatacagagaagatgagggttaagctatggttaggtttactaaaatagcatgtttaacatgcattcttgtatgcatcaatacctgataaattgcttgaaggatatggtcatgtggtatcttgactcaaaaggtttcaaccatgtaattgaggagataaatttgagttggcattatgtggaaaatattcccagccaatggaagaccagtttgttgatttagttgagaagttattggatgcagtttatttgtgttataccaatgtgcttgatcttgactattgcagaatcaaaccttcctttccaaaggccttggatgacctatataggcctcattgcgtctatcctttagcaaaatatctaagctagatgtgacatgttaaactttcttatctcacatcattggatccagtgagagttatcagtggcctgccctcttcctttgcagtaaaatgtgctgcagcctgcagtatacatttttgtaaatgattttgcttggatcttacctgttgggaccaattagacccaaaattttgttggtatttgtgctttggatatatagtgcaagttgtatttcttaatctaattgagttgttatttggatcacatgttataagttga

SEQ ID NO: 251 - DNA, 1910 bp, Oryza sativa
acttgagtatgctggttgtaagaacaagtctgaactgacccattttggataaacgtttctagaaccgttgccgagaaacctttgtttgcatctggttctgtcaggctttccaaacccttatcacatgaactcttcctcaacaactgcattactaaatgcagttttatgcttcatctgctgtacctacctccttacatatttggtgacatgttattatcaaacattcattaacttgtattattttttcaggcatttgtgcatgacccattaatcaattggcgtctgttcaatttcaatgaagtccctcaagttacaaactatggaaatgctcacagtcacacagttgtcaatagcgaagaagctgctaatcgggagctcatgcaaccaccccggggagctcgggagagagaactgctacaggtctgccttctctttctcaaccttgactgttcagctagtcattatagtattaacgacgtaccgaaatattaagcgttttttatgctcatgcaggcggtcaatcaactcggtgatgctaacgaggttttgaatgagcgtgccgtagctgtgatggcacgaatgagtcataagctcacagggcgcgatttctcttccggatcatcgttgtcgggggcgggaagctccacccaacatggtaacgagcatctggcttcaggagacactcgagaggtggaacctggtttatccgtgaaggttcaggttcagaggcttatacttcaagcgacttcgcatgaaaacttgtgccaaaactacgtcgggtatggttccgcaatttatttaccacgccccatgtttgtcgtactgccagaaaaaaaaatagttgaccactgattttgtcaagttactcacagtttgcttgtttctgctatgttccacaggtggtgcccgttttggtgagccttccgtaagcagtgccatgtacatattgtaaataacgtgtacatatagatagatatcttgtaaagagtgttgtatttgggcagtgtacatgtaccagaatttcatttgttaatgaaagccgtcattggcatcttcgtgttattggaattgccaattttttttggtgggttgcatgaggtcaaagctaagcaagagttccacactaatggccgctcggcacacctatgatttttatcgtgggtgtgcccactgcccacacaattctaaaacctaaaccaaaaatcttaagcgaaaaatacaattaagccttgatttataaaaaataatatgccttgtttttttaaaaaccctaactgatttctttcatttgtgtattctttctggctcaaaagaccacatattcgatggctactcaacaaggcagtgcatacacaaccatcaaatctttcagtttaattttgtacaggtctcggtatatataggttttagggtgtagtgttaccttcttaacttctcagtcgaagtgaaaggaactgttgattcgttgaagcctcagagtattagtataatactcgctccgtccaagaatataagaatttttagagttggatatggttattaagaaagtaggtagaagtgagtagtggagggttgtgattagttgggaggagaatataggtggagaagtagttatattttgggacaaatcctaacggctagaaattgttatattttgacacggagggagtagcagactattgattcgttgaagcctggacggtcagagtattagtataatagcatgatacaagccagttataaacacatatggatgagaggatcgagtattagtataatagcaggatacaagtcagctataaacacatatggatgagataagaaaagagagagaaagaaagcgggttatagattcgtagccacttgcaggactccaaaataatatgtttatatgagaggtgggaccatgt

SEQ ID NO: 252 - DNA, 12555 bp, Oryza sativa
ttctccgattccccttgaacccaaaatccttcaacagcagaacaatgcaatgcagcggttaagaatgagttaaccgacataaatttacccgtccaaatgcatgtgtgtcgaggccattggtgaggaggtcggctatgtccttcttcatgaatcgaatcatcgcctgcttcttccgccgtatgagagccagccgcgtacgaatgcatttgaatgcgtgcttgctgcatccattgttcaagaaccgaaacgattggtcaaaccttctccatgaactcaaaacaatatttttcaaggtggaatcaaacaaatccatcgcaagcccaagaatttgtaacccaaattcgcgcaatccaagaaaataatctatcaaccaatccggaccgaacgcgtaagctgacgaactcgagaacctaggagaaaacaagaagcaagaaccactcgagaacctaggagaaaacaagaagcaagaacccggaaacccaagaacgcacccggcgaaaagttcgcccctccatgcggggaggattcaagaaccaagaaccccaaaagtagagcctcaaataaccagattggaccataagaactcagctgagctcgaaccctcgtaccctactaccctaggaacccaagaaccaaaaagaacaagcagaaaagaagcaatttctcaccatttgttgtagaacttggagttgagcaggctgccaaacatcttcccccactcctcccctcctcccagcttcttcttcttcttcttcttcttcttctcccttccgcctcgcttcacccaacaggcgaagcttccaatggcattaaatcatcaggaggacgaggaggagaagatgagagggagcaatgggggaggggaaggaggcggttgtgggggaggaggaagtggaggtggtggtggacagaatcgatgtgagctgttgcaacagaaggcgaaaaccaggtatggcttggccagctagggcgatcacgagccgtccgatcggaaattgacggtgaggattggttgcagcggaaagagggaggattcgtaacaaaccaggcgaaagtttaccgcacaaagcaaccaaccgaatttcgaatttgaagccctaatctttggggaaattacccgttgcagccgatattttgcttcaggtcacaaaagatgagaaaaatactgctgctttttttgttaatcttgaaggtgaacacgttgattaaattgcatcttaattactatcatgattaatcttcaatatacttagtattttgttattcggaagaggtaaactgagaacactgacattttgaagcatttgatacgaaacagtttcaagttggaagttgacaaaaaaatatatactccccacgtttcaggatataagacgttttcactttgattaaagtcaaactgttttaagcctgatcaaatttatagaaaaaagtagtaacattttcaacctaagacaaatctattatgaaaatttatttaattattaatttgatgaaactaatttagtattataaatattactatatttgtttataaacttagttaaatttaaaatagtttgactttgatcaaagtcgaaacgtcttgtaacggatggagtatttctcacgtgaaagtcaactactgaacattctctctcgcgaacctttgcaagaaacattcctgtctcgtcaaatctctgctagtacaggttgcagttaaaaccttttggactaattaattagcttaacatgataactacagttagctctagtagtaaaactcaacttgtgtaaataaattaactaacagcaacagttcatccccaccgcaacactcaagtggataggattacttaacctcacgcgtgacacagccaatcgattagctcgcataagtggttttcacggactactaattactcatacattgtcaggtgttacccacggcatgatgttgcatccttttccattccatttggcagatcaagctacacgccatgaaagctcacggacagcaagacacagcatggcttctattgcaatactccttgttaagaacagcttggcagagacacaagtttgatcagcttccagcgaatcagttgatatcttctactattaattaagtttagctgtggactaatctgttcggtttactcgcctaaccttgtttgttctgtgaatctctctcgcatgaacaggcaagtgcaggaggaaaaggaaggcataaaagttcagagcatctttcttatgaatctcactgccgctacagctattgtacatactccagaaagcgagatgtccagatgtactaaaactatgcagaagagatcattttttgtataattcagtacagtttgtggccggctttgactgttttattcagactagattaggagactttttaaaactgttgactaacagttatgcttgcaaactggtgtcagccatgaagaacacccacagaagaagaagatttctcgactgcaaatacagaaatgagacgacaaacagtagtacgtgcaaggagattaggagaagagtgagttcgtggcccaagtgtcaggcaggatcttcgtctcttcgaggccaaatgcaaccgacaggaaaaaaaaacaataaaaaaaaaacgttgacacctcccatgactggcactggcacctccagaactctagcagcgagtacaaatggcacagggtgagatggaattcccgagagtttaatagtatagccaagtactaactccaatttttctatagctaatctaatagctcatttatacaatagttacatattacgctattaatatctggtcccacctgtcatatacacactacgttttggagtccgtactgcagctgactacaaatctatagccagctgtccttctctctcctcatttattttcttgaaatatgtttgcagctggtttatagcatgctactttacctgctcttaggaagcgggtggcttccaacggtcagaatgggcaaaaaggttgggttggggaagatgagtgcgggcagaggctccggcacggggacgtgcgtgagatcgaggcatcgtcacgagctaccagcctttttctggtttgtattgtacagctactacgctagaaatgctccaaaagtctatgaaccgttggatgtatgggttgctgaggtgcgacgatgcataggaattgacaattttgttgccgattgacgcagggatgctgaaccgtaggtacatatgtacagcattcagtattttattttgtactacatctgtcaaagtatatagctgtcattctaaattgtttagtgtagattaaggtttaaggagaaacagatgatagtgtccttcattaaatggtgtatggttagttatgaaagggtggttaaagataaaataggaataaacgtggggtgatcgatggaacatgtggtaggtattctaaagtgacaactattttaaaacgaaatttgaatcctcgagagatagttattttgggacgatcgtagtactcttttcaattcaaatcaacttttatatatgagatcacgtataataaaatttgatccattttgagatgagggggaatacattgaaagcaacacatcgttatgcgtttataatacactcagtacgtgcaaaaaatggacgccattctccgacacaacaggtcaaatggctcatttagtttgaagccctatcaaaatattgtagtgtcaggcattaccaaatttgatactagttaggctaaagatgatataaattgaaatgccactaaagtactattttgaagctaccaaaatatagatagggtacaaatcatcaccaatctaaacatgtctaaaatgaactggcttacattttatcgaaatcttatacccatccatcgtataatatagcaaattaaagctaaatgggacgttacaacgaatctagacactcatccgtattacgcgacggacggagggagtataaaattttaggctttactcgctgatggctgagctgggccgaacggcaagagccggcccactgcccatgggcaacgcaatgcgtttgcagtgtgttgctagtgctgcccaaaacctctccaactaccagtctgagcttcagaaactgaaagtctgaaacctaccagctgctgatcaattcctgctctgcttcctcatcatctttttatccatccaatgcgcggacagctaccagtctttgcatcaactgaaaaaaagaaaagcattgctacttcacttctgctcgcatttcaattctgaattatcctgatccaaacggcagcggtaaaagcgaactaggagcgatcgatcgatggggagcgatgttatccaggccaagctggtgggtatgtcttaccctgaattttctgattgtttggttctttgatccttgtcagtttatctgggcatttccaatattttggtaggtacttctgggtgacttgggagccgggaagacgagcatcgtggttcgatttgccaaaggattgtactacgattgccaggcaattaaacaatacctgcttaattgttgtttaaattctcatcaagttcagtttcggactgaagattttatgcttttcaggagtcgacgatcggggcagcgttcttctcgcaggtgctgatcatggacgaggccaccgtgaagcttgacatctgggacaccgccggccaagaacgctaccacagccttgcgcccatgtactaccgcggcgcggccgccgctgtcgtcgtctacgacatctccagcacggtaattatcaaaataactagcaagtgatcttcagatgctagctgattacgcacctgctggctcatcagcagaaatggtagatttgctcatttgcagctaagcaattagtataatcacatcggtagattttcagcaactgattaagtgatatgcatatctgtgtgtcatacaggattcttacattcgagcaaggaagtgggtcgacgaactccagagacaaggtatgcctgagtgcctgacaatagtactactgccgtttcagtatcattcatatgggtctgtagcaaattagaagcaaaagtgttagttcaaattgtgattttctcttagtcttactacctgtgtaaacacagggaatccacatttggtgatggcattagtgggcaacaaggtcgacctggaagaaaagaggcaggttggaacgcaggtaaaaatgcaattcagactttcagtatctctgtatctgaagacaaaattcagaaacttttgtagggcgtctccaaaattctcatcgtctctgcttattgaaaacgcaggaggcgatggaatacgcagagcgaaacggcctcttcttcatagagacctcggccaagacgtcgcagaacgtcaccgagctcttctacgaactaggcaagcactaccgaaacaactctgtcggattcaactctctgatgcatcgtcgcctgataataacatctacgtgttgttgccagctgataggctggtcaaagtgcgacctcaccgcccttccgggatggttctccacgacggccggcgccgccgcgacgacggcggcggctggccatggcggctctgttgctccggctgatgcgcctctaccgactcccgaaatacgccatccttaatcgaaaacgtcttttactgaacccgccttggactttaaatgtccctggtagataaggcaatggatatatgctgatgaggcacgtgctgacgtgtctatgtatacagtaaactcgtacgtgtacgcgattacgcaacagcaagtcggtgcggcccaccaggccgccactccgagtccgacacgacccatcatatcgcgttcgcgagcccaagttcgagtcggacccggacaccgacagaccgacctagtccgagccctacaaatctcgcgccgccgccgctgctctgctttcttcttccaacctatttccctttcccgccgctgctctcaccgcgaaccctacgcgccgccgccgccgccgccgcggctgcgcacgtcgagcagcccgcgatggagaacgcctgcgaggccggcctgccgctgtcggtggccgtgtcggtgccgccggtgatggttgacggggagacggttccgaaggaggtggaggagtgcgaggacgaggaggaggaggaggagtacgccggggatgcgccgccgccgtggaaggtgatgggttcggatgatgagggcgagacggaggccggcgaggaggaggagattgccgaggccgacggcgaggaagaggcggcggacgtggaggaggtcgagtacgagttctacgacagcgacggcagcgaggacgagggcgacggcgaggaggttgacccggcggtggcgagcgccgcgcagttcgtgccggaagggcagtttcttgggtcggcgcagttcgccgcctacggctgcgccgccggcttcatgcgggtcgccgccgtcgaggcggacccggccgacggccaagagatcctcgtgctctaccgctacaccctcctcaagagggcatggagcgatccggcgggcgtggagctgtccatgtgggcgaaggtgtcgaagatacaccgcctccggttcatcgtcccggcctccggcgacccggcgagctcgctgccattcgccgggctatctctgtccccgctgatctaccacaacgactacgtcgaggagctcgagacgctgtggtccaagctggcggcgcaggtgcgcgtcccgccggtagccacgcgcgtccaggtgatcgtcgacgtgggcatcctcagggcgggggacaacacgccggagcgcagggagtacatgcgcgccgagctggaggccaagaaggagatgccatggccggggaagctcctcggcatggagctgcacgtgccggagccggtggtggcggcggcggcgtcgtgcaagagggacagcagcgaggaggtgttcgacgacgcgccagcgccgccggcgaagcggaggaaggtgttcgacgccggggaggagtgccccgtctgcctggacgagctcgaggacggcgtcgtggcgtggcctgggtgctctgtcgcccatgtcttccatggccaatgcttggagacaactctcaaggggagccagatgtgccctatctgcaggcgtgatcttggcctgaaaaccttgcaggagtagactgatgttgcagacttgcatttgaaacagaatgaatgaatgaattgtaggttgtagtagcagattgattgttctgcagttgtagccttcaattcgatcgatttcttgtgtgaatctggagcattcttcagagttcatacacatggttcactgtaaaatttgttccatggattatactatatatgttgtttctgttctgttcgatgctaagtataagcaatccattgtaataagagattcttggctatttgtatactgtatcatgcatgcattcaattatgactctccacttatggcttatagcaaatcaagtaacaatgtcagaagcattacttgaaattttgatttgttctttgtgtccacttagaattgaaacatatagaataagatgccaatatgcaatttcagtattcagatctccgacaaatatgtcgttaaaattcagaagtcattgtttgagccgtacttttcttatgttcaagaaagcgccatcatttagctgaaaacgccgtccacagaatcaacttggatcattagcagtttagcagcatctaaagggagaggatatttatcctctgaggggatgtctcctcgtataactccctctctctcaaatttaatatttggttatgaaaaagaaaatctaaagtcatttagcaatgtagagtgtagtaacattatcttgagagtttaaaacactttcccgcgctaccataccactcaacatttattttacataccataccactgacatccaagagaaatatcggatgttccatatcggtcacgtttctctctcgctcatttgtagaaatggtgataaaggatggcggctcccagttgtcctcctcgagacgataacaccacctctagtcctcgggacgatgatgccgcttctcctagggcacccctccccagcctttccttgcacaccttcttcctcctggcaatgccccctccctccctccctttcccctctttggcttatcaatttgttttagtcctttggccaaatctagctaaccccaacattgaggtacgagatctagttaagaaccgtcctagacagaatgagggtggcgggtagatagctccttgttggggctttccacaagcatcgcctccatcgcggtgtccctcacttctgtagggggagggggagaaggtgaagaagcaggcgacggtgatgaaggagaggccagcagaggcaataagcggatgagcatgcatcattgattggcataatagctcattggactcacggaggcgtacgtggagtttatggtgccattataagcgccatatcacagagtatgttgcccacaatatcttcttaatatcgcaattggttttgtttggattttgcatgtattagttacaatattttcagaatgttgccgtcaattttcatgttgcatgcacttttttttattgcaagagtatttatgaatgttgcatctatttgaaattactaatttttaccacctccattccaagatattgctatttaggatatgattttacttatcctagggcaatgaatctggacaccagccagattcgttgccaagaatagaaattgacctattctagcaatattttgagacgaatatagtatcaagttaacttgaatcatttctttaattaaccaagtgacgaaatatattgcctgttttggctaggatcgggcagtactgatccctaatcgcatccgtatttatttattatggataaggcatcataatggtaatggatgtgctgactacattgtatatatattctttaaggaataatcaactatttgccacttgtacaagtggttctaaaagatttgccagacccacatgtcatacacacataagggtctacatgttatagatagcgagcgacaaattcttaattaacacatcttaaaaaggccccatgaatccgaatccactttgtgtccgaaccgaaaaggaaagcgagtgcgcgctcgaattaagccacccgccctagctagctcctgtagagatcgagatcgagcgagctcgccgccggatcgctacccgcggcggcggaggaggaggcgcccgccatctcggtggtggactacgagctgaccgacgacgacgagagcggcgacgaggccgacgagccgacgaaggcgagggacggcgaggcgccggcggccagaggcgagctgccgctggtcccggcgccgttcgtcccggaaggggagttcctcggcccggcgcggttcgccaccgccgggtgcgccgccggcttcatgcgtgtcgccgtcgtcgagggcgacggcggcggcggcggccaggagatcgtggtgctctaccgctacacccgctactcggggacgtggagcgggcgaaagggcgtggaggtgtcgaggaggacgaagctgaaccgcctccggttcgtcgtctcccccgccgccggcatggcgagctcgctggcgtgggccggctcgtcgctggcgccgctgatctacccctacttcttcaggcgggagctcctggagctttggtcgagcctgatcatggcggcgccggcgagcatcgtcccgccgggagccacgcgcgtggaggtgctcgtcgccgtcggcatcctccggccgttggacaagaggccggaccggatggagtacatgcggcgcgagctgtaggccgaggcgccggcggcgtggtcgtggccggggcaccacgtcggcctggacctcaacctgccggagccggtgctgtgcgacaggggcgccaccgccggcgaagtgttgtcggaggaggagggcgacggggcgccgccgccggcgaaaagaggaggagggcggtggctggggtcgccggagaggagtgtcccgtttgcttcttccagcttgagaccgacctcgtcgcgtggcccgggtgctccgtgcgccatgtcttccatggcgagtgcttggagttcactctcgagaggagtgacaagtgctaggaaggacctggttataaaaaatttgaagggaaactgttttaaacactcaggtggacatattaaatggttataaaaaattttttaaaaaattgacatgataggttaatatgtaatatatcatctcacaaacatgcaagttcaaattcgacttctacaagctgtaacaaaaataacaaatttgactgtgaatatacatatactagttagagttaaatttgttatttttgttatagcttgtagaagtcaaatttgaattttcatgtttatgaaatgatatattacatattaacctatcttacaattttttttggaattttttcataatcatttaggtggcatgcaagaaatgggtggacatccacccgagatattaaaatccatctccaaaatttgcaggcttgagttctggagccattgatcattgatgctgctgtctcaaaatatagtaacctaaaactaagggtgcgctcgtttcagtaggtgtggtggactgattagccacacgtaaaacgagaaatgagattagcatatgattaattaagtattaatatatattttttatgaataaatttgttggatttttttaaacaacttctttatagaaagttttcgcacgaaatataccatttagcagtttgaaaaacatgctaacagaaaacgagtagaatttaatcctataagctgaaaagagcgcaacctaaatgagacacatataatagtacaatgaatctgaaccgaggtatgtctaaattcatacgagggggccaaacgacaatgaacatataaaaacattactatatgttagtattatgccaggaatctaagcttgcaatggtaaaataaaggataacaacatattatatatgtttaatttggttgcttggggggaaaacatttgcccttatatttgacctataagcgtaatcgaatgttctctttttattcattattggacaattaagtactactctctccggtttagtggaacaaacatgtatacaaaatatccaatgaaattctcaaatgcttttacaaattttgtccatcaatttaccaacaaataatggagctcaacaaagtgagtttttaaataaaggaatatcactacaactttgatctatatgaagtttagtttacgttcatttgaatggatcaagaaacagagtcctcggctcggcaaagtccttatcatgagacaagagtcctcagcttggcagtgttctcaacacaacaaccattcagaaacacggaggagggggaggcaatctcatccattcgatctaatgcagacaaatatgtgtcgttggattttaagaatgaaaaatgagtaaaaacagttggtgcattgtagggtagaagatacaattaagaaaacaggtaaaatgaaaaatggatgtgatacaaagaactatataaacttacaatcagtatatgaacaaagaatatctacgcacaatcaatatctgtctatagtttaagctctacacatgcaaggcgtaagggggttttcccagaggtcgtagtgtgggaatgtggactcagggaggccagttcgtgtctggtgagtgatcatcacatcctccacgaaagttgcccatggcatgtagggatcgccgaagaacttggacatgaggcccttgtctggcttgatagacttgagccgatgccgacccatgtagcggcggaaaccgatgatcagcttggcgaaattgccaccgtgggtcatgacgaacacgtccgatttcaggcaaaccaggaagtccaatgcagcaaggctggtcacatgcttcttgaagtgttctatctcgtctttgcttgcaagatcttcttttgtaacctataattaacgaaaaaacagagagaggagagaacagatcaattgtctgaacagattttatgctggtcagaactatctcgactatctcgactacattcaaaactatatgcaactagtatattttcccatgggttgcaacagttctcaaacaatgatagaagacacatggcataagttctagccctgcataattactcataaataaaagataaccgttctctaattcaatgaatcacatgcatgattcacaaaagaattaaatgcaacatcaaatgtttctacaaagagcacgctcgtgtttacgcagatccatctataaaagatccggtcaagtaatgagtgtgtagagacatgacactactaacatttataagtcgtagtaaagattttgcaatatgtctacattaaaggaaacacggaatgcaataaattgaaccttctagtaaagacctaaagtactgaaatgttttcccggtaaaaaaactttgaagcacttaccaaattggggaacatattccttagcggagccattctattgcttccaccataaacttgaccggatgcaacatatatctgagtttcctttgtatatcccattgcacgttaaataatacctattttcccaggc

SEQ ID NO: 253 - DNA, 18455 bp, Oryza sativa
ttacattagcatttttgtttgcaggcaccgcgtggcaaacattcttgggaagccaccttaaactatgctcgtcaatgtcaagagaccaagaccatgctttcaccttcagacttcagatgtaatcaacacttgccaaactgctgctaatgatgctttgatagtacaaagattctgtctgaataatttacaacaggtactgtatactaattaccaatgctacaacattctaggttagagtaaactaacaacaaaacaaatctttaggtgcttcctgtctgttgctctctcttaagcttatcttacaattgtttcattctagattgttcagataaactaatgtcaatgctacaagaatccatgcaaagaaataagtgaccccaaaagaaaaataaatcaaatgcttcatttcatcaggatggcatggcatctgagtgcacattggcatcttgtgttctctgcatcttgcattgcccgaggcttcacttaaactctttattaaaggcgatggatgcagagatggatatagatggatggcttggacatgtcaggtccgtgacttaaattccaagcgtattctgataacatctccccatctaacaacatttaaggcacatgatttggagatttttgtcaaacatttttggcaccaaatctgataatagctcacaactttcttgctgactttaggtgatatcataagcccttttctctgattgacttgagatatataattgtcctattacgtccatctttttggctactaatttgtagattcatcttgagcagcaatgcaaatgcaaccaccctaagccttcctagcccagtggttagcggttgcccggccaatctgaagctgatttgtacagcaaaagcatgcgagatggtacgttccatgtctgatgaggtgaagtgctgccttgctcgcttcttcagataatgacctcgtttaatgaggcgatctgacagtgactcgcgtagggagggcactaaatagcatgacggtgcactaccgctccttcagaaaatgactttgtttagattcatgaacattcttctattatttctattctgttccaatcttatgttttttctttgctgcaaccaaacactaatttcttttctttgggggaaattgggaatccatatcgcttccattgtgttttttctattcttgtctttcaaaaacgcccatgattcagaaagaactctactttctgaaaagaattctgttgcaaccctgtttttcctatgttacaaccgaacatctgtttgtgatttttttttctttaagaaaattcggaatccatataactattcctgtattattcatgtgttgtggccaagcatctcttttgaggttttcctatgtttttctcttttgaagattcatgtggcagtcttgtcattggcaggactagaaactggccggcggaggggcgtcggtcggatgtggcggaagccatgtgccgccgatgtttagatggtggacttagattgggcgacgaaccacggcggtaggggttccgagtgaaagcttagcccaatcctttgggctaacagtgactacgccttcgggcgtggtaaccctcctgaaggcattgttgaggtacccctccctcggcgaggagcactgggtgaaaactagtccagttctttggacggatgacgattgcgtctttcgccgttgcgaccctcgtgagggcgttgtttttgtgttttcgtgtcgtggtgatgttgttggctcggtggcgatcggtctcgcatagcgatggccggttcggtgcttggcttcctctctgtagcgtgtgtttggacggttggcacatggttcaaccgttcagggcgtgtgttctagtgcacatccttgtaaaacttttcttgtaaccttttttcttctatcttaattatattgaatgatctccttcagtcattccggcaaaagaaagatttctactttacggaggaggtttaagatacgatttttaggcggcaattaatctgctgttgcgtcctgtagcgatgatgctgctgcactggtttcccctttgattgtttggcattgattaagtttagctgcttggtcgtgtgactcatcacattgtgcaaccgtggcccgaaaggacgacagaaagcgatggcttgtcttggcttcatccactttttccattgaactaactatagtaccagcgatctccacagtaataatatcatacgaccaaactgacttgcctgtattatactactaacatttggttgacttggggcttggaaccgcggtaagatcgttgacattaaagattagcaaaagctaagctacaaactgtaacaactttccatcttttgatacacaaaagaaatactgaaaacttaacttatctgtaagtttacatttttaaatcgaaataaatacccccatatgttttatttaaccacaaaaatctgaaatagtttaattagcaggcaggcagcttagttcaggccccatttttgtccgattgagatgcatattttacattagtttcattagcacgtttgtcatcaaacagtaaaatggtcacatttcatgcaaaaaaaaattcctatatagaagttgatctaaactatcagataaatttattttttaagtttgctataagtaaaactcaactaattttatgctaatgactttcttattttatttttctaactttattttttatttttaagtagaatcgaataccacctcagcctgattaatcggagataatgagtctacgaatttgccaaacccaggagaagagaagaaaagaagagggagaagaaaagaaaagaagagaaaacgcagcagagtcacgtacgaaaacgaagagcggccaccgcaaatcccggcgggattaattcgcccttttacctacccaccccaacccaacccatcttcttcttcctcctctcctcctccacctcttctctcccttcctccacttcacccatctctccccacctccacctccatatctatccacttctcactctctcacactctcactagctaggagcactccactccaatttactactagtatctctctctctccaactaccgccattgccttcttggcaagctcggttttcttgcggagatgaaggggctcagtgggccgaagctgctggtggtccacccgtcgtcgaacaagccgctgggtggcgccgcgtcaccggcgatggcggtccttggctcccgccgccggatgtgggtggtgctgttcttggccgggttcgcctgcgtgtcgctcggcacgatgctgtgcgccgcgcgcgaccacccgccgccgcccgtcgccgcgaggaggctggcggcggcggaggcgcaggcggcgacgctcgcagtgtcggcgcggggtggcggtgcgggtggaggtgggggtgggttgccggggtacgtgttcgacgcgctggtgcagtacgcgtcggcgggggggaactcgacggcgagcatgccgggcggcgacgtgcgcgccatcgcggcggtggtgaagcggcgggcgccgtgcaacttcctggtgttcgggctcggcggggagacgccgctgtggcgggcgctcaaccacggcggccgcaccgtgttcctcgacgagaaccagtactacgtgtcccacctggagggacggcacccgggcctcgaggcctacgacgtcgtctacaccaccaccgtccgcgagttccccgacctcctcgacgccgcccgcgccgcccgctccgccgagtgccgccccgtccagaacctcctttactccgactgccgcctcgctatcaacgacctccccaaccagctctacgacgtcgcctgggacatcatcctcgtcgacggccctcgcgggtaacaaccaaacagatctaatccttcttcttcttcttgcaatcgattctcctcaccgataatgatgcaggtacacggcggcgtcgccggggaggatgtcggcgatattcacggcgggggtgatggcgaggtcgagggcggagaagggggcggagacggacgtgctggtgcacgactacgagagggaggtggagagggcgtgctcgagggagttcctctgcgaggagaatcgcgtggaggaaaccagcaccaggtcgctcgcccacttcgtcgtccccggcggccgcgacctccgccgggaaaccttctgcgccggcggcggcggcagcggcgcctcgacatagatttttctccctttttttactcacttggtagtttttttttttactcccatcttttgatggctaatgatgatgtcggtggccatggcccaatgagtgagagtgaacataagaacaagagaaagctgaaagcctgtaaaaaaatcggcgagatgcgaagcagcacataaaaatgtgtccatggcgttcatcttcgcttctctttctgtctcttttcttcacgttgagccacaaaaatacaaggtccagctgaaaacacaaagggccacaaaaacatttggtacacaacacaagaaaacataaactccgatttatcgacatctgctgcaactagtgggatgatagtaaaggtgagtgcgagagtggcgatatgaatggcgctgcatgcagctgctgccatatttggtgagggcgctggggcctcgctgccgtgccgtccatggtggccatgactggctgtggctggctggatggatggatgactggccagccacagtgccactcctcccaactgacgccctgtgttgggtgggagcagcgagacagcatggtgacacactgccacagtgccacgccccgtcggctgttgcctcgtcgcctctgctgctgctgcagcagcggttgcagcctgacgcgacgcgcacgttgccgggcgccgctgcggctgcggcgagggtcgcaactggctcggtggatgggactgcgtggatttggctgcaacgaggcaacgacgagggggatgttgttaacttgtttggcctgtgtgattaaccttgtcataatccataactgagttctgattgattgtcgtgttctgttctgtgtaacaaagttaggcagaaagctgtgttgcatgtctgaaatttttaggcttcaaaacaagatagcatttattatactgtgtgatgtgttggcattggatgctgcctcccaatgccaagtacccatatcctcgattgctctgagctcgagtcgatggttccacacttccacatgtactactgtaccgctcgatggcatactggtggcacccatggcgccaatgatacggtacaaaggtatgcgcactgttttgatggcttcacgccctgctttatttcttgttttgtacccctagaaccgtagaaaagcctagtagatgcatgatctcataaattgcccggcactaccttatatccatactttgtgtgtgcataattatgtttaactactacgaacattatacacaaaatagcggtgtcaacctgcacgccgccgcaggtgttagtcctgcctctgagaataccacgtgaatttccaaatgcaagttatgcaaaggtggtgaggatcaagaagaatacccattgattgaaacagtcaacatgtgaagttacaaaagctagtaggcaaccatcacaaaaatatttgccatgttttcacgaatctgacaagcacaattggaaatacatcgagcagggcatgcatgtagcgtcacgaaaaacttcgataaagagcagactgcaaataacctactcctaaatttaaaccacacgagcgacgaagctaaacaaacgtggcgtagattgattaccgcctcctcatgccccttccaccacggccccgcatcgctcctccgccacggccagccatcgcgctagcagccgcatcaccttgcgcactttcagactacagcaaagaagataacccggtcagacgaagtgatgcctattgtagcagcgatatgcatacggcaacttgcaccaaattgtgaggatggaaatgaatgactggctgaaacatctttttcactgtggcatcacaaaaggtgaataataccacaaattgtaagttcattaactagaagagattcaggtatttaaatttgtcattcgcttacagagcatactttacagtattgcctaaaaccatatgtacacaccctgaggtatgattcacttagacgtctaaaatgacgttactaaacaattattagtgaaaaagtagaagaatgaaccccatcacaaaaggatggcatggctatctttttttccttgttcaagttacaagcggaaacaatgtcatgttcctagaacaagcacacggtgtggcgcaattggcaaaggggaaaatagataatactggccaacggagaatttagatgcatttggcagagaagcgaaggatggtcaggttttattatgacagatgagaagaatcgatagtactttctttaccttgggatttttaactgtctcatccacgctgagaataaggcaagcagcttcagttgcagcatttatagcattgatctggaaatatttattttataccatcaacataacaatagggatatttaaagagttactgaaaaggagaagcaccattaccttcacaacagcaggttcccagacaaagttagcaaaggaatcagcaattccaccagtgttgatgtccacaccaaaattagcaccttcacctgttaacagtgaaccgagaataagagaagttcaccatatgagttcatataatgttacagttccacattggcttgaatgaattgaaacttttcaacagaaactaactattgaacctaagatacaggtaactaaccagatgcatgtttctgtcggagcttattgagtacatcagttgcatcaaatccagcattgtcacaaagttgtcttggaataacctgtagaagagttaatttcaactgagcaaatttgtatacttgcaaagctttgatctataagatttgaaacaacattgagcaaaagtgtaaaaccaacataagcttagtgccgttttagtgctagtcaaaaactgcagtgcttgatgaacataacctcaaaagacacaatagaacttcccattgaaaccaacggtagctcaccacaaggactggctgaacattaatgtttgttttaatgctacaagctactagagattatgccttgtcgatcacatcagggctgaaaactgaacctaatatttattaatccaacactctccaaaagaagaggacatattctatagtgaactcagggtctggttagcaacgccaaatacccaacattaacataacaacataagtgcaatttagttacagttacagttacagcatggaaggcattattcatagttaaattccccaacaatcacatcacacaaacaaagctcaattgttattctgattgcacaagtgataacaaagccttaaggaaccagcaattgcaaaaaaataaaaaaagttggattaaacaaagtactccatactatgaataaacaatggggaagaatgaagccaaggatgtacctcgagggctttagcaaatgagtttacgaagaattgagacttcccagctatggtacgtgcatgctgtctgaggtacttgcttatttccatctaatacccaaaaaaaattacagattagtacattaatatacgtggaaaattgcactgcttagtttaagctggtcatgcatacatcaatagcaccaccaccaggtacaactgttgagttcttaagagctcttctaacaatcatgatggcatcgtggaggctcctttctgcttcctcgatgaactgataacattaacagcagcattagtatatcatgattagttggaaaacttagcaaatcatatatagctgtagagcacctgatctgcaccaccacgaaggactatggttgctgtttgaccagaagggcaaccactaaatatattgaaccgttcattgcccacttgcctttcctcgaaaacttcgcaagtaccaagtaccttttcagcagaaaggaccatcatacattagtgtgcttatttgttgccaaaatagctaaccgatgcaaacatgtgtactatgactcaaaacatgaaaatttgaaaacatgattacctcatcaatgacattattcactgatgtctgaacggtaccacctgttgctgctgcaacacgttgtaaatcctcttctgcaacacggccagcacagaaaatgtcccggtctgcaaaatactggataaaagaaagtttttgagcttaggctacagtgctacacaaaaactaattgagagaacaggatgagttgcaacgagaatgcatacctgtgttgcaagatcaccaattgccaaccgagaaaggactatctttgccccacttttgacacatttatccaacttgtcataaatgatattccattcagcatcgacgattgattggtattgtaaagggtcagacaatctaaataaatgagactacagtaagaaataggggaagaacagagagtgcatgcaaatatgaatacagatcaagataacactacaagtgcttggattgtgctagtacctgatttctgcattttctttctcagatttcaattctagttctatgttcagcaaaagaatctttggactcaagaacttctttggctgttgctcaaatccagcataggaaaatgtcttcttgaaggcaacaccgttaacaaggaaggaatctctcatggtgcctccaggaacctaataagtacaaaatttagacatcctgattcataatgaaatttagatgctaaacatctattgaatggaaactggtttttgatcagtacaaatgtactatagtcatcatgcactcgatgatttaacacaaagctgtgtaccaatatcttgagaaattaccttttttattccaagaaggttaagtctgtcatcattgctaatggcaagaacagcatccacaaccatagatgcaaaaaattctttctcgccacctatcaactttgatgagagtgttgttgcagcacacttggctagcaattccttcttttcctcaaggcttttcccttcaatgctagtggccaagtctttgaccttttcaattgcctgatgattatttcatgtgagttagaaaggaatggagcaagtgggagggtgtatagagaggagaagaaaggcaagcatcctaaccaaatggccagcagtcctataactgcgaattagactatgcggatgtactccgtcctcaatgtaaggttttgcttctttcaggaactcagcagcaagaagcaccactgtggtagttccatcaccaacctgaaggaaacaagaggggtaagatacagcttactttcaagtgtatgttacaggctgcaagtatacaactaaaactggtggcagatgataaaacaagattaaattgataatcactatgaatacacaagcatcagcctaaacactaattatgccacacagcagcttatgaaagagcatcatcttgatccaatgcaacacgagcaaatcacaagcctttcatgacctaattaacagaattgtcttttttcccgtgggtcaggtcattgtatgaaatgagatgcgaaatttgaacataagtaatctgtttgatctaaaaacactaaggctatccaaacacatttttcatgaatccaaacatcacatatcagtaaaccacgggtaacaggggcaaagcaacgtgatccggaaggaacaagcagcacatccacggatcaccagataacttcatttcactcgtttaagtacttaacaaatcactcacacacacacacaaaaaaataacagatcatcgattcagatctctaccctatgcatcttgtggcacggcatattcactgaagcattgttccaaatcgcgcaaaacagtcttatgtagtaggacagctgcacactccaacgaggttctactgccaagcgcgcgcgcgccgccggggggggggggggggggctcgccagggttttacctcggagtcctgggacttggcgatgtccacgaggatcttggcggcggggtggatgatttcgaggaggcgcatgatggtggcgccgtcgttggagatggtggtgccgcccttgtcgtggtggatgagcttgtccatgccgcgtggccccagcgtggtgcgcaccgtgtccgccaccaccgtgcacgcgttgatgttgctcaccacctgccgcgcccctgcgacgtgtccgtcccctccttcagcaggatgatctgcggttgctgcaaaatccccccacaaaaaaccccaaaccacaaatcacgccagtgattcaaaacctcgcggggaggggagcagaggtcgcgtcaatggagactgggatagtggtgcttaccatcatggacgccatggcgaggagctcgcggtttcggggggatttggtggcggggagatggagatctgaggtggcggcggagggggagggggagggggaggagagcagcgagggtttttctcgatcgctcgttttgagagggcggcggcggcgcggggaaggcgagagttctaggaggccccccgggtgccgaatgaccttgcccttggaatgtttgcttgcatcctagccgtccatccttggaacgctataaagtagtacggagtagcagcttggacagtttctacaaaaccccttgataggctcggttattttctgttcaccgtttgccttgtttgtttttttaactggaacatgaataccccgtcgtgttgctgctggaaactaagttgtatagtatgtacaataagctatattatattttgtaagccaaaataaaatgacttcctatgttttatataattaacacatgactgcaaatataatgcaaggtgaacatatttttgatacttatgaattttgaataaaaacagctgaggttgtatggttttatgagagaagaatgaagagattatttgtaccatagatttattatttaaagactacaaataattggaattatgtggcttcatgagagaatagagaaattagcattaactatacttagtggggatgaacaatacaaatatagacaaaaaactgggattgtatggtttcacgagagaataaagaagagactagttgtagcatagatctatcatccaaaggctaaaaataattgggatgatgtggtttcataagagaagagagaaatagcattaactacacacttagtggggatgaactatataaatatacaagattaagtattagcctttttgttgaaaaatagattaatatgattttttaaatcaacttttgtgtagattttttttgcaaaaaatgcactgtttaataatttggtaaacgtgcacgcggaaaacgagggaagtgagttgggaacctgcaggaacgaacgcatccttagtcagatgtgtcctatatgagagaaaattctatttatgggcggataaaaaaaatgaggagctgaacaaactatataaaattataaccctcttctaaaagcatgtttaataggctaacatggaccggcgatagcgtgaccacgtcgatctcattgctatgttggaggagacaatggtagagagagaacgcgagctgacaatagaattatcgcccggttgcagcacactgtacaatgaaaaaagagaaacgagtcttatggagatcatagagattgattcatgcttggaacaactataaaggatgcaataattagtaggatctatatcaattaaaaaatatatcagttttcatatttacaacaccagcatagttttataaatctataattgaataagttttcataatatatttatatgaggttaaaaatattactaatttttttcaataaaattagtcaatcttaggagtagtttaactttaaccaaagttaaaacatcttataacctgaaacggagggagtaccattgttatatggacaatctatactaacaagctataaatgacgtagatgtgttacaactagcaagttgacaacatttataaatccgctctaatggatgtatgaaaaataaaattaataaggtgtaatggggacacccgtagttaccacgtcggcaatagaggctcagagacccattcgtatggcagatccacgtagttacccgtagttaccacgtcgtcccatggcagatccaacaccattcgtatgaatggctaccatatttttttctttcacaattcgaaaagataatccacgtattcacgaacccgtccaatccacgctcgccgcgcccggcaatcgcgtggcgcgtgtgacgagttcggagttcggttaatgtcaacgacgagttgggcagccacgcagcagcgagagcagcgtcgcgtggattccagccaaacccctcctcctctggtctccagtggcgtaacgacgagattcgtcctcctctcctccgagtaaaagaaggagaccccctttgcttcgctgttaccgcacagtgaggccacgtcgtagggtttttgcttgcttctcccggctgcaaagcggagccgcggcgcggcccggggacgaggagggaggggagccatggagatcgggcagcatccggcgagcggctactccaaggagcaccagaagacctaccaggagtggttcgccttcgccgactcaggtccgatcccaatcccaatcaccctggctgcttcgccccctttgatccctgttccccttccgctgtttggtggtatctgatgattgatggtttgttcgtgattcgttcggttaatcggcggcgcgcgcagatggcgacgggcgcatcacggggcccgacgccatcaagttcttcgccatgtccaagctcccccgcgccgacctcaagcaggtgccaagtctactgtttccccaatcctcttatttattactgtagagttgtgtgtactgacttcgtgaaatccgcgtcgcctctcaaggtttgggcaatcgcggactccaagcggcaggggtacttaggtttcagcgaattcgtcacggcaatgcaggttttcctccccttttcgatgccttggttgtactccgtgctgccatcagaagtgtatggctttattaattagtgatgggtttgtcgcaattgatagcttgtctctctggcgcaagcgggggatgagatcactcaagacagccttaagcgcgatggttgttattactagccaccaagtactaagcttctttgatgagtttgtatttactagtactaattatagtttacactgatttctgacagacttgggcagcctgaatcctccaacgatggatggtttggatgctctacttgtggtaagtctactatgcgtctatgcctcagtcagattcattaagttgtgctgcacaacacaaccggataatagtgtgatgattaattgctttacagaaatcaaagcatcatgctaagagagttgatccagatatcgatggtaaggaatgcacccttcaataggaaatcatgctgggaaaattagctatgtcataggacaaacaatttatatttgtgcaatcatgcaggatttcctcaggctcaatctcctgcaacgagccaatggttcagctcaaagtcctcaaagaaggtaatgttcgtgttatttatttttctttccttttgtgttctgaacaatagatacctacatgaaccttgaagctcttgcaaaattttggtgagttcaatttgcattacattcatattttgataacatgttgcaattttaaaaaggaaagtaaggcaagtaaggagtttgctgctgagttatttgagcggtgaagacatcaagttaagctttgacatgcaatttattgaactacgaagcaacagtacagaaaccttgattcaatgtcttaagatgaagtcgtgttgtttaaagatttaccccttatgtttttttttcacaggactgcgtcctctaaaactttgtctttaataatgttcacaaagaggcaattattaaggcctttgccctatacaaaccattgatgccagatgataaactgataaagaagttcctttctttaatgagacacatatcacttatgctgactttgtttgtggtgttctatatgtgcagatacccctgaatgctgttacttctgtcattgatgggttaaaaaaactatacatcgaaaaattaaagcctttggaagttacatacaaattcaatgattttgtatctccattactggtacatacttatatattctcattatctggtttcttattagctataaacatctaatttcttttgtttctctgttccttgttgttttccctgcttatggtatggtttaaagtaaattacttgcatgaataacaatatctatttcttcccttttgcagacaaatagtgattttgatgcaaagccaatggttatgcttttaggtcaatattctacagggaaaacaacttttataaaacatctgctcagaacaagctatccaggtttttatttagtattttctatatttatttttctgtagttttccagattaatttaggtagcatgtgcttgacagttgatatgcacttgcaggtgcccatattggaccagagccaacaactgacagatttgttgttgtcatggtaaactctagtctgcgcaattcttgcaaatgatttgttaaggaagtttgctacaacaactattggaagagctatcttgcatttttaaaatgaataagacgctatttcaatttctatatttcaatgctgataattggtttcacatgctttacgtttgaggctttgagccagtccaaagtggtagaatatttgtcagtcttttactttcctttttctttttagtttccatggctaataagagttagaacaagtagctcagtctttgccttcttttacttcaataatggtatttttatgtcggatgtatggattttgccattcattgaccctttgttaatgatagcttctaaaaaatgtcggctatctactctattgaatgctagcatggtgacactgttcaggcaccatcttatcaaaatttcctctgaattggttagctgaccatttgttcagtttctgttgtggttactacttttagggtttgttggctagtatagaagaagcataacacacccatcactatttagcataattttttcttagcttttgaacaaattcatttttagcttttactacaatggattgatgtgagcgagtgcaatgtaaacaatttgaatttccacttgcctagctggtgtgttgatgggtatattctatctgtacttctctattactacttactccagttaactttcttctccctatactagtcaggaccagatgaaaggactattcctgggaataccatagctgtgcaagcagacatgcctttcagtggtcttacaacatttggaactgcttttttatccaagttcgaatgctctcagatgccacatccagtaagatttaattttgatgcatgtagagggcatgtggtaatctagagactaattcctaatttggatgttgaagctactagagcatatcacctttgtcgacacacctggtgttctctcaggcgagaagcaacggacgcaacgtagctatgatttcactggtgtcacatcatggtttgcggccaagtgtgatcttattcttcttctgtttgatccacataagcttgatatcagtgatgagttcaaacgtgtcattggatctttacgcggacatgatgacaaaatacgtgtagtgctaaacaaggcagaccaagttgacactcagcaggtagagtatttcatagccatctcttctcacgacgcttgtttttgcatattgctttgttttgacataaatctgttttccttattggcgtgcagcttatgagagtctatggtgcattgatgtggtctcttgggaaagtattgaatacccctgaggttgcacgtgtttatattgggtaatttctcatgcccctgtcctcactgcttcgctcctacattatttttgcacagagtactttacaaactacaacttacaataccataaaaccataggttgaacattgctagaaatactgtagataaatttcatttaccttaggttagcacagaaattcacagcagtattagtgggttctcaaataattgcgtaatttggatctggtgcttgtactgatctttgaggccgcctcggcatattaaagcactaaactagtttcctgttttactcacagatcatttaatgacaaaccagtaaatgaatcagctgttggtccaattggaaaggaactatttgagagagagcaagatgatctactttctgatctgaaagatataccgaagaaagcttgtgaccgtcgagtaagttgttacagtaccttctattgtttggcttatttgagtcctggatttcacaaattaatctcattccatatttgcagatcaatgaatttgttaaacgtgcaagagcagccaagattcatgcccatataattggtcatttgaagaaggagatgcctgcgatgatgggcaaagccaaagctcagcagcgacttatagacaatttggagaatgagttcgcaaaggtatcttagctctgtaagcctgtaatttctactacatccgtttcaggttataagactttctagcattacccacatttagatatatattaatgaatctagatatatatgtgtgcctagattcattaacatctatatgaatgtgggcaatgctagaaaatcctataatctgaaacggaggaagtagtcattttggggccgttgtagtcttgtagactttacaaatggtagatttgtagtgagtatccaccctttgttcgtttagaacacgtggtagattctctgcctatcttgtcctcgtgctgtaatacttgcctaaccagttaattagtagttgtagtaatagctaattctggtttgtcgacgtatcgcattatgaagtattcatgcagttcacctgcatggttcatttcagttatgtaattccatgcttgattactatccgtggtctggtggaacaggtccaaagggaacaacatcttccagctggagatttcccttatgtggagcatttcagagatgtcctgggtgggtatagcattgacaagtttgagaaaatcaagcccaagatggtgcaggcggtggatgatatgcttgggatacgacattccagaactcctcaagaacttcaggaaacccatacgagtgaatgaacacctttaaattatgaccatggttttcaactttttatcatgatgagagactagtcatattcggagggaatagggatgcgctgcattccatagttttgcaactgtcagaaatctgggattgctgaggtttaggtcttgtaactcttgtagggcgtttattgtggcatactttaccttgttgtataactgcatgcataagaatctgagagccattgctcaattcttttcaacgaagatgtgaactgttggaaggcaatgtaaaacgggaagcgctgtatgaaagaatatgacgcacatcgtcttttgttttttaagaattgagtatatattcgttgtggggaacagcctgatgatgggccccgggaattaacgctcgagcaacgttggaccattctgacatcgcgtttcctgattagcacaatgtttcgttttatttggaaattgaattgaatgtttctactgttattaattgcagacagtacaccaaacgaccaaatctatctgcaaacaattaaccaagaccaactggagaatttacagatgaatcactgtgttacacctgtaaactgtggctcctttgagaattgagttacaacaagagtttggagatgaacttgtagttcatctatatcatcttaattaaacaataatatttattcaggaatgcagttcagagactgcttaacacacacacacacaaaaaaaaaacctaaacctgaggcttgtactggaacaaggtcattagcaaggtgtcctctagactcccggaccgacactacccttggaagtcaaacgcagctggcacaaacaaacggagcctcggtgacgccggtaaaccgcaccaatcattgttaaaccaaaaaacgtgaacaacaaaccaaaaagaaactaaaaaaccgctaaaaagacgcaaaagagagagaaaaaaaatgaaagaagaaaagaaacgacgcggactcgctgacgacccgcggcccggtccaacccaacccccaccgcctctctcgccgaccccgtccactccgccgaattcccccccaaacccaaacccaacgcgacctcacctcacccgcacgacgacggcacgacgcgacgcgttgcccgagctgacggcttgacgacgcctccgtccccgtccggcaccaacccatcccaacccaacgctccccttttccactgaccaattgatagcccaacctcacctctcctctcctcctcccccctcctctcctcctcgcctccgcaccagcagtttcgtgcaccgcacttcacccacctacctcccccaacctccccatcaaaaactagt

SEQ ID NO: 254 - DNA, 5917 bp, Oryza sativa
gccgccgccgccgggcacctccctgtacgcctcctaccgccaccacgcctaccctcctcacccgccgccgccgcccgcgtacgtcggcgcgtactacgaccacgcggcggagccactgccgccgcgcgacgagctccgcacgctcttcatcgcgggcctccccggcgacgccaaggcccgcgaggtctacaacctcttccgcgacttccccggctatgtctcctcccacctccgcacctccggcaaatcctcgcaggtttccccactcttctctcctcaccccccaacccttcaatctcccctgtgctagggtaattgggtttgcaaacttgtacgtattccttctctcgaacagtatggtgagtagcacaaaccctgactgtttctgcgttgcaggcatatgcgttcgctgtctttgcagatcaaccttctgccttagctgcaatgagtgccacaaacgtaagagctcgcttcagcattatcaggtttctagtagtattaggttatgcttttctgacaaaccattactcctaacgaggttatctacatcagaagttacagctataaataatctgtttagagttctcaatggttgccatttctgtggattgtttcttgctgcagggaaggatatttgaccttgagaataattgcacactgcatgtagatcttgcgaaatctaattcaagatcaaagcgctccagaacaggtgggcgattagcctgcaccttgcaatctttgttcctactgccacatattgtggttattgtgtatcagtattgttgattgcacccttttacttcaacagatgatgttccgtcttattcctctgagaaaaaagctagaaatccgaggggatttcctgattcaggtatcattcaagttgacaggagctagtacctgcaatttttttgaacagttcgttgtatacaccatgttgatctatccactaggacctgttccatcgtagtcacatgagcaatagcagaccattccaaatccacagtttccacatccatcagattgatgaaaatggtttccctctctactaagggatacagttgatcctgagttcctataactttttcctagaattttctgtgttcatatcctaaccatgacttcatatccactcacgttgatgaacattcttgcaaaacactcaccttgcacatctttggcacactttgcgccctatcaggtgctggaagcaatattcacatgtctggaatgggtaattcttcacacagcttgaatggttatccttctgcacaaaggttatggcgcactacttgagcacagtttaattatgtgttttttaggaaaatcagcttaagatgtccagcagctggtgttagaaaagagatatccaatactattgctgatattactcctagaaatattttaattctaatcaagatcattttcaacttgcagttacacgaactttgagcctgctgctttcagcaaggtgagttttgtttgtgcatcttgatatatttgtccttgtctagcatcagtgttggtttatttctatacaaatatgttgtttgataaatgtttgcagtatctgagatggaaaattggaaactacgaacaattgcagcaaagcttaatattattaccatcttatgacatatatcacatttgcaaagctgtttgaatggttttagttaattccatttgtatatggaaaaaagagggctagcacatttataatattattgtaccacaagtcagttctgctttcagagttttactactagtacattatcttcaaggtagaattctattaatcttgtatagtaggtaaatctattaacttagtcacaacaatggtagtttaactagtattataaagtgcgattgagttacaaaagactaaagcgaatgacttcaatggcgtaactggtactgcaaagtatagccacagggattgggggctgccctcatgatccatgaccttgatgaggcatctcaaatcatgggtcactaccagggcacacctgcttccactctccatgagagcacctgatggttggccactggatctttgtgcgtgtgggttgttgcccttggagagactgctgcctattgctggtggttggccattaatttgttgcttgttgccagtcccaccattgccaccattgcagctcatctgcttgacgatgaggagcagcagcagacgcatgagatggttatggagaggggagcatgagaggaggttgaggagatgactaggtgtgtgcagctgtggaggaaggggaggcagtggaggctactttgtgaattgtggacgcatgttgacttgtaagttggagttgcggggctagaagatagtgtgctatgtgagatgttgggttcaagtgggatattgggctgaaccaggtcatctatcttctcatctcctttctctctgatttatgtgtgctttatgtggctgggctgtaatattctgagggatcgccttcccttcttctttcattcttattttacaaacttggtttggttgcatatagcaactaattgtgcaattgaataaatggctcggattcattgggatcattatgaacaaggcattcgatcttgactcatggagtgagccatattatacagctgatcttattggatggaaaactaaatgaagtaacccatggttttactttacataaataaaaagatcagaaaacagcacaattgatttctgttgttgctaaatatcaaatatctatattttggtaggcttattggagagtatgtaatgcttactcccttttgcatgtccatttacctgcaggacccagcagcgtttgcccctcaaaacaatcctccttgccctacactctttgttgctaaccttggtccaacttgctctgagcaagagctaatagatgttttctcaaggtatttccaatataacaattcatgatgtgagataaataaataaacatattttttttacaagtttcttctcatggttagttgcgcgggattcataaaggtgaagatgcaaaacaagtttggagctccagttgcatttgtggatttcaaggtatatcaagtaaactattctgctgcttattattaattgtctaggtctctagctattatgttggtctattgtggagagctatctgccttttgaaatctgtggtaaatcttcagataatggatgcccatttcacttttcgttaaaaaggaaaacatcgggtagaagtcaaaacaaagtaaacaagaaaataaacgctcttgatttcatcagtggtgagataacatgaaactatgatgatacacttacagagacagacagtctgtaaagttgattcttttctgtaggttaaatctagtttatattcttttgtttcatgtgtttcagatatcaaaaaaatgatttcttgataaattttactagttaaccctaatatttgtggtgtgaccacgggaatctgttgcgaacattattaacaaagtcatatctgtattttttttctatgtaagtgttttttgtatccataaattctatagaccagacaaccaactgctgcatacacaggcatcagtaaagatagtcgaattaggggttcttgtttgttgccacatttaacatgcaatggagatatgtgttttgaaagatactattgtttctgtacttgcattttcctatagagtggatccttaagcattttcattaccgatgatttcaatatgtttgaatttattttcaaagttaatcccaaactggagttgctgcctgcaggatatggacagttcaactgaagccataaaccgtctccaaggagttattttgtattcatcaactggcgaggggatgcgtttagagtatcctacatttagggattatttaaatttcctgctattatatctctcttcaaattcttcttgcagggtgtatttggagcttatagcagaagctaaatgcgatctctacttcctgaccatgcctttttaacttattgatatagctccttaacatctatcagatatgccaaatctcggatgggcctgcgtaagcaggataagcgccaatagatatgatagacgaggctgcagttgtttctcatacagcgcaactggcagtggagcatgatgtttcctgactggtcttccaagtgctgtttagtctgatgacacaatgttttgttcagtgaaatgttttgctcatgatgttaggttatggtgcatcggtggtctttcagttccataacattttgtaattgggtttggtaacttaagctgtacctgtgtagttgtcttaccttctggttcttttcaaccctatactttctaggctgttcattagctactgttgaagtcagcatacccatgtaatcatgttcaaacttcaaacaatcaaactagttgtaacttttgaaagatcaaatggttcggtgccaaattaactgtacttggtcattaatgacaacatggtgcctggtccaattgggggttatcattgggaaaccttaatgagtgtaccatgggtggtgactgtccaatatttaaggacatcattatgacattatgtgtttgatacggatggtttggttgtatggatgatgtatgccctcatcaggccgacggccgtagagactcctgcaggcaggtgttgatgcttcttctcactgttgtctgcgtttcaagtacataatgaaagggtatatctacctttctggtacgtttatccaatgctagctcatttgctaatctgatttgccttagactattagactaaccaacgaaatgcagagctcaaatgacacctctgcctttcaggtgcactgtcttctttacgctagtacattatagtatataacagctgtgactgggaagcaaagtagttgctcatattgattgatttgttcggcatataggggatattttgggtgcgtgtaacaatgtgaaacagaaagcgaacctaaaaaggcatgcactggagctgcttctcttatcctttactgtaaacgctgaaacatcatcttggtgcattttggctatttgcaggatgacctaccatccgaatacaaagtgctatatctaacagtgatggttctgctcagctgtactgtatctttctttctcgagatagtgtcataacttgcagttgctcgagaggtgataccctttatcaacaaggaaagctatgggcactgaggtttagaactctttaccagttttaagttgaaagttctgcgagagcatggtcggttgtcaattatttgtgctcgcttgcacacccaccatcaacttgagtaaaattccagaggtcatcaattcattagtggggagggtagaaatataaattcagaatacctctattttgatggatcgtagtactgatccgtcttcaattcatgagggggatgtgccccagctagtacagagcttcaataaagagttgaaatgtacagtaactttctgatgtccagcagcaactgcaacgtgctggtgatgtgcgagtgcgacagtatgagtagtgggaacaatgtggtatactagtacttcaattatggtttgcagtgatcagtctcattgtttgcttcattttagcatgctgttactgctctaactcaactgtttcttgtaaaatttagcactgtagatagggcttgcaacgaaaacttaatttttatagggaaattaaaaaaattgagggaaaacgaacactgaatcactgattcgccctgacagctatgttttgcagcttactggctgtttagcacctgttggaatctgtttgtacttggctgtgaacttgtagacagtaattatatacttttgtaccgtatttagtctgagaaggtccagcattcgtcaaatggaagcatctcagatgtttgccttttgccttccaggtgagctagctcaagctttaatccatcctctgaagccaacc

SEQ ID NO: 255 - DNA, 7488 bp, Oryza sativa
attgcccgttcggttcctcatccttgttgctagcttctcagccatttcttcgatttcaggtaaaaacttcaaggcatggtaattaactctgcatctgagccggttaatctccattggaacattatcatacctgaaattgcaggcttaggttacactcaatcacatcaattgatgtgaacgaaattgtaaggcatatacttaggggaggaaccgggagcaatattcactttacaacaaaagactctgatgtcaaggacagtaacagcgctaaaaagttatacaaccaatctcaagatgtatggatgaggtgcagtcatgatgataagacattaccccagcctatcaacaaatggcttgatagacattatctttttatctttgatcctcggaagtacattgtcaatgtagaactgcgccgatgcatactttggaatatttttcacagttcgcctgttataatcagcatcaaaaataaaataagttacattcatggaagactatgttccagtgttaatcaattatagatatagcacatatagtaactgctaactatgggtgaaaacacagcagatagtgatgaccaaaatagaaacatattataatcattcaacatcatgacaagaggggaaaaaaggaagaataaataaggaaaaaaatgcccataagcagtacctgtcctagtgatacaattttcctttgcccttgcacttttcggttgtataagactgttggcatcctatagtaaaataagctaattttgaccctataatacatgctaacccctacatggtttgaagtagatgcctctatagtggcatcacatatgtggacaatgcaatgtgtgaatgaaagacaactacaaaccgcaaacaagcagcggcaatcaccttgtttgcttgtctccagaattcatatgttctaggagtgtgtgcacacatcaatcttattgattgataaaagaaaagatagaaggaataagtgaaaaggaagcaactaactttatactggtgaaaagttcatctttttctgtgaaccattcaggaatatctcgaacaatgcgtacatcatccttcaagtaatttatgaaataatctacatcaaagatatcttcaaatttcctgcataaaaggacgaaagctctcaagtactaaaggacttgtacctaaaagacatgatagacacaaaagggtgtatgcaagcaggagttgatacagaaaaagaataccataattcatcacttacgtttgatctttccagatttgatcctgcttcagcacaggtaaaataagtgtggcattcattatcttagcaattgcaacagcattacatatctgcaaatacatcgagtatcgcagttaactactgattacacaacacagcttcagcaagctaataatgtgaggaaagaacatccgtacggctattcgctgctggtttaatccaccctcggcatgaataaaaatatacccagaggtttcattctctggtacaagatctgcacagcagaagagagaaaaatatctttattcatcaggatctaaccatggtttcaactttcaaaggaatgttgtaataattcctgtaagctacaaattgacaaacataaacaggcacaagcatacacagtgaaatgctgaagtgttaagcgcctcttataagagcagtcacaggacatcataaatgaaagcttaggtcttgtgggtacgagaggcttagtaaggattaaagtagtcattttttgcatcaacagagagaaatagataggtacattgcatgcaatcacagaacaggaggtacatcgttctgggtgcctaattcgcctgcgctcttataaacaatcttggtggatagttgctaaaatcatcagtttaacattagagaaataagttattcattgttcatttctccttacagacactggaaaatcatttgggccaactaaactacatctagcggtccaactagtacgtatattcagattatctttgagtaagtatttgcagggaggcagggacaaatgacaattagatgctgctcttgcctgagatctcatcactacggcgctcggcgcagggcttccaagatgccgctgcagcatgcggattctcccagagagattcccgctcgttcacctgcagagtagcaccaagccatccaaaacaatattgaaagcgaattgcgtacagatagatatccaagatacataaatacattatgagatcaacgtcactttaccctggggcagtggagccgaatcccgtccttgcggcacagatagggcgcgttctacgttccaacaacgacatgatagtaagcaaagaagttggatgagatcttgatcgaacagcaatagaaatgaagcaatcgaggaggaatcaagagctcacgatgcgtgaccagacggaaggagcggagacgagagcggcgacgaagaggcaggcgacgacggcgaccaggatccggtaggacgccgaggcggtcggcgacctgggatcctcgagcgcgaggagtgaccggagcggggaggggaggtggtacttctggtggtggagtggagcggacgagcggggcgccccgtccttgccgtccccgcctccgccgccgcgcggggaggaggaggaggccacgaagggggaggacgaggcggaggactccgcgtcgcgcttggccggcgagctcgacgcgcgcgtcgccgccgccgccgccgtggcgtgccgtagctccgccatgccgctgtcggcggtgacgggagtgtcgttggattggctccgctgcgcttcttgggccagattttctggttgcggccttacgggccaacatgccttttcgcaattccagtgaaatttggttcggatttcgcagaaacccgattttttttcttttttttttgaaccaggtcgaacctcaagcacaaaccactcgtgtttttttttgtcaactttaaaaaaactgaattttaattttttttaatcaaattcatctggatttcatgggttctgttgtgatgtgttcgctgagtcgttgggtacgcactcactcacaatagacttgtataatcggcattactaaatagcatttgataggaatttagggccaaaatcttgcttggatttggttcccgattttatgctaagactccttctccagctctgacgaccctaatgaactctggtgattagtagtggcccccaatttagggtttagggatgggggtgggggcaaggagagagaggagagttccctaggctaagaggaatgtccatgggaggcggcaaaccattggttggtgacaggacaagtgagcagtgaggccaacaaagccacgaggtcagcagcgaggcagtgggccaatgttggcgtcaatagcaaagcagagtgagtggctacaagccaggggcgtcccaacggcttgaggagaaggggaaaggaggtctagagggagagggagaaggcggaccgagggtgggtagtgacactgtggagcgatgaaggcaggagcatcgagcaagtcgcaatggggtattggggtgggaataagaagggagcagaggagggggttagggtttgagggttactacatgaatctcaaagcgatccaacagtttaaaattcatagagcatttgtagggtgtgttttttttgtcaaatggcaaatatacggtcacttcatcatttataatctttttgatgatctatacaatggtatggatgtgaaaggaacattttgattatatgctgctatggctaattttatattcaagcgagtgttgtatcacatggtttcgtgtgaaactccatattttgaatggctttcacattgtacttactgctaagcattgatcaccggtcgcttaatacacatgaggatcaggttatcacaatttagaaggggctggctaactaaggtcaaaacaggaactacgatttgcgtatttgctacaaggcctacaatgtctgattccagagttttttcctcacgatcaggactctttcatcaccggaccagagagcgtcttttttgggtttcacatcagatgaccagtcgtcccatcttaccgctggcaaaagcttcttgatgtggttgatgacagcaaccttgtctctgataatggcatacccctgaggcctcatgatgcggtccatctcaatcagcagatcctccacactgcacccttgtttctctatctcagaaaaaagaagccaggcgtgaacgagatcataggtgcgtgggtatgttgagaatgactcacaccttcaattaagaaaacagaaaataaagaaattatgccacaattgaggtagcaaatagtagttggtaccatcaaatactgcaatacaacaacaataagaaattgttttctgtgatcatggcaaagtcaatcaggcatatggaaggcattttagtagaaataggaagtaacaatagaaagtagacactgaaattaagcaatgctggagcactgggcccagatagaagataggccaaggttttaagttttatgcaatactagtaaatagagcatcttggtcacataagttaatgacaagagcaccacatgtcatttggagggatttctcatggcgagaacttcaggtgcaatcatgatgacttgataacatctctagcgacatgttttaatgtggtaactgaactataactactattaaaaccgtgtgataaatagctaccacccttcaattgttgcattactatggaaatccacaaaatcgtatgcaaattatgtctagataaaatgtaatcccctacatgaatggaagatacataatggcgctttgttaacaaagatatggtatttctaaggctggctgctaaagaacagcttgacaataggtttcatttgtcaacaataatcaaattactggtctctttcttcaatactcaacatacttcaatactttttgatattttgattgcattccaggcattaaaactattggatttgtctgccacagacaatgaaaacgtaataattttagctatgcaaagtcaacactgaaacaactggactgaactaaatctaaaggatttaggacaaaaggtttgcaaacatatcataccaattatggatggtccccaataaaccacgatcatagatgatcttcagttttccagattctgtggaaggaactacattcatcacccagacatcctttttcctcagggatgctgcaaatccaccaagatttgcattcatatccataacatttctaaatgaatccttttgtatctcagatttcatgagtttccagtactgaataactctaaaatgccaaatctcctgcaaggagtacttcaaagtcaggtactaaagaagctatcagaaaggatgtgagcacatattgcatgaaaaaatatcattggtttgttgcatagctcacactgtcatcagaaaaattgtttgaactgattccgagctcttcaagacgagggggtggtgctgtaagcctttgcggccagggaagcagattactgcccttaaccttgtggactcctggagaagtgcacacgacaagatcagaacaaggctaaattggctagaaaaacatatgtttgatagcagataaatcaaggatatgacaacgactggagttgacaattccttttaacagaaaataggtaactaacaattgcttgattaaatttccagcaccaagataacacacatatttgaaccaaacaaaattacaacagtagttctcaagctagacagcagaattctatacttcagtaaatgcaataacagacaattggttactggaaaagtactgagtgattctaggtaaagataacgaggtaaagcatttaatacatactataccaagctatactaaaaattacaaataacgagtttgaggtattctcgagagatgtccccaattaagcatgcacaattcagcttatcatctgctcttcaatcaccagtatatagccaactatgatctggtaccgccgctatgaccaggaacatgaaagagaagtgtaatctgttgaggccataaatggctggataagcaaagcctacagcgtatagcgattagcaagcatgatccaggtttaagcctattggttggcaactgggcagcccgcagcccaagtattaaaggttcggcagtggattattctcttgatataaatggttgaccgtggtacccttctaaattatcactaatgatttgaatctccaacattaagtgtgtcatgtgatgagcaaacttttgtggaaagccgatgatatagcattcaagcaaaattccataagaaagtaaggggtagtatagtagtacactatacttttcactattcattcaatcttgaggtaaatcagggaaataaacttactttccgagtaaggagttacacatgctttcatgggcacattccaagcagcatccggatcatcatcacggtcacacatatttggaagtgttcctggctctctcttcatatagcactcattagtcaatggtttgatccatatcactgtctgatcctccttagatgcaatctgccaacacattcttcgagcaagatcactcatctttctccatatgttccggttgatgggatccatagcataagcttctggcgatgaatatacgaaatacccgccaggcctcaaaaccctatcgacttccagcaacaagatcccatccctctgcagccagtcaatccgacaacgagagcagtgcgcaagctcaaatgagtggctggggtatggcagcctccttgtgcccagcacaccgagggttgacggaattcctctctcaagggcaaactgaatttggttctcgtgcacatcgttaggagcaagagacattgcaattatatcaagaggaagaaggtaggctccgaagcttgcaaccccacaaccaacatccagcacattcctgatgttccctccattgtttagcttaccattcggaaaattcagcatctgcaccacacatccacaccaaacaacaatgatgtcatcggattcaaaggtaacaaaacatggtaattagctgttagatcatcctgaacctgagcaaggtgcacaatgtacttgtcagcaccagtgtggaagtgggtacccccaccggggaagttgatcttgtcaccattcaccaccatccaccgctgatcggacttctcagaggcaaggtgggtgtgtggtatgttagccttccacacctcgtcccggctcctcggccacctgatgggcacctgaacattgaaacatcacaccaacatttaccaaataaacaacaaacaatgcacagcacaacaagtgatggattcatcgatcatatcatgtatggtctccatggtcggatcggatgtatgttgtctcacccggtagccggcgggtggcgggatgaggcagttgaggcggcggtgcgcgggtgggcagtggcgctcgtagtgctgcatgagggagaggttgagcctgaggcggagctggttgtggaggccacggtccaggc

SEQ ID NO: 256 - DNA, 2180 bp, Oryza sativa
gccatagggatgggctcggcgctctgcgatgggcggtgggcacggcgccgcagaggcgtgtatctggcaccggccccacgacggccggcggcatcgggcggcgagcatgggcctgtcgggcaccagccacgcgacggccagcggtgggcggcgtgaagctagaactgcaggcggcgggcgggaggctagcgtttcgggattatttttatttttatttttttcactgaaaaatatcttcgcatgtggttggctatataaaccgtatggaaaaattccttttttgcatacggttgcgttgcccgcatggagaaatagcgatttttgcagacctttccgtgcatgtgggccggctaaccgcatgcaaagatcgattttgcctgcacgcaaagatttctttagtagtagtgtgcttgggtagccgcagcgagaacgacctccgctcctcgagcgagtcctggagcgtgtcggcgtggtgcgcggcgcggtgaccgttgaaggggtcggccaccgagtggtttggggagagcgacacggacggcgtcgccgcgggcgctcctgcgtcatgcccgccaccgccggagtcagcaatggagcgcggtggcgacagtgtgaggcagagaggcaacggcgaggagaggaggaggatcgaagcggtggagagagagagagagcagctgcgtcgggagcatgttctgcaggatggtgaggaaggcccagcagcgaccatatctacgatccattgccgtgaattggagctctaagctctgagctgtgaactcagctagcttcttgctgatctactgcctgagctgctaagctggacagcagcgggactgatgccatcgccatcgccccgatgccgagctgcttgctgctgctttggctggccatcgggagaggaagggagggagaggagaagaagaagaaaatatatacgggagtggaaagggatagaaaacgtgatggcgatggtattgtttaaatttgataaaatactaatggtatcaaactaatatcatgaatagtacctagtaaaaaacggatcggaccggcgattcaaccgaatagtcaatagtagtggtattatttcaatgttttttttatattttagacatttttaataaataattttaataaaaaaagcttgcagtaacttattaacttatttccaaaaatgaaccagccacaccattgtaatcggtgtggccaatctgaacagccatgccattggtcacgcgtggcatgtcaaagggtgcctcatggcagacgttgtcgttgacaagatcaatctggcgctgacgtggcacttctgccacgcctagctccttggcgtggcaggtgtagtctgccacgcccgacttgttggcgttgcagtgcatctagcccaattattttatatttttgaagaaaataattatgataagaaatttcatgtgttaggaatatttttattaatttcatgaccattgtggtttatgatgaacatgctaggtttgtatttagaaaattgatactaaacgggtaaagatcggataaagtttttccggtatttgtgaggtattactagaaaacttcttggggttttgattaagcaagagatttgatctacctagcattcgccaaattaacttcaagacgataatcatcatggcaacaagtttagaactaggcaacacttcaatatattttgtgaacaaaatattcatgaaatattggttgccacacttgatgaagatattctccccaaattcaaaggtatttatattagcaagcatacgacaactgcatacgtcgaaggacgtggttactcaacagttgttgggaacaataaagtgtattaattcaaggatttttcttaggatcctccctttacatggccctaggggtctagttatagtcctattacagatccccctattagggtttagattttacaggggaatttacatggttgcccttatgaaagggacacttgtatgggtatacagtgtaattgagatacatgggcctctaacgggccaattagcgaacgctggcccactggccaatgggctagagcggctgggatggccccttgggcctccttggagctggggttgaaacggcgaagtcatcctccttcggcatgcacccttcgccatttagtcttcgcccaggacgcatttgggggctgcaggaat

SEQ ID NO: 257 - DNA, 500 bp, Oryza sativa
ggctaaagcagcatttgacacaagcatagataatgggatgaccttatttgatacagcagaagtttatggtacagcggtaagaaactagaaaaacttcatgattcctcgctcatattttccttgcgtcaaaattgtgaaggttcatttaaccttagttgttctgtccttcagctgatgggagcagtaaattctgaaagtttactcggagggtatgccacgttttgctgttcagcactccattttttttattattttttattttcgcgaaagtcacatgtgcagcaatagtcacctgttgttgtctctcttgccgccagtttcatcaaggaaaggcaggagaaagaacagattgatgttgccgtcccaacaaagtttgctgcgcttccatggagatttggccgagaaagtgttctttccgcactgaaaaaatcgcttgaccgtcttgggttatcttcagttgagctctaccagcttcattggtgggattgtctgctctttct

SEQ ID NO: 258 - DNA, 583 bp, Oryza sativa
cagaggaaaagtcagatatgcttattataatccaagattgtgcagtaagtttcttggtatcaataattatatgagtgttctgtattttcacctaatcttgtttagttaccttttcagctgtcccttatccatgtttctgcattttgtgccttgttgcaggttaaagtatagcttgctctgtactttacagccactgacccgctgtggtaacaagacgtcgtctcaagagaaaatctattaatcgtagaactgctagctggattgtgttctctctgtgggaaaaaaaaacatgaggacaattcacttatttcaaagctatcacgtatgcataagtttaaagagcagatttgttcatcctggtttgtctctgctagtgattaccctcttctatctgaacgggcaatttatggagaagttagtacgcttcaccttttgcgtttctattgctgttttttttaaagttaattcctatcttttatgtttgatccagttagcttctaatggatcctgatgttccaatgatatttcacgtgtctactcattatgggctacatgcattggtctttacatagccagttgtgga

SEQ ID NO: 259 - DNA, 602 bp, Oryza sativa
  unsure (1)..(602): unsure at all n locations
cggaaggaaatgcaggtttcccccggagcagtactccatgacgaggcagtagaacctgtcggtttcaaagtgggtgtagagcgtgggaagcaaggggtggtcaagaaggcccaggatctcgcgctccgtctccgcgcgcgccatcttgttccggctcgcgatagacgccttgtccatcaccttcatggcgaagaaggccgacgtgccgcggagctccaccaggtacacgctcccgatgtcgccgtaccccagccgcttcagcagccggaagtgcgccaggctcagcggcgccggcgcgtcgcgcgcagtcgccgcctggaccgcctcccaccggctgtccccgccggtgtgccgcttcacgttctgccccgacgccgacaccgacgccgtcgacgcnnnnnnnnnnnnnnnnnnnnnnnncgccgcggcgccggtgctgctgctctccaggctgttgctccgtgtgctgccgctgctgatgctgtccaggctgccgttgctgacggcctcgccacggtttgttcctgctgttgctgctgctgcggtcgtcgtcaccagcgccgccgtcgtctcgggcctctgcggcggcgggttcgccgtct

SEQ ID NO: 260 - DNA, 520 bp, Oryza sativa
agtccgatagcttgatggcctccttgacagatgcagacatacccctgaagaagttcctgacactggggtctataggaatcttcttttctggacttcgaggcttgaattgtctcttgacttctgatgcaacgtaagcgtcaagctcctcttgcgtgcaatcgtaccccgggtccttgttcttggcggcgtcaactttcgccttcttcgttgcccttgtgtgggcaggcggtggagctgggggggcccttgagtttgaaggtgccggaagaggagcttgcgggggagtaggtgtaggagcacgaggaggagtcggtgcaggatcctgaggaggagtcgatgctggagcttgaggtggagacggtgctggcggagcatgaggaggagacggtgcaggatcctgaggaggagatggcggagccagaggagatggtgcacgagacgccgcttatcgcccagggaggatgatgtaccgcctgcgccataaaataatggcatggcatgtgtctcgtagatgcgtctc

SEQ ID NO: 261 - DNA, 1554 bp, Oryza sativa
aaaggacaccaatgtgtgaatggggagattgttgaatagtcgcacattggttgtggaagaaaaaaggatctaagatataagtgggggagcccctcatctcattggctagctttttgggtgggaaagactctttacgatctaaaaaaccaatcaagctcattacagcttgaaatgcgttacttgttctgttgttcccacacaggctaaatagccagctaaatataacactttcggtaatgtcacgcccggaaattctatagtaatttccgaacttatttgtgcattaaatcctcgtccaggaatcagccgaggtacacaaactgacaatttaatatacagattcatcaaattaactaaaacgataaatacttacttatgaggcacttagtcctcaccatgaagaaaactacagcggaaaaaataaaatctagcgaagctccggctccactcccacaggcagctcaactggggtataagccaaacgtcttctccttctggatcctttttcttcaactgaggttgattgattattgcaaggtgagcatataacatactcagcaagccacacagcaaatatgcaagtgcacaaggataccaaaggatggcataatataggctcatttgcaaaagcagcatttagcaaaacatttaagagaagtaaaacagtggagtaattaatcagaaattttaatcaacactgaacagcacacccatgctgcacaggcccaaccattctgaacaaccatacccggctgaacagatctaactccaaaccaggagctaagcaaattattaccaggtataacatccatagttatgggagaggtgtgggactaatcacgaaaaacattgctcaactcgcccataaccgcgggcacggctattcgaatagttttactctggccagaggtgtaccactgtacccacaagacacagcctcaacatcatgtctaccatgcgtcgcgatactggaaagtacccgaatagaggctgtgacaataccctttgcacaacacaactcaccacagtgcaccattcctggatcataatcacccccttataaaacaaggcatggactccccagcgacccccgtgggcttatctccgccacttctcagtctggtgctccgcaatgaatcatgctatacaaaaggtaaagccgttgcccacgctggcttgtggttggcacggttaatatttcacaacagtagctcgcgaaccggtccttaattgtcatgagcacgactctcaaaaccatgtgctcacaacccaccatcatcaagttttagttggcaaataattaattaaccaatcacgattgaccatcgtgaactatcattaagccatcattaaataataatgagtcataaattatcccaatagtgtgctaatgtttctaagcatggctaagcaattatatctaatatctagttgaaccaatatatatataaagctcaactagtccaattataataacccaaggtaacaaggaataaagtaatcaagaacaaaagggccataacaaagaataggttaattccacccaatgacatt

SEQ ID NO: 262 - DNA, 1294 bp, Oryza sativa
aagtattttatcggagtacttaacccgtaaaggtagtattgaatcgatctactctcttggctatagaaaaaaaaaagggctcattttacatcctaacaacattttattcttttaaatttatgcttctctacaagtcatatttcactttgacacatcaagagacgaaggtaaatgataattaaacgaattcacttagttccacgctttgcacgtagaagcctataaggtgtcaatacaaaatcaatagcatatcttataacaatatgattagaagtttcctactaaattacgttgtaagactaatattgactaggtagttttcttaaaaatattgtagggtcctacgtataagaagcgctatctaatatatgtatatttagggaaaaaaatacatttatgagcaatacgagtttctcaagattttttttttaaaaaaacaatgaacaatcaattaaaaagggaaatacctaacattaatttaaacttattttggtagacctgtttttaaacaaaataacaagcatgcccgcgcattcacgcgggctacctttccagtttgctttctagtttgtagtaagtacttcttcccttgatgaaatttggtctgctttcttaaccggctggcgaaaaaaataatctatcaccataggccaagcaagtattgccatccagcctgccaaccgtattgagcaccctgtccacacatcatccgctgtcaccaaaacgcccctgctgaattgaattgctgatgatatcatcgggtgtgtccaacggctccagcacatgaactgcaccatcgctcatgccgactgcaaactggttaggcttccagggatgcgcagcgacaaccatgggatacacaatttcaccaccgctggagttgataagatgaaacaagagggcagcattaacaggtcaccagcattaaaattaccagactcgaaacaaaaacagaattaaactgttggagttggacactgcatatacctagaaactgaagatggtatataggcagaaggtgcaatcctgcactgtaacatgagagattccacttgaaatattccaattgcaccatcacagaatccagcgtagatcaataagccatccgatgagtatactgcactcgaaactggagcagagagtggatcacttgggaaccactgcacattgtcaatcaatgaaaggttaaatatcagtgatgattacaatatattgtgaaggttaggagcatcataaatatttatctcactgctagcatgatgtaacatgtttactcaagaccgaatcaagactg

SEQ ID NO: 263 - DNA, 704 bp, Oryza sativa
aagaccagtgaaccattagctgggttgagcgttccaccgtgagcatagtaccagaacttcgatcgttccggccaattggctgttgccggttcgatacccctctcaatcaagctagcctccatctgctcccacttcggcatcgcgacgctatagcctcctgaccccaagtggtgatggtacttcttcttggcggcattttctttgtttctttccatcatcgcctgcccttgttcacctgtcttatatgcaacgaactcgtcccagtgatcccttagctttgggaatgtgtcgaagttcggtgtcttccccttcagtatatacttctggtacagatctcccttgaagctctgaaactgttctgccattttcttcagagtccaccttttcactttgtcctctgtacccgcaggaagggtgaatgtctcgagcattgtggtccacaacatctctttctccgaatctgggacaaagctctcatgatctccgcgtgcccttgttcttcgccagtacaccgtactgacaggcacgttatcccgcacaacccaaccgctgtgacgtacatagttcttggcggcttcggccggggcactaggacgtccatcttcttccacttccgttatgatgtgccgaccctcaagcttcttcgctgcacctcgttgcccgcgaatacggatctctttcacaaggtgacgggctgcaggaat

SEQ ID NO: 264 - DNA, 3484 bp, Oryza sativa
attccctgttttcaggattggatccgtcaagtgtttattgatctgatgatcgagttgtggttatgttcttggggcttcctaccattcttatacaggttcaaagacaaggttaaaaggagaaaaaccctgctggacacggcacgagtttccttttctatttacataatcgtatccaattaggactattagctatgccttaggtaacaagacaatataatttctaagtcctaatctattacataatatgtgaacctggcccaccagtcggataaagcgatcgtgtgggtaacaatatgtgattgtacccggtacatagctcgtttaaaattcaggctagtggccttgtaattaacttcagtgcaaaatagattagtagtccatcgactggttgtctggttgccactacatattagctgcctacatggcagccactacatattagctgcctaacggccatgtacaaatctcactccaccgttaacgcgcaaaaccgaaattgtacaacagagttctgtaacataagagaaaaactatcgtcgaatatgggtataaagttagtttgccggtttgaaattgtaacagtgtagtataaagttagagtcaaactatcctaaggctgagtttggcactttagtttcccaactcactctctttctttttcacgcgcacgcttttcaaattactaaacggtccgtattttaaaatttttctatacgaaagttactttaaaaatcatattgatccattttttttaaaaaaaaattagctaatacttaattaatcatgtgttaatggtgaaccgccccgttttgcatgcaggaggggatttgttcccaaccacagctgccgaacgcagcctaagttctctctatgtacatagagagacatactagttatataactacaagacgatagtaatataggtgtgggtttgactagttagtggcctagtcgatcgagggttatgaatgcctagatacactgtaatatgctagattaaagagaagtggatgtaatcatgtctctttaaaaaatatcgagccccgatatcgtcaccagtttagatcttttcgcgatgttattctgtgttgagtttccaaagtaatatcatggctggtttaacgagaccactttggactcaagtgtcgctccccgcatgggcaaccaggtggcgaaaaacctagccgccgctcacccccgactcaggcggcgggaagaacactccggcagcgctctcgacggtgcgggcatatagcggcgagttgccagggcagcggacaatgccgacgcgacgagctggccatggaggagtggcaatgacggttgcgcatcatgggaggccgcggtagcgcggatccggccagcgcggctgagctgagacgtcgaaccagcaaaacttacaactgaaccaccaaatccggcatggtggcggggggggccttttaaaaggcggcaaatgcgggaaaaggaacgcccggtgcaaggagaacaacgggtccggcccaaggagacaaccgtgtggagcgagggcccaaaccatggttaaatttggcgcctggcaactccgtggttggctctggctggcaccgagcatctaacatggtggggcaagggcatagtggccaaggtggggcggtcggcatcggtggtaggtcgcgcacggaaggaggttggcgggaggctgacctagcgcgggttggcatggtaggagcgtaggaagtaggcatgatgatggcggtgggagcggcgtggtgcgagtaagaggagccgtggctggctggtgtggcacaagcggggtctgctgcggtcggcgctccggttggagtctcggtggaggcatgggcattaggacgaggcgacggtgatgcgggcaagcggcctaaggcatgcgagtagtttgactgaggcagcgatgacggtcgtgccgtgaggtgggtgagtaggcctgcgatgggcttctatccagacgctagtcctcctgtggtggcaccttgccgccacaaggtggccacatttggtccattattctctctcaccctctccctttctaacccatccgcgtggatgggtttggagtgcgccaaaggttgaggtcctacttgatggctagccagcggcaaggcgctagcgcggtggctacgtgttgaaggtgcacagttgatagtggttatgtttccagcaggcaacaacacgggcgaacaaagagattacaggcgaagcccagcccctccagggcagcaatggtgatgcttgagagcgccgttttcccttggggcattgttgagtgatcttctctgctcaccctgatggatttcttcaagtgaaaaccacgttgagggttcaaggtcggcgacgatgacacttttagtgtcgtatccttcctaaaggtgtcgtttagaatattcatttccttagggatgttgtgttcctgcttcttttttccttagggatgtagcgggatctggttatagacacacggtgtggttgttattttttctttttcctactatatcgccttctagggttgcagacttgtaatttattttcctgctctatcaatacgaaacatcgcattgtcatgtgcggattgtttaaacaaaagtactcccttcgtcctaaaatataagcattttcaatacagtaataagtcaaatatttttagctttgaccattactaaaaaaataaaaaagataatcatataaaattgatgttaatagatttatcattaaataaattattaaaatatgctatactttttatttaaaaaatcttacttttatatatattgttacttaaaatagtatctcaaaaatcatgttagaattaaaaatatttataatctaggacgaaggaagtagactccagtcacaaacatcacagagtcagccagtcaagtgaggtggtccacccttgcagatgctgtcgtcctcactagtcagtaccccctccgtcccaaaaaaagtccaatcctagctacgaacctggacacacatgtgtccaggttcatagccagagtttggctttttttgggacagactagtactcagtagtcagtagtcactagtcactactcactcactcccctgctgctttgcgttagccatccggagtgacttccattccggtctcacagaagtcaaccaaccccttccaggggctggatctggccggcgagcggcagggacagcagagctgcgcgtccctcctgcttcaggccaagaggaggcggcggatctggggcgggcgggccttccttgctgtctacgacaggcttgttcccgacccccagtttgcaagcatggagctggcgacgggggcgatgaggagcctgctgcccaagctgcttcagctgctcgagaaagagtacggcctgcaaacgggcgtgagggagaagatcaagtctctcacgggagctcgatgtcgtgcacgccgtcctccgcaagatcggcgatgtgccatcggagcaggtgggctgcaggaatt

SEQ ID NO: 265 - DNA, 2517 bp, Oryza sativa
cgtcgacacattcttggtgcacgacgatggccctgaccccaccgatccacacatgctcctgcgcctgcggaagaagttaggcaagctgttcaagaagagcaaggctcgccgtaagatctctaacctgatccaagacattaacaagaagttcgagcaggtgaaagcaaggcatgtcaagtacacagtcgacagcgttgtcctcaagtctctagcggcaacgaccatcgatcctcgtctccagaatctgtacaaaagggcaacagagcttgttggcattgacgggccaagggacgatctcataaacaagctatccctggggggtgatgttgatgtgtccgacaagaagatgaaagtcatctctgtcgttggatttggaggactcggcaagaccactcttgccaaagctgtctatgaccacttcaaaccgcatttcaagtgcagggcttctgttccagtcgaccagaatcctgacatgaataaagcattcgatgaccaggttgaaccgcatttcgaatgcggagcttttgttccagtgggtcggaatcctgacatgaagaaagtctttagagacattctcattgatcttgacaaggaaaagtacacgaatccgaatatgatggtgttggatgaaaagcagctcatggacgaactcaaggaattcgtcaaggagaagaggtatgagtgtaatcaccaatccaatgactcactgcttacgttgtgactttgaattccagtatctgtacaattccttccttatatctatttactttattaaataaaggatgaaaggagcacattttacatctcaagtctagaaaatagtacaacgctaatcgatgcagattgatttaatacagtcatgcataaaaatgtaaatgtgttttcagcaagcaaaaacagttgtataatattcagatatattttctcatacaaatgagtattattaatttattatctagccacgcaatcgcaagaaaatcatgctagtcatattattcaaacaaatttaaacatatcaagctcatttgctcccaagagttgcaaaaaacaaccacattaatgagaaaagagagacattcatcatgtcgattttggtaggcccaagctatataataaattaatgatgtaggttaactggttatttgttagagctactgcaaattatatttatataacaacatgcagttgtattttagcactaagcacaagacatacatcacatacaaacattggagatgtaagtacatgtcagttatcctgcaaaaatataagtgcatgattcaattcatgatgtacaaccagctaatatagccaagcccaattcaaaccgactccaatactaactgaattgtagtctgaacaaacttcaaagaacttagccaaatcagattcaaactctaaactcaattttaactgaatttgattctgacccctaactctgactgaaccaagattaactttgaactgcactggttttcctcctgctctgatacttctatccaatcatgacataggtgtttcattgttattgatgatatatgggacaaggagtcatggaaattaatcagatgtgctctgcaagaaagtgattgtggaagtagacttgtcataactactcgtatttctgaagttgccacacatgctggtgaagcttacaaaattcagccactttctcgtgataactctgaaaaattattgtatgcaagaatagttgatggtgaatggaagtatttcgataatccatcagctaaggcatgtgaaaaaattttgaagaaatgtggtggtgtaccattagctatcattacaatagctagtttgttggccagtaaaccaggggaggactggtctgaggtctacaactctgtcggttttgggcatgaagacaatgatgatgtaggtaatactagaaggatattgtcttttagctactatgatctgtcttcacatttaaaagattgcttattgtatctatgtgtatttcccgaagatcatgtgatagagaaaaatagtttgatatggaagtggatagctgaaggtttcatccatgaggaactagcagcagggttaggattatttgagctcggggagaggtgcttcaatgagttgataaatagaagcatgatccagccagtggagacaaaacatgaagggtatgtagatggttgctgcgttcatgatatggttcttgatatgatccactcattatcgagtgaagaaaattttgtcactgtattgaatggtgatgagcgacagaaacttccggggagcattgctcgcaggttagccctgcagcgtgttctagtgcacaaggatggtcagctagctaatatcactctgaagaatgtgagatcccttattgccagtcagtgcttcggttcattatgcctacacactccggttttacgtgtattagatgtgataaactgtgcagaaagtgagacgcctaatgttttggaagatagggacaaaactatgccaagccatcttgggagtttacttcacctgaggggctgcagg

SEQ ID NO: 266 - DNA, 547 bp, Oryza sativa
attcctgcagcccatccgcgccgccgacgtgcgcgagctggccgcgctgatgaagcaatggcccggccgcgaatacaacatcgaaggcaacccgacgcagaacctgatggcgttcatccgcgaagtgcgtccgcagcaagccaccttcgtgcccgacagcgaagaccagttcaccagcgaccacggctgggacttggccgacgcagcggtgcgcgagcgccttcgcccgctgatcgaagaatgccgcgccctggcggtgcgcgtcagcctgttcatggacccggcgcccgagctgatggtctgggccaacgaggtgggcgccgaccgcgtggagctttacaccgagccgtacgccgccgcgtgggccgatccagctgcgcgccagccgccattgatcgcctacgccgttgccgcgcaggctgcgctcagcgtcggactaggcgtcaacgccggccacgacctgaatcgcgacaacctcaccgaattcctgcgcgccgtacccggcgtggccgaagtctccatcggtcatgcgctgatcgccgacgcg

SEQ ID NO: 267 - DNA, 4212 bp, Oryza sativa
acaaaggaacacgagcatccatgctcaacaaggctggagcagctgggaactcgacctcgacatcagtatcccactcgaacttgctatcaatgtcactaccataagatagtggcaacagtagcaagttccagtgggatacggatgtcgaggtcgagatcccatattctccggccttgaggaacatggatgttacatatctgctgacgaggaggacacagatagaacacacaggcaaccaaaacccttcctatccttagattgcatccaagatccctaacgttatcgtcagcaaactcctagattgcgtccaagatcatttcgttagggaaccctttcccatagatacaacaaccagctttggatactgaatttatgggaatggggttccctaaagaaatgaccttgaaagcaatctaggatattggtaatgataacagatttctagacatgtcttatttgaacgaaatgttctgtttaccaatttgtcttggtcggtaccgtgcaggcagtaacccgaccaaactagatttggcaaccggaacacttcgtattctcctaaatgccataatttcactaacttcatttaataacaggcctatgcatatccatcccatttccctcaaaatcacccaaaacagcccatagtacacaagtcatgacatgtaataagtttggcctcagttttgctcattttctttcctaaaaaaaacaacaagtgtagatggtctgttcttgttgaaaaaacccaaaaagaacaagtgtagatggtatgttgttatgcgttaaaaccccacatttaaacctaaacaagaaccagagtgaggctggcccaaaaatgcatccatttttgcaaaacatcccttactgccactcctcccaaaaaaatgaacaagagtagatggtctgttcttattgacaaaacccaaaactcacaagtgtatagggtctgttcttatgcattaaaaacccacatttaaacctaaacaagaacaagagtgaggccagcccaaaaatgcatcaatttttgtaaaacatccaatactaccactcctcccaaaaaaaatgaacaagtgtagatggtctgttcttattgacaaaacccaaaaatcacaagtgtatacggtctgttcttatgcattaaaaacccacatttaaacataaacaagaacaagagtgaggccggcccaaaaatgcatccattttgcaaaacatcccatactaccactcccccccctaaaaaaatgaacaagtgtctgttcttattgaaaaaacccaaaaatcaggagtgtatagggtctgttcttgagcaatcatcattggccattcatcacaaatacatccatcacagcccccacagcatcccaacatggcatttcccccaaaaatcacaaattaattccatcacagcccactgcatcccaacatggcattttccccaaaaatcacaaattaattccatcacagcccactgcatcccaacatggcatcacagcccactacatcacaatatctacacacatggcatttcaaaggagaagagggaagacatgcattccagggagaagaagaggcaacgtcggtgttgacgacgacggctgggctcggggtcgacgtggcctctggatcttgtaggtggcggtgtgcagacttggtgtagaggaagccggcggacttggagaggacttggcatcgatcttgaggacttggcggagaggaagccggcggcggcggacttggagcggaggccggtggcggcggtcttgggcatggaggacgcggacttggagaggaggccggcggcagtggtcttgggcatggaggaggcgctagcggtcagggaggccggatccacaagggctcatggacgacgaggaaggaggaggccacggtcagtgaatcgagagggcgacggcggtgtccaagaagaagaggccgccgccggccgtccaggagaaaaaggcggtggcggcggtggatctgagagagtgagaaagtgagagagagtaagaggcacccgcggccgaagagagtaaggacctgtggatgaggattgactaagtaaaccctagtcaatcctcatttctatcgggcaaagtactatacctgatgcggatgacactcatccgtaacgggcgctatttgtaagcccgatacggatgacactcatctgtgatgggcattagtactaagcccgattgagatgattacatctctatcgggcatggtactaaagcccgtcacagataacttattaaaatagttttaaaatgatgttaaaattataaaattaatatttaagtaatacaataatttataatcacgtataattaaaaatgtcttatttacatagtttaaaattcctattaattttttaaaattcatataattaacaaatgccttcctcacatataatttaaaattcatataattaacaaataccttcctcgcatatagtttaaaattcctattatttttaacaaatgtcttatttacatagtttaaaattcctattaatttttaaaaatcatataattgacaattagttttctcacatctagtttaaaattcctaacaattttttaaaaccacataattaacaaatccatttcttcaaagagttttaaatcgtaattaactggaatggcatgaaacatatgcaattcattcattaaggctccaatacaaattaaatacatcattactgataccaatttggaaattgcattactacaaagacttcatttatagtgatatgcattccgaatggtctgaacgaacgtacgccacttcatcttcgagatcatcgtcaaggtcgatctaaggtctcacatgaagattcttgttgtattcttcttcatcgacgacgttgtccacccccacaattcttcacttgccatccctaatgacgtgcatcttcttgtttgcggggtcttttatgtagaaaatctgttcgacctgcttcgctagtacgaatggttcgtctgcgtatccaaccttagccaggtccactaaggtgaatccttcacccaactgcaatgaaacaacgggactttgaagttcaggtagttcagctcccatatctgctctatgcgaccgtagtatgtgcttgatctagcctgatcctgatatgcatctatacggactccactgttttgcactgtgcttttctcatcttgtgtgacggtgtaaaatgtgtatccattgatatcgtacccctgccatgtgtcaacatcccaagatggaccccttgccaacctttgtaatatctcacttgcgccatcggtcgaccatgctacacgatccttgaaccattcattgaagcaagaaccatgttctctgttgatccaaatatctgatcgaccaatattgtcccgtcggaccttcgctaaatgctcatcaaagtatggggttacttcaaccatatgttgcagcactgcgaaacgagcctgcacgtacgaagcttgattggaaacaattctttttctgccagttgtgccgacacctgcaaccttccttcgtggcgagacgcaggaactccgataggatcaatctcggccatgtaatcgatacagaactcaatggcctcctcggtcgtgtaaccttcaatgatgctcccctctggttttgctctgttccgaacatacgacttcagaattcccatgtacctctcgaacggccacatttttctcataaaagctggcccatatatttttgtttgcttcactgggtgaacagtgagatgaaccatgatattgaacaaagctagtggaaaatacatctccaagtgacatagggtactgacaatatcggcttgcaacccatctaagtcttctggatctataatcttctgaccgattacattgaagaaggcacaaagccgttggatcgtgtgacggacttgtggtggtagaatgcctctgatagcaactggcaatatctttgtgattagcatgtggtaatcgtgagacttcattccaaccagttttagatcctccaatttaacgtacgtacttattctcacacaatagcctgaaggaactttaatatatgccagacatgatagcattgctatcttctcatcattcgacaatgtgtggcaagctggtgggaggtacactcttcctgtcttctcatccgtaacaggctgaagttcactacgaatgttcatctcctgtagatcaagacgcgcattcaacccgtcctttgtcttgc

SEQ ID NO: 268 - DNA, 2533 bp, Oryza sativa
aagagcatttcagtgattaatttaattggaaaagtatttaaaatcacctttaccttttcgggccgaattaggaaaagtcctctcactctcggcccagtctcctctcagcctgcagcccttttcctctctttcccgaagtctgcttttgtccctcctttaatcagtctttggaagtagaagcccagcagaaagtctactttccctccctggcactgttcatcttccagctctggacagagccgagccgcccgtgctgtgccctgtgccgccgcctcttccttccaaatctcgcctccccgttgctcctttttccaatttagttgaggggaaatattcctcttatcctcctctatctttaccccccaaaaatcggagcaaatcgttgagtatcttatccgaatcaaactcgttttcgagtttatctccaaaaccgagtttttgatttcccggatcgatttcttgcgggaggagtccgatctcttcaatccaaggctataaataggaccccctagtcctcctctttcgtttgccccctctcccgtggtctcccgtgcctcgtagcgccgccgccacgtgctccaccccgtcgccgccgccggccatctccggtgccgccgcgccgccgtctccatcgtcgtcgccggtcgccgtcaccaccgttgggtgcgccgtggtgaggggaagctcggccacccttccttttccgtcgccggtcatcggagctccgccgccccgtgaacccgagccgtgccgccgctagacctcgtcgccggccgtcgtcgttcgtcgtttggcacgagggtgagtatcgttgggttcgtctcgtcgtcctctacgtgttcatgtcctccaaatccgcagccggtcgctctatctccggcgaggtcgccatcttggtccggccattgatgatgtcatcatgacgtcatcatcttctccttttccagttttttctaatagattaaatcttcggaaattcataactaaatcatcgtaactcggttttgagtggttcaagttgctaaattcatctaaaatcatgatctacatgtttgtttactttatatgtactgtttatttggtttttattagtctttttcttcgttttgcgtgttagcttgtcgtttccgtcgttgcgaaggttcgtgaagtgcgtcggaagtgatcaagaagattacttgaagaccgattattgcaaggcaagtcacacagatcctaaaccaatcctttgagcatgttgatcctatatttaaattctctatttatttcaactgtgcatttattttcgaatgtcaccgggtggtgtgaacttattcctttgttatggccaatttgcattgattactttattccttgataccttgggttattataacttgactagttgggctttatatattggttcagctagatattagttatgattgcttagccatgcttagaaacattagcacactattgggataacttatgactcactattatttaaggatggcttaatgatagttcacgatggttaatcgtgattggttgattaattacttgccaactaaaacttgataatggtgggttgtgagcacatggttttgagagtcgtgctcatgacaattaaggaccagttcacgagctactgttgtgaaacatttatcgtgccaaccacaagccagcgtgggcaacggctttatcttttgtgtagcgtgattcattatagtgcgccagactgagaagtggcgagaagtccacgggggtcgctggggagtccatgccttgtttataagggggtgattatgatccaggaaaggtgcgctgtaatgggttaggttgtgcaaggggtattgtcacaactcctttccgaggtaccgtggtggtattgaggcacatggtgacatgatgaggggttgtgtcttgtgggtacagtggtacacctctggccagagtaaaactattcgaatagccgtgcccgcggttatgggcgggttgagcaatgtttttcgtgattagtctcacacctctcacaataattatggatgttatacctggtaataatttgcttagctcctggtttggagttagatctgtacagccgggtatggttgttcaggatggttgggcctgtgcagcatgggtgtgctgttcagtgttgattaaaatttttaattaattactctactgttttactactcttaactctttgctaaatgctgctttcgcaaatgagcctatattatgccatcctttggtatccttgtgcacttgcatatttgctgtgtggcttgttgagtatgtcatatgctcattcttgcaataatcaatcaaacctcagttgaagataaaggatccagaaggagaagacgtttggcttataccccagttgagctgcctgtgggagtggagctgaagccatcgctagaccgttaattccgctgctgttttcttttcttttgtaagtgtgtaacgttattattatgatggatttgtatattaaattgtcagtttgtgtacctcggctgattcctggacgaggattttatgc

SEQ ID NO: 269 - DNA, 1757 bp, Oryza sativa
ctcggtacccccttttcttttccgttggtcgtgtagacgcggcagcttcggaagatccgctcttcgtgaaggttgaagccgacgtttgggaaagtgagcaaggcaagtcacatcatccttgaacatattgaatcccagtttataaaattattttgatttaaattattgcattatcgctttatttaaattcccgcgttatcactgttttatctagccatacctatttacctttgttatgaccttattattgttattgttattatttccttgttcaccctagaataaacaaaaccccaactagtggacactctactcatggtaccactagtatgattttaggtagatgcttcgctggttaattaggcaacattaggtggttttacaactctagtctttgggaattttctcatcacctggacactatggaatggatggattattgtggaattggattcacacctccccctctattcaaaaccctcaaaatggttttaggctgggctcagggtgcatggttttgatagtagcacctcggccatataaggaccggtcttcgggcctctgttgcaaagcactaccgtacttccacatgtctagtgggtaaggcttagtttgtggctcagtctggttataaacaaaagtacacggatggagatggacgaagtcgggggtcgatggacatctctaggacaaatgaaggctacacgagctgcggcccggtagtcgagatgtcatggcacagggccggtgtcctgctgctaggggctcagtcctgcctacctgtcccgggggttccgggcgtaggtgtggttgggtcggtactcttgtctatggctaggatgggttggaaactatgtcatgtcttccgtccgtataccgtggtggtatgtggcacgtggttacacgtgaggaagatgtgtcttgtgggtaaagatgtacacctctaatcagagtataacctattcgaatagccgtgccctcggttatgggcaagccgagcaatgtacccaagttggttggcttgggacgagctgggacccagggtcgggttgccagttcggtctgaatcatcgtaggccttgggttaaggtaggttcgtgtgggttcacggccttgattaataatattgtatagctctagaatcgtgtttacaaaatagctttgagcaactaagtgtcttttaatgctgtttactgcaaaccctaaccctttatattataacccccttgtactcccttgcatttactctgcacttatgggtgtgtcttgttgagtacggtggttgtactcagtcttgctcaatttttcccaaacccagaagaggagcccctggatgatgaaggctttggtgtctagctcgtgcctgccgtcaagcgcctgtggtcgtcgccctagtcttccgctgtttcccgtttgtctttgtgtgtgctgggccttcaccgcccatgtaataaagtgtcacatcctgattttcgtttcaggatttataaattatttaataaattaataatagaatttatattaaatgttcattaatttacaagtgaagttaaatgtgggaaataaaatttcctaaatataaagcatggatggatttaatttttattaaattctccatggttaattatactctctggaatttctcggatttttcggagctcaattcctatttttttaatcttacaaagagcatttcagtgattaatttaattggaaaagtatttaaaatcacctttaccccttcgggccgaattagg

SEQ ID NO: 270 - DNA, 1366 bp, Oryza sativa
ccgccgccgaatccgccgcatcccatcgtccccgcgtgaaataaataggggggaattattccccgtgattccctctcccttttcccccaattttccctccctctctcccttggattcgtttggaaaccctcccctaatcccgccggcgccattgatggagcccgagaacgcccgtgccggtttccttcccctctggccgccctctcccccttccaaccctatttaaatcctccccgcacctccctcgtccgtttccgcctctcgccgccctttctccccgccggattcgagctcgcgacgtcgctctctctctccaccgtcgccgccgagctccggtccgccaccgtcgtcgccccggaccgcctcccacctcggggccgcctccttcggcttcgccgcatcctcgccgacctcgtccacctctctgtttcggtcgccgaccgccggaacgccgtcgaccccgtcgacccgagccgcgccaccgccttcctccgctccggccgcctttttcgtcgtcgccgtcgacctagggtgaaccgtggaccgccgcctcttttcccccttcccttcccctctgtcggccgccgctccgccgtgcctatggccgccgccggcgaccataggggcgcgggcgccacctcccgccggccgcgccgagtggccgccgcgtggggcccggccgtcagccacccgtgccctcgggtgcggctgaccgtgcggcccacggcgccgaccggtgcgagcccgggtgcgcccggtccaccgtggactgtgaggctgccgcgtgggccccactcccgtggacccggtccgcgcgccccctcccctcggctgacgcaataaaccctttttaaattaaaatttaaatgaagaaattcgcaaatattcatttaaagagcatataaacttcaaatggccataacttggccatttgaactcggaattggaccattcaagtctctaatttttccttaagaagtcaagaacccatttttgtgctttgttcctgcttgttatatggagtttattagagtaaaagccttttcttttccgttggtcgtgtagacgcggcagcttcggaagatccgctcttcgtgaaggttgaagccgacgtttgggaaagtgagcaaggcaagtcacatcatccttgaacatattgaatcccagtttataaaattattttgatttaaattattgcattatcgctttatttaaattcccgcgttatcactgttttatctagccatacctatttacctttgttatgaccttattattgttattgttattatttccttgttcaccctagaataaacaaaaccccaactagtgaacactctactcatggtaccactagtatgatttt

SEQ ID NO: 271 - DNA, 2187 bp, Oryza sativa
ccctcttgctccttttggcaggaggggggaggtgcggcctgctgtcgacctccataccgtcgaccccaaaatctgtatcatactgtaattggagatcttcatatctttattcaatggcaggagggagagatacaacagttggatggggacgcatcggcggcggacgagaacttggcgctggccttggagttatattgatctcaatgctgtgcttgggccattgaataaaggtcccacatgcagccccaagggtcagaatctcgtcattaggtgggtgggggatagtgtagccaacccaatcgggcttcactaagtccacctgaactttggcattgccggctagcagctgcgctccatgcacttgggtgtccggggtaggcttgaacgcttgaccctctgcagcaggaattgcaaatcctggtgtcaccctaacgactagggtacacgatgtgggttcctgcgatagattcattagtgtccttagaatatgttgcaatgtattgtggtgctaatacaatatatgcctttttaagttgtttttaccgttatgtggtccaccgcagcggggcctttaggctattctgccggagcctcagttgatgcgcagctgctacgcctctgcgtggggctcacttgtactatgggaccgggagtggcatcggtcgacctatccctgatgcgtgcctccacccgagcctccatacctaagagctcggtagtgagctcttctctaagctcttctttaagctccacccgaagttggtccttaaggcgtgcagttttctacgcctttgaaagcttgtgcttcttgtactgccacgcgtattggggaaacccaaacttccatggaacattggagccaatgccccttgttcgtccacggtgttcttcgtttccaaacgctttcgtgaggatgtcatcctcgcgtctttgtgagcagacctcttgggaggcatgtctctcagcattcagttcgacctggggtacggttaggatgagttagatgaagaataagatacgacataatgaaatttattctatgtgttcaacttacgattttctggtacaccgcttgatctttgggatttgggaacaaaagagttccatcactattcttcttcacccttgcccttgcgcagttccatgcccgctggaccgggatatcagtaagcacttgcggggtgttagattccgctgcagcttcatcctccttgtcccattcttcctgtttccccgtgtaggctccggtgccaagccggtgcgggtgaaggttccttgcctgcagatcccggtaggcctggctttttgcccgagactctttcgttgatttggcggcatggaactcatcccacacggttcgggtgatgaatgggtatttcccaaatggttctggttgggctgggttgaggacgtactccgtgaccagcgttgtcttgaaatttttccaacaattccccatcttgcggatagcctgccgcttgagtcctgcctcggcctctaaagggtattggaagctttccttgaactgcctccaggcctcttctttttcttcttgagggaccagatagatgtggtccttcagaatagtgaagttccgcctccctaggactctgcatatcgtagggaactttttgacagctttcgtcagagccgtcggatatccaacattgtccacctctgttatggtgtagacttccttaggaatctaattctgggtcctaggattccggctcaaagtagtcctagtagtagtcgtcgacattggttcgccttgctgcgacatgtcctatgtgactgttgcacgggaagaaagtactttttaaaaagtaaattgcatctagacacattctctgatggtttgatatacctctatctcctacctgcgcccgccccgtcgaaggatgtcacgtcccaaaacgactctaaaatatatcctttaaattatgcctagaataattaaaatccgtgtgtgaaagcctccaaaaattaaaatgtgcaaagtaaaagtcaaataaggcttggaggatttttgtatatttcctaaaagcctaaaatgtgtaaataaattttagtggaattttcagagcacaaataattttagtggaagttaaaaaggttttataaaaagaaaaaccctaaaagtcccccttccctcccttgggccggcccagcccatctctcctctcc

SEQ ID NO: 272 - DNA, 504 bp, Oryza sativa
gatctccctattgttgaaaaaccagtgccggctatccttatgaacagtgacaatcaaacggtaattgtcaaagtgaatagttctaaggataatatgaaatcgtctagacatgtgaaaaacgattgaagtctgtcaagaaattgataaactccggagttataacattgggttacatccaaacagctagaaacctggcagatcccttcacgaagggactatcatgaaatgtgatagacaatgcatcgaacgagatgggtttgacacccatgtgaattatactatggtggtaacccagtctatgtgatcgaagatcccgtgaattagaacctgggaagaacaaactattaataaactataagagactaccgagatataccctctctaagtgaaaatgcatgtactctcgtgagctgcaaagcacgttggctatgccttaatgagttctgttggctttaattagcgaacatgctttcctgcatagcattcttgaaagaactcaccttt

SEQ ID NO: 273 - DNA, 582 bp, Oryza sativa
atattcatctgatcataccctggttggaatggtttctttttggaaaaaaggcgaaacaccccattagctttacctgaactattaaatcagataggtatagtaagcccctacttgttcattggtccaaatgatctctgagcggtttcacctctatggtgtcactggtggagaaaccctttgtagtcccggttcgtaacccccctttagtcccggtttccagaccgggactaccaatccgggactaaagatcgatctttagtcccggttatttcacccgggactaaagatagcgatctttagtcccggattggtagtcccggtttggaaaccgggactaaaggggggttacgaaccgggactacaaagggtttctccaccagtgacaccatagaggtgaaaccgctcagagatcatttggaccaaatgaacaagttaggggcttactatacctatctgatttaatagttcaggtaaagctaatggggtgtttcgccttttttccaaaaagaaaaccattccaaacaaggtatgatcagatgaatatattctcagcaggggacaaaaacatgaaagctacaagag

SEQ ID NO: 274 - DNA, 595 bp, Oryza sativa
tggttttacaactctagactttgggaatattcatatcacctggacactatggaatggttggattattgtggaattggattcacacctccccctctattcaaaaccctcaaaatggttttaggctgggcttggggtgcatggttttgatagtagcacctcggccatataaggaccggtcttcgggcctctattgcaaagcactaccgtacttccacatgtctagtgggtaaggcttagtttgtggctcagtctggttataaacaaaagtacacggatggagatagtacacggatggagatggatgaagtcggggctcgatggacatctctagggcaaatgaaggctacacgagctgcggcccggtagtcgagatgtcatggcacagggccggtgtcctgctgttaggggctcagtcctgcctacctgtcccggaggtttccgccgtaggtggggttgggtcggtactcttgtctatggctaggatgggttggaaactatgtgacgtcttccgtccgtataccgtggtggtatgtggcacgtggttacacgtgaggaagatgtgtcttgtggttaagatgtacacctctgatcagag

SEQ ID NO: 275 - DNA, 4618 bp, Oryza sativa
  unsure (1)..(4618): unsure at all n locations
ccttttcactttcgcagtcctccttggcgtcctgcaacatctgaccaagatcatccgcaacgtcgttaccatcagcatccatttcctcctcgcccgtttgatttccttcaaatccaacgtactgagcaaagtctggaatattgtcgtcttccacttcatcttcttccatttcaacaccttgctctccgtgggatgtccaacaattatagcttggcatgaaccccgactcaaacaagtggaaatgaatagttctgcatgcagaatactccttctgattcttacacttattacatggataacaaataaaacctctttgcctgttagcttcggccactctcaaaaaatagtgcacgccgtcaataaacactttggaccgccggtcagcgtacatccattgccgatccatctacatgagtcgaaaaaaaatcgtacaaaaataattattcttacaataatgacagtcatacaataattataagataattacaaactgtttcaacagtcatacaataatgacatatctttattcatacaaaaatcatgaaatattacaccaaataattcttatttactatttctaaagttttaaactaattttaatgtgttttacttcttttaattttcattttagttgttttctagtattcaagattaactttcactatagttttccttctcaactattttataaaaccttctttagcaaatcaactaaatttctatatattctttcttccccacacaaattttctccctcatcaacttacaactaaattttggagacaaaaaagtgtgcaaaacatagctgcaaatgtaatatgacaaaaaaaacattggaggatgaagttgcaaaccttttaggcacctccgatttgtatgtaattaccaaaataaattcactagaaattttggcatcacctcccctcttttttgaagaaattttgaagcttgctcgggcagctggaggaggaagaagacataaatataggggtgggactttagtcccggttagtgttaccaatcggggctaaagatcccgggatctttagtcccggttggtaagttacgatctttagtcccggttggtaccaaccgggactaaagatcccggggggcctgacaggccctgacaacatttgaaccgggactaaagatgatctttagtcccggttaaaaagggtaacgcgcatatttaaagatcatctttagccccggtttttattgcatccgggactagtgtggagttcggccgaccgacaaaagatggtttctccaccagtgtgtgtaagggttcaacgatgtcgcctttttaaatactctctccgtcccataatataagggattttgagtttttgcttgcaccgtttgattactcgtcttattaaaaaaaatttggaattattatttattttttttgtcacttactttattatccaaagtactttaagaacaacttttcgtttttatatttgcacaaattttttaaataagacaagtggtcaaacaatgcaaacaaaaactcaaaatcccttttattatgggacggagagagaagtagtatatggaggatgctgaggaacgtccatttgaactatatgtcatccgaaattcatactctcttccgggacaaatatgtagtgatataattaattaagcgtttattagttagattgacatggttttcggtgttgaaattagaatcagtacggcacaactcgtttttttactaaacatgtaattaataaaattgctaattaagttaatagttagctaaaagttctaaatgtcatttttgtataacacatgtatatatgtatttcaattatctactgtggtagtatattataaagcggcatcaatgtattgtaatatcatagctaggaaacacattagctaggcatgcaagaaaaattctggtccagcaacagtgctaaaataaaaagcatagaaagggagttatcacctcccacccaaaatgaacgtacgacacccaagtaaaacaacaataagaaaataacaaataaacaaaaggtccagtaaaaaaaaacaaaaggattgatcttccttacatatctgttgcacccaaattgtctaatttgttatggaaaataagcataagcatagatatattttttagataatggaaatgggttacatctccggcttctgttataagacacacagccataagcatagatatataaataaggttcttaattatccatgtggcacgtaattgttaattaacgcctttgttcggtttgaaggggattaagggagaataattccacaccacaataggtgttgaataaattgggaaataagtaacaatattgatgtggcgctagagtcttgatcatatccatcatgtttcgaatccaagtgtcaaaataaataaggtcacatgcatccttgggtactgcatgtagggatggaaattatgcatgtgatctatatatgtacataaaattataattaagtaaagctaatgatgcgttcaatatggtttatattctagggttttgccttctcctctgtgctgcgtcgtcgctcgtagactactccattccgctcgcangcgtgcacctgcaatcgggagagcaggtctccggaacctctgccttctacgtcctgcaccgggagaaggcggcaataaggtttttggaaagtacttggtgcgactgctccctgttagtccgcaaaggatcgtattcctattcgctcgcgtgctgtgcgccgtcttcgacgtcccgcaaccggaagtagttcctgcagagcaactggtctttccgccacttcggtatgtgttcgacatgttgtgcatatttgatctgttcatgttttactgattagtttacatgtgtagatctaatgatgcgttcaatctagtttacatatgcaatgtcatgatttatttatgaaataaattaaatcattattttgttataatttcaacaatccaaaccttatataggcactgtgattttactatggctggttttgccgatgcactgaggccggataaattcaccggtgtgcacttcaagagatagcagatcagggtcactctgtggctgacagctatgaaatgcttctgggtgagtacaggcaagcctatgggcgttcttaatgttgatcagcagaaagaattcgatgaggccactactctctttgtgggatgcattcttagcgtgcttggcgatcgtctggtcaaggtgtatatgcatatgaccgacgctaaggagttgtgggatgcactgaatactaaattcggtgctacggatgctagcaatgatctgtatatcatggagcagtttcataactacaagatggctgacaaccgttctgtagtcgaacaggctcatgagatacaaaccatggttaaggaactcgaactccttaagtgtgtcttacccgacaaatttgtggtcgggtgcattattgcgaaactacctctatcttggagaggtttcggtactgcactcaaccacaagagacaggaatactctgttgaggggttgatagcgtctcttgatgttgaggagaaagctcgggaaaaagatgccgcgtctaaaggcgatggtggccagtccactgccaatgttgtgcacaaggccctgaacaagagcaaggggaaatacaaagctcaacagaccaccaacttcaagaagaagaacaacaacaacaattctaatcaggatgataggacttgctttgtgtgtggtcaacctggccatctggccaggaagtatccacaacgcaaggggatgaaggcacctgcagggcagacctctaagtctgctaatgtgaccattggcaacactggagatggaagcgggtatggtaatttacctactgttttttcagttaatcagtctactaattggtgggttgatactggggccaatgtacatgtttgtgctggcatctcattgttttcttcttatcaggtcgcacggggatccaccgtcctaatggggaatgggtcacatgcttctgttcatggtgttggcacggtagatctgaagtttacttcgggaaagatcgtgtagctgaagaatgtgcagcatatctcttctatcgacaggaatcttgttagtggctcctgtctgactagagacggatttaagttggttttagagtctaataaagtagttatgtctaaacatggatattttattggtaaaggttatgagtgcggaggcctgttccgcttttccctttctgatttctgcaataagtctgtgaaccatatttgtggcagtgtggatgatgaggctaatgtttggcactcacgtttatgtcatattaattttggcttgatgtctcagctttccagcatgtgtttaattcctaagttttccattgtcaaaggttctaagtgccatagttgtgtgcaattgaagcaacctcgcaagcctcacaaggctgccgaggagagaaacttggcaccattagaactcctacattcagatctttgtgaaatgaatggggtgttgacgaagggtggaaaacgatatttcatgacgttgattgatgatgctactagattttgctatgtgaacttgttgaaaacgaaagacgaagctctagactattttaaaatttataaggcaga

SEQ ID NO: 276 - DNA, 587 bp, Oryza sativa
tatgaattgggggcttctattgtacatattgagttgaatcaacagagtgattgttttagatggaactatcatcagaatggccaattttctgtccggtcaatgtatctggctttaataaacaatggttatattgagagaaataagattatttggaagtctaagatgcctctgaagattaagatctttgtgtggtacttgcttaaaggggtagtattaactaaagataatttggcaaggaggaactggaatggaagtttgaaatgttgtttctgtatgaagaatgaaactattcaacatctttttatggaatgccattttgcaaagtttatttggagagctgtatagttctcttttggtctttaccctcctaattgcatatctcatatttttgatgattggctctgggggtggacaagaaaaataggaaacttattctcataggagcttctgttatatgttgcgctctatggttgagtaggaatgatatgatttttgataaatcaccatctgtttcatatatgcatgttaatttccagggcacgcactgacttaagtcttggtcactgctacacaagtgtggatgttgg

SEQ ID NO: 277 - DNA, 594 bp, Oryza sativa
tacccatgatattttgatgcaatggataggatggctgttacggaatgtagcgaattcttgatgaaatgtactttctaatattaattgatcaaatttgagtatggaggccctttgcttgtcgactaagtgacaacgtcatggctagggatgcactggtgtttttatatttggatctcaagccctcgtatctggttctccagctgaatgtgttgatgcgatgactgcagcttaccaatggatgactctgtcatcttttcgctggcttgaagaactctgcagagaagcagaagtaggatatgttgacatcaggtgcttaactgaaacccgaatagaatccatttattttgacttcaaactgatgttcagatctgacatttggtgcacaacatgcagttgggggttttgacgtttcttaagtttttttcattgaacttgatcagccaaataagctattttagacgtgattcatgacctgttagtctgaagcgaaagcagaatcagattcaagaaatgcagatgtagaactatccaatcatatcgatcgagcacaatcttgtcatgccattgccagacatccattcttgcacaaagcaa

SEQ ID NO: 278 - DNA, 1064 bp, Oryza sativa
acgattgaccctagcatcctcctatcaaatgaagacaccccttactcacgcagcgatcacaagaagggaacaatagtgaggagaaagtacgtgcggtcaaccgtcaccgccgatgtaatgccgtaattattgtgtacacgatgtaaactattttggatgtattgattatccatataaatcaattgatgtatggcatatgttaattacgcacgattattagaggtttcaacaagtttaaatcatgtatatgttagttatatgtgatacttacaatttttaaaagttttaaatcacacaggtggcaatttcatatgtatgttaattagagtttttaacatttaatttactagcattcatatgctaattataattgactagaggatttttaaaagttttaaatcacgcaagtggtaatttcatatgttaattagagtttttaacatttaatttactatcattcatatgctaattataattgactggagaatttttaaaagtattaaatttaatatatttttaaaactatcattcatatattagagtttttcacaatttaatttactatctttcatatgctacttatatatgactattcgaatttttaaaaggtttaaatcatacatgtggcatttacatatgttaattagagtttttagcatttaatttaatataattcctacgctaagtacatatgatgattacaatttttattaattttaaatcatgcagtatgtacattaatatcttaattagagtttttaccaatataataatatcattcatatatatgctaagaatatatatatattggaatttttattaattataagtcatatatttgcttattacgatttatccacttaatttattacagacaaaaataatttttcgaagtaattgtcatcaatctttgtactttaaataatgacaatgcattaacttctattttataaacacatatgtaagcgaaaatcatatgccctgctataatctttaatccccggtcttaaccctaaccgggtttaaaaagaatttcgaaataaccgggaaaagatatttactcc

SEQ ID NO: 279 - DNA, 648 bp, Oryza sativa
cccatgtttaagaaagtattcttaactttcataagacctaacaaaaaataagaatcaccttgtttcctatcaacttgggtaatagactgattataaagatactttgtttttaataagtcttgccaaaccccttactcatttattaatttaaacaaccatttagtcaaaaggtatttattttgtatttctaaattatggacacccaaactaccctgatctttgggttggcaaataatatcccatcttgtaagtctgtactttttcttatgatcatccccttgccaaaagaatgttgatctataataatcaattttttgaagaaccccttttggaatctaaaaaaagatatcatattaaacataagctaacactttgaagggaaaaaccccaagaggaaaaattttttttttaatcaaaaccagtctacccctaacagacatatgttttcccttcaactactaagtttcttctcaattctttgttcaataactttccaatctttgttactaagctttctaaaatgcattagaataccaagatatctaactggaaaagtacctaacttacaacccaaagatagtagaatattattcataaaagtcctttgcctggccaaaacaaaataattcacttttattaaaaattatt

SEQ ID NO: 280 - DNA, 691 bp, Oryza sativa
cgagctcggtacccgcaataccaaatcattggcaaattttggtagtaacaaatgttttggcaacttatgtgtcttattggcatattttggtagcaaaccaaacactagccaaactactatttaaaataccaacaatttggtagggcatcattttagcatcaaaccaaaatggcccaccgtttctcgtgcggggaactcagccttactatgtgtgtcatccaacatctctatgataaattttggagaaaatttgcgaaggtaaacgttgcaaatatgcaggcaaccgaatcatcgcaacaactctcggcagcacatctcccctcttcttcctgagtactctgggccaatctgccgccctccgccgcacgcgccatccgatggaggaggcgcaggccgccgtgatggcgcacctggaccaggtctcgggcctcgtccaggcgctctccgccgagctccgccgcgggatcggccccgccgccgacagccttctcgccttcgtccgcgccgtcgactggacggtaactaactccccgatccccagattagcggagatcaccgatttccagccgccgcgccgtgccgcctcctttctcttttgctgatgattcgcgtgccttgtgcttgtggcactgaggctatttcaggaaccatggctgatttgcttgatggtattccatgcgactctgttgct

SEQ ID NO: 281 - DNA, 553 bp, Oryza sativa
ataaacattgtaaatgtagttagaataacaaagtagtgcagagtagaagaaatgcagaaccagtaaaatactgggaaatgtttagtaattccaactacagaaaattacagaggaattgaatcattgcatgacagcatgttacacctatataatttattttcttaggaactgatacacaaatatgaactgttgttgccagcattttacatactacacgtgaaacaattatgtgtatgtactgtaagcataattgccttagtttcataaccgtttagcaggcaaagaattcctgaactttttcctaaacaagataaaacccagggcaccaaggaaaggccaagatgttacaaaagcaatgtaagtaagcaaccaaacagatctcccctgcgatcgaatgagctgattaatggatatctttacaggagcaatagcatcctggattttatctatgttttgttttggctgttcctgtgatcctacaggaccttgggctggcgtcacattctcttgtgacctattaccgtcacactcattctgtatttctgtggcgatt

SEQ ID NO: 282 - DNA, 3703 bp, Oryza sativa
tgttttctgcttcccgattcctttggatttgcagcacctttccaacctagttgcgattcccaacctatcacacaaaaaccactattttcttggcccaatcggcaatcttgaccccaatgatttcatcattagtgaaaccaacagaatcctctttagactagccaaccctaacctgggtcactggaagaataccttcaagtcttggccatctctcgaaaagcctacccctgataagagttggaccacctggtaccaacgcatatcggctagtaagaaagtccactgggatgagattgggatcggccaagcgtttgctctcaccatagccaattctgctaaggatgaacctctgatggccgccgccacctatttctggtccaacaccatcaatgccttcttatttaactaagggccgatgactccaactttgatcgacatcatcatgattactgaattagatgtaacttcatcggctaaccctatgagtatgaacaccaagaaccaatttgacttcaagaccaaaagcataggagggtggtctggttatgtagcggcatacatgggcaaagggcctatcactcctcgggagcacatagctttcttgctaatgtggctagaaaagtttctcttctgtggattcagctgtggtcccacaaccaattggcaatttgtagccgaagccttaaaatcaaagaaacaattccccttgggcaaaatccttctcgactatctataccaaatgttgaacaatgcatcggctaagatagccgtcggctcaatagttgaagaaggtggaccatggtggctactgcagacctggctaaacctggtagtcataaaagttgtcaatcggccatctgtaacaaaagctgaattcccaaggttggagccaattgtagaagatgatggagaagaacgcacccatcacagatgcatgtcatatggagaatatgcatccacaccagcagatgctggggcaaaactatcggctgagctgctcaaagattggttctgcagcttttatgaaggcttctagaaagatgctcgtgtttggtttctttatgaagactcagcagaccttgagctcccatcagacttcagatttgaagacatcaatcatgaaagatatcaaacatccagggaaatctttatagccgcaatcagcccatgcatcctacctgtcggtattcaccaaggaagaaatatccaagtctcctacgaattctatcaccccacaagttcagctagacaacttggattaggccaactcccaatcgacttattctttgctaacaagatccaatgccgaggagaaatttcttcaactctaatgatggatcgactgcttaacctccaaggacctcccttaggcaatatcgacaatattgagttagcaggattcaggagcaggaactttgacagatggtggggtgaatggaagttgcatctatttcatcaatcggccacaatgtacatgacagatctattccccgacgtcataccccaggtaaactttgtcatcactaaatttcataacggttagccgattcattacttgactaatcttttgttcctgttttgcagacaactaagtcctcccctccacatcagagcaatagtggtaggaacattgaatatgccctaggtctgattcctaatggaggcggattgtctccccctgtcatcggctatcatgcctctaaggtctcaaccctcctccaaggcgccatcagggaaccaaccgatgtaaccaagaaaagaaaaactagatcatcggctgtgagcaccttgactctagctccaaagaaaaaggccaagtctaagaaaaccaagccaaccgacgacctgtctgctttggatccatccattgaacaagctctggatgaagaagatattgaggatgatgttgatcaggctgcagccgaagtaagtgatactaaaaaaacaccatcggcttcgcctaagcagatacctccaactccttctgcccccactcacttcttcagagtaaaacatctttccttgcaaacccttttataatcattattttcagccgactactcataggctttgtagttacagaagaagaaaactgctataaaaaagaaatcagcagcaccaattctcaaaccagctccaccagtaagacactcccaattttactagttgattccagccgattttgtctaacacttgtctttttacagcctcttcctcctccttcttcccctgtacaacaaccatcgagtgaccgaactccatcagccgtggggagtcatcatattgtggaagaagaacaaccagctgctcctgctatcccagtaagttttcctttgatgcaagaatttagatcggctatattgacttagctctcaaactttctgaacttatacctgcaggttctagccgatctcttctcttttgatatcaaagattatcttgttgaggcagaagaagatacttcaagcaaagctctagctcccttatctgacgatgcaaagaaaacacttgaagatatctcgcgtaggctagaagcctcttctctggatagcttagtggtcgactatggatcgattaggacaagattgcatgaagttcaagctctaattcctgaagaactggccgatgtcctaactccagccgcttatcatgagcaacatcaatttaaactagaaaaagccaagctaagactagccgaacgccgtgagcgcaaggagattgaagccacaatccaggtcaatcggtagcttgtgcatgaagaaaaaatcaaactcgatcagctatccgaaggtccgatcaaatccaatatcgatcggcttgaagcccgcaagatcgatctcttggcacagcttgaagaatgcaatgctgaattggatatggagcacaaaaagctagctgatctcccaaaatctgtcgaagagcaaaaagcaaggctcaaatcggctatcaagaatgttgctgacctaaccaagtccctgaaggtcatttctggaactgatgctcaagatgcccaagccattgaagaagtcgaacaaattaggcaaagagctatttcggctatccagcagtacttgtctcaataacttttgtgtaataggacttagaaattcttgtaatcggctaagataccttaataccctgctgttttaacaatcctttgtgccgattaacataacttctaattttcactttcattttttgtatatatgtgccccccaattttataatgtcaacagcattgataaaattagaaaaccaactaagggcgatataacaatatcggtcgttatatatcagcaaaccataaccgattacaactggaaaaacgactaagggcaatataacaatatcggccgttatatatcggcaaaccataaccgattacaattagaaaaacgactaagggcgatataacaatatcagtcatctcaagacgatgtaaacacatcggctgtcatgcatcagcaacactagccgatcatgcgtcaacccaaacacttgggtaatacttcttcaagtatttggcattgagcgcccgtccataaacttcatcatcaagcccttgcaacatatatgcccctttagacacaaccttattgatttgaaacggtccttcccaatttggtgaccacttgccgaacttgttatcccgagttccaatcggcaaaatcaacttccatacaagttcaccttccgaaaaaat

SEQ ID NO: 283 - DNA, 513 bp, Oryza sativa
aaattcgagtagtacgttaaaaagtaggacctgcattttttaacccaaagggcattgtcgtataacaataggttcctatgggggtaatgaacgcagttttttcctcatcctccctagccatgggaatctgatggtaaccagagtatgcatctagaaaacacaaaaggtcgcaccccgcagtggagtcgacaatctgatctatgcgaggaagggggtaaggatccttaggacatgccttgttaaggtcggtgtagtcgatgcacatcaaaagcttgccgttcgccttgggaacgaccaccgggttcgccagccactccggatggatgacctcacggatgaatccggcttccagaagtcgtgccacctcctcgcggatgaaggcttgacgttccggggcctgccgccgcactttctgccagaccggccttgcgcccggccgcacggcgagacggtgctcaatcacctccctggggaccccgggcatatccgccggtctccatgcgaagacgtcag

SEQ ID NO: 284 - DNA, 543 bp, Oryza sativa
ttctattggccgacagctcttaatgatgcggtcgacctggtccggcgatgtagagcgtgtcaattccacgccaagcaaatccatcagccggcccaggccctgcaaaccatactactttcgtggccatttgctgtctggggactcgatatcctgggaccgattacgcgggccccgggcgggtttgagtatctgtatgttgcgatcgacaggttcactaagtggcccgaggcttatccggtcgtcaagatcgataagcactccgcacttaaattcattaagggcatcacggcccggtttggagtgcctaaccgtattattacggataatggcacccaattcactagtgaactcttttgcgactactgccaagacatgggcatgaagctctggtttgactcacctggccaccccagaagcaatggccaagtggagcgcgccaatgcggaaatcctaaaggccttaaaaccaagaactttaacatacttaagaagcacggggattcatggatcgaggagttgccagcggtgctttggggaaaccgga

SEQ ID NO: 285 - DNA, 533 bp, Oryza sativa
tccatactcctaatcttggcttgtggtatcctaagggttgtgactttgagcttttgggctattccgattcggattacgccgggtgtaaggttgatagaaaaagcacaaccgggacttgccaatttcttgggcggcccttgtttcttggtcctccaagaagcaaaattctattgctttatccaccgccgaagtcgaatatgtcgccaccggttcttgttgtgtccaactcctttggatgaaacaaaccctaaaagactttggctacaacttcaccaagatcccactcctatgtgacaatgagagtgccatcaaaatagccaataatcccgttcaacattctcgaaccaaacacatagatattcgccaccactttttgagagatcatgagaccaaaggagacatttgccttacacatgtgagaaccgagagcatattggccgacattttcaccaagcctttagatgagaaaagattttgcgagcttaggagtgagctcaatatcttagattctcgcaacattaggtgatgggtgg

SEQ ID NO: 286 - DNA, 721 bp, Oryza sativa
attcctgcagcccgattaaaggacttgggagtgaggacatgacaaatcactttgttgtcaaaagacttctccgtacttttggtccaagaaatcccactcttgtatcaatgatacgggaaaggaaagacttcaagaggctcaccccaagtgacattcttggaagaattgtgtctcatgagatgcaagaagaggaagctcgtgaagtgagacaaatggtgaagaatgccgccatgatcaagaatcaagaagttgctttgaaggcaaaacaagaagaagagtcaagtggtgaagaaagtcaagatgaagaaatggcttttattgtcaagagattcaagcactttcttcgcaagagtggctatggaaaaggaaggaaggatgatgacaagggaaagaggcaatcaaagagagcgtgcttcaattgtggcgaatttggtcatttcattgccgattgtcccaagtcaaatgaagctaaggctaagggaggcaagaagaagacggagcgtgctcatgtggcggaggcacacatggcggaagtgtggtactctagagatgaagaagatcccgaagtcaagctcaagcccaagtcaaaagacaaggttgaaggagaaggtggtgttgctaccatcgcctttaagtcatcctcttcaagcaaggagcgtctcttcaacaacttgagtgatgacgacgacgactcctaccactactcttgcttcatggccca

SEQ ID NO: 287 - DNA, 1124 bp, Oryza sativa
gaatagtacctctcaaccaaatgtggtttctaattcctctaatccttctactagcaatggttgtgctaagtgttacaatattgatttgaactcttatgctactaatattgatgctatgcaagctcttaagaaagagaatgaaaggttgggcacattggtgaaatatggatgcatgaagacataccattcaaaagatgccctttacaagaccatcaccgctcatcctaacaaggatggacacgggcacgggttttcgggtggaagtcctgtgtctaagcgtgtgatggtaaatgggaaagaatgcttgatgtttgtgagagaaggaaaagcaccacaagcaagtgagatcactaatcttgtgagcagccagggacccggaacatccggacaaaccggccaaaacctctgggtgggagtctccatctctcaaaaattcccaccaggaagttccggccggtttgccaggaagttccgggccaatggccgtgcacaagatatgaccggaagttccaggcataatgccaggaggttccgaccagatggtctttactatgattcatatgtaattttcaaaaattcagagggcaaagtggttgcttattttaatgggaattacaatgatgagtatcgcacttgtgtgtgggtgccaaaggctttgataactaacatcaagggacccaaacttagacaagtttgggttcctaaatcccaagcttgatttcttttgtaggcatactcctccggtggttcaagttgggttgtggacagtggttgcaccaatcatatgactggagagaggagtatgtttacaagtcttaatgatgagaacggaactcgtgagaatattgtgtttggagatgatggtaaaggaaaggtaattggtctaggtaaaattgccatctccaataatcaatctctctctaatgttcttcttgtcaattcattaagctacaatttactatccgtttctcaattatgtaagttgggttacaattgcttgtttaccgatgaggatgtgaccgtctttagaagggatgactcctccgtagcattcaaaggcaagataaagggtgatctctatcttgtcgatttcgatgtggatagagtgaatccagaagcttgtt

SEQ ID NO: 288 - DNA, 559 bp, Oryza sativa
  unsure (1)..(559): unsure at all n locations
cttcaagttcggtgtgtctgaggcgaacatagaccaccattgtgctgcaaatgccaaacaatatgtcatttcactattatgaacacatagagcattgcattatgaaatttttttgctacattagcaaaaaaaataccaagggaagttttcccatccatggccatctttcttgctagtggcttcccaaattcgccactcttacactgatacatctcaacctccagcaaagcggcagctgccgtgtcaatgtccgtcatccactcgaaagcttaacgaaggtcttggaagacggtggaactacaagtgtaagcgtagtgcgtcctcgggttcaataccgcagctacaaaacatagcctaaattagttcaagagttatgggtttaggaattgaacattatgtaaagnnnnnnnnnnnnnnnnnnnnnnnagtgttttagtggtgaggtcgtgcatccttctgtccacaatatccatataagcgttgtacttatccctttcacaagcgaacagactatcatactccattctcaacagttgatatctcaaaagaacctcactca

SEQ ID NO: 289 - DNA, 592 bp, Oryza sativa
cattctgtcaaacaggtcgattgcactcttggcaagtccaagatatgcaaaagaagaaaccattgatgaccatgtaactagatctgggttatggatcataccaaatgttcgttttgcttcttgaacaaaaccattcttaccataagccatgataagggcattgcccacttgtagaaagtcttgcaagcctcttctaacagtgtaagcatgaagctgagtagcctcattagcagccgccatgtcggcacaggaactaagtagactggcaagcgtaagctcgtcagggcaaaacccatgtctcatcatcgacacgaaaaggtcgaaggcttccttgcctctgtcatgcttaccatagcaaacaatgattgcattccaagatacggtatttctcagcaccatggcatcaaacacccggctagcctcaacaacttggccgcatttggcatacatatcaaggagcgcagtggctaccaccacattcaggtggagacccaacctgatcacaattccatgcaccgagctttccaggaccagcaacaggtttggcatggtcatagcacgaagaagaaaaagaagcacgcacactgagcaa

SEQ ID NO: 290 - DNA, 550 bp, Oryza sativa
ctataatgacgccacttacatatgtctgtttttatctaagtttttcatatgaagttggatgaagataaactttatatcaaatttgtataactcgacgagatatacaaatttggagttgattacatttttcttcgaggtcaacaatttgtagttgtagatcatctaaatgagatcgataattttgtagttaataaaattttcagttgtagatctaaatatggattatatgtttcgaatgatagaagtatcaaaagaatagtatttgcttccaagacaataagtgttttccggtgagatggtaagaagtctttaggtggagagagaggtaaaatggtattaaaatcttgtgagttgtgggaaacgatacttgaccatggctgcctagtgaaatatgtcattcctccgtttcacagtgtgtaagacttttgtccatatttatatatatgctaatgaatctatatatataataatgtctagattcattagcatctatatgaacgtgggtaatgctagaaagtcttacattgtgaaacggagggagtaatactat

SEQ ID NO: 291 - DNA, 726 bp, Oryza sativa
ccaaaaatgggttgattgtctcaagtagaagaccaacacatcctgtataacaaaaagggcaagaataacataaggcaaactcgccagctaaagtaaaggaaacagaggtgacaaaacaattgctgtccatacctacagaagttaaattctcctggttgaagggaccagcatttgctagcttctcaatgaatctcagcagctcgagttgaactttaggtgtaaatactagcaaagagcggatcaaaacaactacagcactagcattatatatacgctccttgtcaagccttgatagtccaaatgaggttgcagacaagaaacctgattcatcctctgggttttcagatgaaatgctctctacctgcaggttactagtgggaggaagaacaacctcaagtgcaagctcaagcaaaagcaagataacatgcttctcacaatccacacagagcaacccagattcagacagaagatcatagaaagtgttggaagacaggattgtatgcagtcttatcctattaacaggattgctgtatactgcagctgtcatagctcgcattagaaaaccaaagatcttcatatgagtaagcaaagatgattcagtctcctcgttttcactgtcattctggaaactgtgaagcgttgttagtagcagggaaaacccagtggcttctccaaaaattctttgagctgaactgtttgccccaagaatacgccacaaagcgccaa

SEQ ID NO: 292 - DNA, 570 bp, Oryza sativa
tactatcgccatggtgggggtgagggagttattttgtgcttgtatgttgacgacatactgatatttgggacaaaccttgaggtgataaatgaggttaaatcattcttgtctcaaaattttgatatgaaagatttgggagtagctgatgttatcttaaacattaagctaattagaggtgagaatgggattactctcttgcagtcccattatgtggagaagatcttgaatcgctttggctatattgatagtaagccttctccaacaccttatgatcctagcttgttgcttcgcaagaacaagagaattgctaggaatcaactggaatactcccaaatcattggctcgttgatgtacctggctagtgcaactaggcctgatatctcctttgctgtgagcaagttgagccgatttacttctaatccgggagatgatcactggcgtgcgcttgagcgagtaatgcgctatctgaaaggtactgtggaattgtggcttcactatactgggtatcctgcggtactggagggttatagtgattctaactggatctctgatgtggatgagatcaaagcc

SEQ ID NO: 293 - DNA, 1055 bp, Oryza sativa
gtccataatccaaatacctaattgcggtccagcttccattgcttcaaatatctgcaagggtacatagggttgctagctatacatcccccctcgcttgcaacttgccgaaggttaattgctcacactgttcatcattttatgatgaactaactttagcaacttggaaaggaaaaaaaagcgcatttcattaaaaattagcaccccctattaatctataggatctaatggaagtagagaactgtacatgacaatgtagggtcatactaaggcaactattatccaaatagaaatattcatacgcacctcgagatgtaaagccaatgttattgcccataaggtttggttgaagctgtgatgaatgattatccatttttcatccaaaaaatagccatatggatcagcaattgcacatactaaaacctagagaaaatttgctgctttaaaagcccagcccagctgagcattgaccaaccattaacagatgtcagagaaaagtaagccaatgaggtttactgtcaatttgcggattaagttattcacaatgcttataaactaagctatttacatgtaaactagcatctttgagaggaaagcgaggtagacatcaatacattggaacaaaactctcaaaaacctggattcaatgaccaaaggaaccaaagatctcaagtccagatatagatatgatgcttgtcagcggtagcaagaggtcctaacccacaccatgaacttgaaactaccgacgaagaatggccctgtaggatcgtcggtaccccatcctttttcaatcttgaccatatgtaaacagacccatcattagcaccagcagctatggagttttcatcagggcttatgcaaggcctgccccagctgctaaccactctgttacccatggccttgaattttccacaaacttccattgttctaggatcaaaaaggttgtgcacgttatcctttccacttgtaagaatgaaatttctattccgtgacacactgacagagcttacgtcaagatgagcgaatgtctgggtaccgagctcgaattcgccctatag

SEQ ID NO: 294 - DNA, 692 bp, Oryza sativa
ttcaacgaaattaccgtaaccacatcaccagtaggttcgagaattcgctgaatgagaggaaccacagctgggtcaccacaaacatgaagctcatctgaacaaagccccagaagtgcacgagtgaatgaaaaacccctcgatctacagccaaccatctactaaacagaagaagataacatgagaatgatgaggaatattacagtaaaaaatatgactggcttgatgatgtagtccaaaaaaatgggatgacaattctcttaattactgtttgtattatgaatatacatttaattagcatatctacagaaagaaggttgaagtacctgaatttcatcaataacggcacattgatactcagttgtcatgtcggccatctcaactgtcactgagctatgctttgcaccttcaatttcctccctttcttgtccagtaattaagttacaagggacattagctttgtttagtctttgagctacctcccgtgccaacaatctaagaggtccacagtatactcctacagaattcatcaatagctctgagaaatcatcataattgtatattaatttattatcactaagtagaacaaagtagtacctgaagaacttgcttctagtctcttgagagcattatgtgtcttcccactatttgtaggaccgacatgtaaaaatacattgcgcttcttttctcgggca

SEQ ID NO: 295 - DNA, 559 bp, Oryza sativa
cttctttcatagtaggtctctctcctcctttagctttcaagcatgcttgtgcaattgaagcgatatcatcaatttcttcctgtccagcctcttccaaaacttgggaatccaagatttccatcagaactccctgctgaagtccttctaggaagcattgtgataagttttgttttgtacctacatcatttattaaaattggcttctttcttgtcagaagctcaacaagtatcactccaaaactatacacgtcacttttccccgttagttggctagtgttgtagtactctggatctaagtaaccaaatgtgccttgtaccattgttaccacatgagtttgatcgagtggtatggatctcgaagcaccaaagtcagaaacctttgcagtaaagttgtcatctaggagtatgttggaagattaacatctctatgaaaaattggtattgcagcagccgagtggagataagcaagagctcctgcagtttcgattgcaatcctaatacgatcatcccatgatagaaggcatttagcacttacatcattgtgaagaagttcacatagt

SEQ ID NO: 296 - DNA, 722 bp, Oryza sativa
atgagctgcgagtgctgcgggctggaggaggagtgcacgggggagtacgtgggcggcgtgagggcgtacttcggggggaggtggctgtgcgggctgtgctcggaggcggtgaagtacgaggccgggaagagctcgccgcgggcgcccgtcgacgtggaggaggccgtgcgcgcgcacatggccttctgccgcatgctcaagcgcggcggccccgccgagcgcgtcgccgagggcatgtgccagatgctgcgcaccgcctcctggaagcagcggcggcgcgcctccggatcctcctcgtcgtcgtcgtcgccgtcgccgcgagccgcgcccgagcgccaccaccaccaccgcgcgccgtcgacgctctcggtccagctcatctgatcgggcgatcgatcatcgccatacatgtacagcgagcgcgcgcgcgcgcggtggcgtggcgtggcgtgcggttcttgtgacgaggtgcacgcagcgcacgacgcatgcaatctccatcgtcttcttcttcctctcgcatctagtagagagactagcagtagtaatatacataaggtttctatgtgaattttgaattttgatcaggtggtgttaaccacggtgaaagagggtgcacatatgtgtaatcaagttcaatatttttcacattcttttcaagtaatatttcacatgatcttgtactatactctcgtgcctttagctagcttcgcttctaggag

SEQ ID NO: 297 - DNA, 886 bp, Oryza sativa
ccagtgatcgcagatgctgcaaatattcctcctgccagagaaaaacatttacatgtgaggtagtagctgctcgtttccagctctgcaaaaaccatcgggcacgtcacatactcacgttcaaatcagtatacatggaaagcttttgcaacgcaaagaaacagaaagcttgtccttaccgtcgtcatatcgtagatcatgtcatatactgtacaccacgattcagagaaagagacaacacagccggaatcctcatgctctttagtgattgatctttacgtctcagccatcagttgcgatcacgacaaaaaaagtgatcagcgtgcagttaaatcagcagcaatttgatgcattgcaaaaatgatattatagcgtgcaattatcattggatagcagcatggttaatatagggtaagtaacatttcaaatcacagataacagctgctacaggtagagcagacaacaagaactgcgggcatttcgactgaaacaacaggcatcagaattcagaagccgttatgctgtggcctatggataatgagaaaagtgtttgctagtagatttaatcttacagttgtgaatgtcaaaatgccttttgttttccaagcctctaatggtacaatgagaaacaaagaactggttttgctgaggctgtaggccgatctacttcttgatcttcttatcgtttctgccccttttcctctgctctctcctttcctccgagtagtgcttctttaccagcatcttgtgcattgatactttcagtgcagctagaactgaagctaacacctcttcttgctttgcaatgtcaagacttccttgcagcgccagaaggagcttctcaccatgtggcacctcactgtcttccaagactgtaggaacatgatca

SEQ ID NO: 298 - DNA, 1199 bp, Oryza sativa
tctctccctaaccgctccaatattttccctaggtcttgccggccatcggccgcggctccaccgtggtcgggcgtcgtcgaaacgccgttcccgtcgcctcccgtgccggtcgccgccatcttttccgccgccggccacctccccgtggtcgtctcgccgtcgccgtcctcggtgagaatccctatcgccccctctcctttttccccatccgccgctccccatgcccgccaccgcgacgcgctgccgtcgccggtggtcgtctggccgcgtgcgcgtagccgccgtgccatggccggccgggtcggtctcggccgcgcccgtgccccagccgcgcgcctgtgctgcggtggaccgagtccaccatgagccaccccctttgacccgctgacgtgtggggcccgcctgtcggcgctggttccccttgctgacgtcagcaaatgccatttcctttgtaaaaataaataataattgcgcaataaatcgagtttaattctagaaatccattaaaatggctcaaaacttctaaaattcatatctaactcattcgaactccgaattgagccattcaacttgcaaaattcatctaaaattgagctctacatgtttgtttactttttatgtactgtttccttggtttttattagagtttttcctcgttttgcgtgccagcgtgtagaatccgtcgtttcggaagtccgcggtcgcgaggaaaagagttcggaagatcaaagtgaagaagcaaggcaagtcacacattccccttgagcatgttgatcccaatttataaatgttttaccgtttgcaaataaacatgcatgtcttgctaattacatgggaatagggtttacctatctgctcgcttgtgccatgtttacttgatatctatcctttgtcaaccttgggtgataaattgactagctcgtgttacttatgtgacctagctagaactatatgcttagccatgcttaattaccactagctcagtcgatgggataattgcagtattagacattctagtatcttgttgagccgcgtgctcgagacatctggccatgttttgtgggtgtaattatccaactaaaatgcgactgaatggtgggctgtgggtgcatggttttgtgagtcgcacccatggcaattaaggaccgggttcacggaaaaccctgaaagattacagcgcttggcacaagcgggaatgg

SEQ ID NO: 299 - DNA, 513 bp, Oryza sativa
ccacctccgcgtctcgtgccgcagcccacctcctgcccctgcgcgccgcctcgtgagagcgatagagagtgtgaagagagagagaggaagaggggaaaatgatgtatgacatgtgggtcccaccattttttaaaaaaaatgttgatgggattgtcatgcgtacaccacgtaggacaaaaccgctctggaatgggttgagggtgttaattcgtccggtattaaaggtttagggtaagcaatgtctggcgggttcagaggggtaattcgatcgaccgcgatagttcagggataattcatctttttttccaactagagattgtcctacaagacatgcctatagacttttgcacaggctcttctgatatcttccaagtacttcatccgttttatattataagactttctagcattgcccatattcatatatatgttaatgaatatttcatattataagaatttctagcattgcccacattcatatacttcctccgtttcacaatgtaagtcattcta

SEQ ID NO: 300 - DNA, 551 bp, Oryza sativa
ccttttgtctgaaagcggtgtactccccggagcggggtgacacgaagatacacgtaatctccggcctcaaaagttagctcccttcgacggttatccgcgtagctcttctgtcgagactgagcaatcctcaatctctccctgatgattctgactttctcttctgcttccgctaatacttctgttccgaacagctgacgttcgcctgtctgatcccagaagagaggtgtgcggcacttccggccgtatagagcttcaaacggtgccatctgtagactggcctggtagctgttgttatacgagaattccgcatatggtaagcttttgtcccaagctccaccaaaatcaagagcgcaagctctcaacatatcttccaagatttgattgactcgctctgtctgaccatcagtttgcgggtgataggccgtgctgaaatttaaacgggtccccatttcttactgcagcttctgccagaactttgaggtgaactgactacctcggtcggagactatcttcttgggtaccccatgcaaacacatgatccttgcgaggta

SEQ ID NO: 301 - DNA, 727 bp, Oryza sativa
tgtctcacttcctttcgtgatattttgtgctctcgtggaatgtaggtaacttcaccaggtggcaacactgtgtatacattgaaggggaagtctggtgacaaatttgaatttaaagctccaaggggtggaatgtacaagttctgcttccataatccatatggagcacctgaaaccgtttctttctacattcatgttgggcacatacccaacgagcacaatctggcaaaagatggttagtgttctggtcttttaccttgaccttttcgcttgtcacagtctcatatctgcttatcacgtcaatttatttgttttgagcattgaatcacaatcagtttaatatgcgatcataggtttatatttggtatgttcattttatatttgcgtacataagctatatttggttgcttttgcagagcacttggaccctatcaatgtgaaaatagcggagctgaaggaagcattagaatctgtcactgctgagcagaaataccttaaagcccgtgaagctcgtcaccgacacagtaagcttaacaatccttttgcaaatggtcactgaagctttggcagtttcctataatcctgcgtgtgatatgagaatgcataaatttgtatgaattttctgttggtccactcaccaccctttccacatgaagcaagaaaaaactgatccgttattacattttaaacactacaacattatcaccatcagaaagaagagcaaataggg

SEQ ID NO: 302 - DNA, 625 bp, Oryza sativa
acacaagagtttggcaagatccttaagctatcatcaaaatcatcagcttcttgctgcactcaaaggaacaacacctcaatcaaactatcaaaggtagaagatgaagaagaagaagaagaagagggagaagaagacgagagagaggttggtgatgaactgatgatactaataagcatatagtagcacaatggggaggttgggagggtggcgatcttaaagaagccatctcctctcctcacagtgaatgaacatgatgtcagtgttggtttgtgtgtgcttgcatccaaaggggcaggtccttatcctgagttttttttctttttctcttttgtttttacacatctttttcattggcaatggtcctctcctcctgtcctggccatgcttctcttgctgctgtagtgtgtgctgtgctgcattcttgcgctgggtgttactgtccccgtttgagcccatgcacgcgcacacaaatggtagattccgttggtacagcaggtagatttgctgtcgacctatggaaagatgcgaggctctacgtcaatgaaatcattcatctcatgctgctgaatcgctgatcagatgataatttgagatgattcatcagtggtatagcagtagtagaact

SEQ ID NO: 303 - DNA, 1122 bp, Oryza sativa
ttgggttttgcccctctctcccggtcgtcacttcatccagcacggggacgatcggagccatccattagatcggacggctcagatttgcccagcgtcgggccaccgccgccgttgattacgctgcgcccaacgggccgcgaaagtgcatcggaccgtccccacatatgtgtgctgcgtcagctgcttggcctgcgagccgtcgaattgactcaactaaccaaagatgggccagcccaagtttggcccggttgggaagacctgggccaatagcaaatttgatcaaacaatgtggctcagattttttaaattaaagtccgtcagataaactcataagtagattcgaaaaataaatctaaaactaaatcctaaatcctatgctaatttatcaaattagactcggtcctacctatttgttaatatatcaaattagacttgatttttaccgttttgaggttttcaaggtttcccactatcgaacggtgtttttcccgttgcaatgtacgggcactattgctagtaaaaaaaaaaagctgaagcccatgacgccatcttaatcctctgctcgtactgtccaccaactaacaggcacttgacctccgccagtccaatcatacacagccacgtgtcctggcacttcaaaagttagttaatgtgttcaaccaccagcagctaaaccccgccaacctttgcttcccgccattaatttctcctccctatttatgctcccccatcctccgcccaattcttcccccaaaacgcacaccccaatccgatccagaattcctccgtcgcgaatcctcccttgtaccctgttcgatctcgtgcgcggcgcggagcggcggacgacgacgatgccaacggcggcggcgatggccggagggatggcgacggggccaggcagccgcgtgacgcggtacgccaagtcgacggcggcgtcggtgacgccggtccgccccggcaagacgcacgcgctgtcggcgctggacaacgccatggagcgccacgcggtgtacctggtgctctactaccgcgccgcgccggggctcgacagggagccgctcaaggagtcgctgtccgacgtgctgtcgcagtacccggccatgaccggccgcctcacgcgcc

SEQ ID NO: 304 - DNA, 676 bp, Oryza sativa
aattcaagattagattagtaatttgatactatgtgtacagatttggggggtttgatttatacttttaaaagagagggggtgtatcaatttagtatagtgacaagtgacaagtgagtgattggtgcagaaagggattggcacacgattttaatcccaggagctacctgatagtaccctccttacttttatagtgctaggagtaccattttcttagataggagtagatgtttgctgatagagagtaataggtgggctccatgtctaaacaagatgttaattaagcagcagtaatatttactccctccgtattttaatgtatgacgccgttgactttttaatcaacgtttgaccattcgtcttattcaaaaaatttatgtaattatcatttattttattgtgacttgatttattatcaaatattctttaagtataatataagtatttttatatttgcataaaaaatttgaataagacgaatggtcaaacattgttcgaaaaatcaacggtgtcatacattaaaatatggagggagtaatgtactagcaaatcacccacgcatgagatcaccgtattatcccaatctatatccatttctccggtgcagcaattttcctacccagaagcaagaaagtgattgctacttcaatacgtgttgcaatctcatgacagtggtcaa

SEQ ID NO: 305 - DNA, 719 bp, Oryza sativa
atgggatggcatgcatgtggagtttagtaccaccttgcttattctaggagagggggacctccttaaaagggaggatgccctcctagccacttgaagcatgtgtggtggagagaagaggggaaacacacgcgcgcgctcgctcgcctcgcctggcatggcatggcatggcatggcatggcaggcggcgtgcgtgcacgacgtacgcgtcgaatggtccgaaaaattggctcctcacccttgcgcagatgcagcctccttttgcagttttgttttgctgcaaattcggattcgttttgttttggaaacgttccgaaaaatccggtgcgtgcaaacggcgtggagtccggataagttacgcgcgacttatccggttcggttacgcgcagtagagatcgtgcgggcgccctgatcaagcgacccttctctatataaaccgacccgccgtcttcacgcaatatatgcgaaaatcaatctagggtttgcctcctactctgtactgcgccgtcgctcgtagactactccatcccgctcgccggcgtgcaccagcgatcgggagagcaggtctccggaacctctgcctttgacgtcctgcaccgggagaaggcggcaataaggtttttgggaagcgcttcacgcgactgctccctgttcgttcgcgacggctcgccttcctcttcgctcgcgtgtttcgtgccttcgtagacacctgcgaaatgttt

SEQ ID NO: 306 - DNA, 1166 bp, Oryza sativa
atagagcttgtttccgaccgtattcgattcgttttcattcctacatatgtgtgtactgcgattttttttcttcctcaccagaacaaatcttgtaatagatctaatgattcaaaattgcgtgaaacttacatacaagttacactgtagtacatgcaagttacagtgtaattacatgcaagttatagtgtaattacactatgattgtattataattatatctgtcaaatttttaggagaaaatttgtctgacaaatgtataggtggtcccttgcggttttaggggtgtgaattaaactcaacgtaaagacgagagacgtcaagtggacttatttccaaaggagaaatttcatacgggacgtgtttctcggcccagcccaaatatctagagtacgtcttctactcatgattacgtaaataatgagagacgctatttactccgctagatcagccaccttctcctcgccacgtacgacacaagcagccactcgcgcgcacatggccacgtcacgcaaaacccgcagaattacgcgattcgctgagcccttttctgcaaaaacacgcagcctccctcttctccccaatctagcccgtgacctcctcgccggggctacttctccatcgccatcgacctagacctcgccgcctccttctcctcctcctcccgtgcgaactccgggctcgtgccgagggggtggacgcgccggtggtgagagcgaacgcggtgcggtgggccatggcggtggggtggcggccggcgatgctggtggtggtggtgacggtgacggcgtggcgcgggaaggcgctgtcggtgacggtgaccgacacggagtgcatccacgagttcgtgccctacgagggggacaccgtgtcggggaacttcgtcgtcgtcgaccacgacatcttctggagctccgaccaccccggcatcgacctcacggtgcccgcccccgatcctcctcgtcttcgttgtgcttttgattttcgatgcaaggatctataactagatgggtttatgggtttgttttttcgtgatctggggcacgctggattggggatcaggtggaatcgtggtcctctttttgcgatctgcgatttcgcggtgcaaaagtttggggaaatttggtgatatgaagatatttcatgaataggtttcgatttgattttag

SEQ ID NO: 307 - DNA, 504 bp, Oryza sativa
ggcggtggttctcattcggatgctataagagctatctcgtttagtgcaaacggtgctctgttcgcatccgctggtgatgacaagcttgttaaggtctggaagactgattcatggtgctgcattcggaccatgtaagtcaccctgtttgttttattgtgaaagcataatggattaaccaaattagtgtaccattttatttatcatgtattcagtgagtcaatctacaactattcttctgctacttatctacgtgtttatgagaatccacacataattgttggctgacacacttagcagcttggagtattgttagttatgttaaaaacttcatttttgtggttggtaatgtattaagtccttcatgcatgagtttgatttcttttgcaatgtctttacttttgcagaacttctgaaaagagggtcagtgcagttgctattagcaatgatggcacatatgtaacttttgcagataaatttggtgttatttggttagttaccatgggg

SEQ ID NO: 308 - DNA, 679 bp, Oryza sativa
atcaaaatcaaactacttaactataagagtaaattgagatccgacaataggcaggaaggcgagccacgagcgaagagaggcgttccttacttgagatcgaacacgcggagctcgggcccgacggcgacggcgacggagcggccgagcgggtgggcggcgacgagagccggcgcgaactccgccgcgccgccgctcacctcggcctcctcgaccgcggcgtcctccatttgcggcgagcttttgcttcgcgcgtgggcttttgctttgcggtgggattcgaatcgagcgcgagaacgcgagatgggagggaggcggggaggagggggagttcgcgaggattagggtttatgagtggctctctcgttgggcccaccggtcagtgtctcggttggagatttggaggcggctttgagattgcagcccggcccatgaatacttgggcctttagttaaactcgagaagttttcttagatccactcaaaactcaattaataaattgtttcaacatccaaaacctctgctgtatctagatgccatatgttgttttttttttgtatttacaattttgccactggtttttttaattttgtaaggatgccaatcgaacaacagttctaattgcattttttaattatctggtggcaatcctacaatatatagatttaacccagtggcaaat

SEQ ID NO: 309 - DNA, 3440 bp, Oryza sativa
  unsure (1)..(3440): unsure at all n locations
aattggatggtgtggttaatttgaattgaggtcagttcagtttgatcaagacatggatggtgggtgctgtaaggtcctgagaaatctggtcattgtttttctttttcgaaaaagagaaatctggtcattccgtcattgtatttgtaccgtaaaatattaccactaaaatcttgacttatacagcgagaatactcactcccgggcaaccaacgtgaggcgtcattatcgggcgctccccccggacgccacgtgccccctagcccaccatgtgtcatgctcccacctgtcatgtgtctcaaaaaaaagttttatctagtatactcacaatgtttcactatgcatagatctaatgttacagtgaattgaaaacattcttttgcaacaaatcaaccacatattttagaaaccctctattaaggaattcgtttcattttttgttacaccaaaaatgtttcacctagtgtacttacaatgtttatctaatattgcactaaacgaaacattttttcccaacaaatcatccacatattttagaaaccatctattaagggaatacgttttaattttttgttccaccaaaaatatttcacctagtgtggatcaaatgttgcagtgaactgaaacattctttcgctatttgctgaaacgttgtttttttatataaggtgaaacaacgtccgatttaaacgattgaaatattttcgatctacttagtggaacaattccgatatacctgatagaacatcgtgcaacatttaaaaataatttaataataagctaaaaaaatttcatcggaatatatccatgtatggtcttattttgaagatttaattacaatgaatttaatggtccaatcggatcatgatttggataaataatttaagagaaaaaatagtttaaagtgtttttgcacgcatcgtctgattttaaccccctctcatcgaacggagcgagagtcgcttcccttatacaacgatgagacagccagatatatttctcactcggaacccttctaatccgtttggttgggggagcttttagaggaccgaaagtttagaggatgggggtattacctattctgtttgattggagacatgagatttttctttatgaggctggaaaattgagggataaattcctacttttcaataacttgtaggagtggtatttggaagagaattcctccttgagaaaaaaaaagtgccgtcctgaaaataagcctgtcaaaaagggcgaaaaaaccgttagaaaaaactaaacagtctaaaaaaccggtatataccacgcaagataaaaaaaactacgcaatgcgggaaaaaaaaccagtccgattgcacgcaacgcaagaagaagcccatccgattctacgaataaacttaaaaaaaacacgtaaaaaatcgtttcacgaaatgtaaaaaagagtgattctcgggaaaaaaaccaccatcaaaaaaagttcacgaaaaaaactattttgcagcgttaaaaagaagtctgattctagaggaaaaaaatatcgtcccaaaaaaaacaggtttggcaccacaaaacattatatatatctctatttctttcaaaagcgaaacctgtttttttattcattaatatcttcttcggatcggtttctcgacgacgtactttttggatttttcatacatgcgtcaacgtatttttcgagtactgcgggtatcctcggggcatcaccaaatcagtttagatcaactgcgagtattttgtatgttggtagagatcacgtctattggcaaagatcaaccgcattggtgccgatcaaatacgacaccaacgacgcatcaaatactaacacggaacagaaagcagcagactgccggcacaaggatctctgttattacagtattactgatggactgattgttaagctccaaatagccacagacaacagaattttttttgaaacccgacagacaacagaatgcaacaggctgcgagacactggtctgaagaggcaaagcacttttaacttcagcttccttggcatccgccgaacgctccgcgacaacctttgacatcccaaacatctgagatgcgaaacatgaagcacaagaaatgcttcatcatcaaaatgtccaaaatgcagaaagagcaaagaagtgcagtatctgagtgtttgcacatctgaccttttggatggtgtttgaagcatgtcttgtgctcatccatggaggcatggatgaactcctcgatatggtctttcagatcttcgaggaaagtagcgccatcagtcctcttccggcaacaagtcatggatgggtttttgggaactgaataggcagaatcttgaggttgtgcattgctagattccatcttaagcctgaaaaagaaaagtcaaagggaagttgattagtatgagtctgaagaagacatcaacattgttagaataggtgcaaacacaagaacgcatatagtagtaagtatatagcagaaatgcagagtagcagcggcacaaaattaactgactgcacttcagttatcaaatcatagatgctactaccaaacagatttaaaggttcacatttatttttcaggtagaaacatcagtagctactactcagccaaccgtgtccaaactacgacggcctagaattacaaacaagatgacgcagcaaagaactactcactgatcgataagatctcacagctccaaaaattccaccatcgaatacctaagaggatttacacttgtctcaagttggttatgatcagatgcgagcccccttcactgagattcgactgccaccggagtcacctcccgcccttccctggagctgctgcatccttgaccatgggctcgaccttctttttgccaaacacctgaaacacatcacaggaaacctgcagattatccctcaagatccatcagaggaaacagcatgttataattagctatcaaattacaccataaagagaagattgaattaacttcaatctgaaagaacagagaacactaagtatagcaagaacagagaacaggagtactgccatccgttgnnnnnnnnnnnnnnnnnnnnaattagagtgtgttgctaacttgaattgcaaatgcttgtatacactactgcagttaactaattgtctatgtcaaatactcaggagatctcctcacaagctaatctataatttgccactaattcaacgtgactgctagcaacaaacagatctagatgtacgcacaggttaatagccaccaccaaatgactcgacaacaacaacaacaacaaaagcatcacaaatccacagggaaaaaaccgaatgcctctgctcctctactactcaaatagaacagcactgaaccccaccacaaacgacgattcaaatcgcgaacacaggaacccattcacgcaggccttcccataaacacaacgaaggcactaatcgaactcacattgctgcgttgttggtaa

SEQ ID NO: 310 - DNA, 697 bp, Oryza sativa
aaaacagaagaacaagatcaaaatatttcaacccacaatgaagaagagataaagaatgtaccaactgatgcttccttatatagtttgctgaagtcccattgtcattcgcaagaaggagaccaagaacctgctcagttaaggaataaatatattaggaacttacggtgtggcaggaagtcaggtatccacaaaaaatgttgcatcatatcaacttacctgcattgcgtggcgatgaagctgaattgtgtgaattggaacaagaccctccctaaattgagagaacacggtcagggaaccatttgcaaccatgtggaatagaacttgtagagcatcatcttcaattaggcttggtgcagcagatggatggctcgctagtgccttcattgtatgtactacacttgcctcgatctccatagagcaaaaaacaaggggaaaaaaatcaaaactcaaattaaccaggcaaagaaattaagaaggtttaacatatcacataatgcaggtttggcataaaacgaatgccttgtattagttcagatggatactccagcatggcactatgtgaagttcagcggataaagtattaacaagttgtgattttgcatcagaataagttaacaactcctccctctgtttttcagtagatgatgccattgacttttggcatgacattcaacctttcatcttattcaatgtcatt

SEQ ID NO: 311 - DNA, 7896 bp, Oryza sativa
ccgccctcgcccgcccgcgtgccctcccgccgccacccaccactgccgcccgccgactgccgccgccgcttgccgaagagaaagaaagagagggaggatgaggaagcatggtttatgtgggtcccacccatactttggtggatgacaaatgggtctcacacatattttttatttctaatgccacctaagtgccacataggcgccacgtcagcgaaaccgctctccaaaaccactgagggagtcaaattgcaccggttttaagagttggagggtcgagatatccggttttgtggtttagggttacgaattagatttcgatcactttgagggtcacaaagtgaacttattcctttcagctactgcggcttatcctctgtggaccacactactgtgatcttctttcttaacatacagaggcccatttttttagggttctggagacagtttgacctccacacagtttgacagatcgcaatgtcttttgacacaatgtttaaaacatgcaactcaaatatgtgttcatatccaaatcggacagtacgagactcctctggtcactttcattacagatgaaagtcagacctggcagaactaattttcacgatactggaagattggtgcatatatactttattcattattgtattgttctggttaagagtttctaacatgtgttacatacttactatatgatacttgtatttttttaattagatacggagatagtacttgtaaaagaatttcaaaataatgagtacttatgtaactgtttaggttaccttcattgctcgtgtaaaaactaattaataatagtaaattacacctttcactaagcaaaatgtagtccatcattccactacatctactaggtgatatatgggcttgtttggctagttgcccaaacgaaccttacctaaaatttgacatattttacattaccaaatttagatgttgtttggtttgtcttactaacttttgattgtgtttttatgagaggaaacttccggaattactaaagtttggtaggataataatggtaatattatgtttagtttcttaccctacaaaaatttgatgatttaagagtaaattatattagtggtatataaattttataggcggatgtaatctaatacacaaacttgcaagatgcttatttcagtgcacagacttgcatggtctgtgtgaaccaaggctaagcatgcatggttaatcttactgagttgaacctttattaggatgcaacatatgtacacatatcaggatgatgccatctagaaacatgcatgtgctcagttaaatatataatagtagatgttgattatacaggggaataatatatagaagtatgaaggataaaatgaattgtaaacaataaaaaacacaaataaatactaagtagaggtcattcacaaatgtggtatgccttttatgaccttttgatgcgtgcgcatgccattgtaagtaggtttcaactcacaattattagtcatgacgtgtcgctccagtattgtttcgcacgtactggacaacttcatacactaaataggcagtttgtaagcttgtgcattaggtggcatgcacctacctgtaaattcgtgtacaaccagtgcaatttacttgtaatataatttaaaaaatttttaaggttgaaagtggcaggcgcagtgttctcataagatgtctactagctatatttattagctatatttattttctagtgggttatttgtttaattatatgtagcagatttgggtagttaaaaatttgatacaatacattatgtacaaaggtatatggtaatttaaatgtcacttaataagtggtatattaaaccgtctgtttaaatacgagtataaatgttcattccattatttaaaaaaaatacgagtataaacagcggacatcctcgcccactctgtcatcaggtgtaggattagcacacagtttcgacgagacctctgtatcagcagatggataaccgtgtcgtcaggtgccgctgataaggaatggagcgtttactttgcgttaagaaatgacaagcgaacaatgttttaattaagcgaatgtcaaaatgggtcttgaaaggaacgtgaccaaggaggagagatcgctagctggctaaaatcaaagccgagctccccaggcgcgccgcgcgccgcgccctcggcctcgatcttttaactcccagacacatcacgttgcgccacgcgatcgagttcatcgcttccggtcttcgatccgccacgcgatcgccggccgccgcccggcatgggcaccggacgcaagcctgtcgacggcgatggcgacggcgctgcatcagccgtcgtcttcctcgtgccgttcccggcgcagggccacgtaaccccgatgctccacctggcgcgcgccctcgccgcgcgcggcgacgtcgcgcccaccgtcgtcctgcccgatttcatccaccgccgcgtcgtgcgggccggcgggaacggcggcggaggcggcgtggcgctcgcctccttccccagcggcatcccgggcggcgacgacggagacggcgatccgggcttcgccagcatcgtgcacgccatggagaaccgcatgcccgcgcacctggagcgcgtgctcatgctcatgcgcgacgacgacgacgaccgccttgcagctgctggacggagggcagcgtgcctaaccgtcgtcgtcgacgtactggcgtcgtgggccgtcccggtggccacgaggtgcggcgtggcggccgtggggttctggccggcgatgctggcgagctaccgcgtcgtggcggccatacccgagctcatcgacagggggctcgtctcggaatacggtatgcgctgctgcaacgtccatgcatcccatttctggctttctgcttttttttcttctattttaactacaattctcgatctggtgcaaatgacttttgaattgtcataagcacatcacaaaatactgtactacgttaattctatagatggctagtactctttagtaaaaaaaaaatgttttgaacatcgaaattatcttcaggttgcaactttgaatgttattttttaaaatagtaaaaaaaatccaacaaacttataatcctatacatatcaaggtagtttttgaggtaatatatcacgcatacaattttatactcccttcatctaacaatatactcccaacatttctcaatagaaggcataattgttcctgatgcaaagaccaactaaacaagtaaatatttctaggttatttatcatggattaaggatatttaaggtcgaggagaaaaaaaatagtgctcatttaggatgaatggggggtttgagaataattggggcaaaaagggaagaaattttagtaattaagaagtggttgatgcgagaaatactagtgtagtaatttatatattattggataatatttaaatgcttcaattgcttatatttttggacagacaatgtacatctaatctaaaaattttaaataatggtgtttttaaaagctttgcatatgaaacacatctaaaatggcatgttttaaaataactaatagtatgacatcaaattgttaccatgacttatttaatggtactacccgctcacacatgtatataataacaattaatgatgtaccataaaagactttaaaatagacagatcgaaagtcttaaaaattgcattgacatacggatgcaattcaagcatggaagaatacaagtaggacaggccgttgggaacttgagaagcatcttactgtatttattcactatagcaattaatttagtatccttatttagcaatttgtatacccgtgtctttcttttaagaagtagcacgttgaatagtggtctaaccaaacctattattacatatttacatccactctcaatttttaaatttttcaagaataatttcccccagtcatgtgccaatgttcagtttacagctgcgattagggttttacagatcaatacctttaattttttcccctttctttttggaaacaggtattcccatattggcaaacggattcaacaaaaaccagggccaagtaaaagcaaacctccaggctgaaatcatcagcttattccccgaagaactagagctaagcaccacagatttgccatggctcgtcggcgacgcggcgacccagaaatcaagattcgccttctggctccggacaatggagcgcgtgaagaccctccgctgcatcctcgtcaactccttccccggcgaggccatcgccgccggcgccgaccagcaacagccattgccgcaggaccagcaaatcctccaagttggaccattgctagccaccatcgtcactgatcgagcaaaaggcaacagcaacttgcggtgttcgccaatgaagacgacgaagaacgacaccagcacgtgtcaggcagacgacagaaccagctgcatggaatggctcgaccagcagcgtccaggttcggtggcgtacgtctcgttcgggacatgggtcgcgccgatcgcgccgggcgagatcaccgagctcgccgtcggcctggaggccaccggccggccgttcctgtgggtcctcaaggacgacccgtcgtggcgagccggcctccccgccggatacacggatcagtactccggccgcggcaagatcgtcgcgtgggcgccgcaggaggacgtcctcgcgcacggcgccgtcgggtgctacctcacgcactgcggctggaactcgacgctggaggcgatacggcacggggttcgcatgctgtgctacccggtggccggcgaccagttcatcaactgcgcgtacatcgtcagggcgtgggggatagggatcaggctgcgcagtgccgaccgtggcgaggtggtggattgcgtcgggaggatcatggaaggcgaggacgggaggcgcttgcgggagaagctggatgagctgagggagagggttatggcgggtgaggcattgtgcgtagcaaagaggaacattgaggaattcattcgtgggattagtggacagagattacaataggggcttgttaatttgatcgtgaacgttattaattgccgtgaaagaaaaaggatagtttgatcaatatgaagcatcttaaggaattaaccgaagcgcttaatgagtcataaaaaaatgtgtcatgccgctgactcgttcgtgtaaacattttgttgcctaagagcgaagatgtacattaatcctaaatcatgcatgcttcatacatgtggtgctctattatattgttctacaaatttatgtttgtttatgtcttttgtattgtgatactgagagtctataccctagcggctagcggtatgacatttttcacaaatttcaatcaaattctagttgaacttggatcaatttttacgtttcaaatttgaattctcgaaaactgtagcacccgtattttatttgcttttatttaaaaatcttgtcatttaaaattttggagttaatttggttcttaattgattttgtgccaaatagatctcaaatcctctcttagaattgcctttaaaatttctgtgacatcctaggtcaaattcaaattcaaatcctttgaaatctcctcaaaattcaaactctacaaatccttgagaaattgtgaagcagtactgttcagttcgggcctcatcctctctttcttttcccctcggcccaactcctctcctccccagtcggccagcccagcccagctcctattcacctcttcttccttgaggcagctagccacgtgcacacaaggtgttcgacgaaatgttccgcccggacgccaagtcgtgccgagccgtgtgttgcaccaaaacaccctcccgtgcgccgcgcgtcgtgccaacacccgcgccgcaccgcctccgcaccaggccgaggccgcgccacgccaaaatcgcgtcgcgccaagcccgacctcgctccggtttctctccgggagacacggagccacgtcgcctcgcgtcaccccgtcccgtcgccgtccactccatctatcccgtcgctattgtttctctggtttgagcttgttttattgccttttgtttattagctttgttttcgcgttaagagcccgagttcgaggaagctccggacgccgctttcgaaggagaagaccccaaccctatgcaaggcaagcctctttgatcactttgcccctatatttgcaaagatatgttgtttgaaaagtgcattacttagcatacacgattaacatgtttaggcctcggattgtttatacaaccgacggaccaacctagtagtcacacttatattacataggttgatgtttctatacctttgatagctccacaaatgtttgtgccggtattgttacacgattaccgaggtagtttcgcttagccatgcttacgttgttgccgtgtgggaaacttgggttattccaaattacctgattaaagtagttgtgaaataaaatgtgttgtgaaagtggtgatgatgcggagtcaagcctttgtggtttggccacgtattgtcgttaaggactgattcctttgggaaatccatccgaacacattacagtgtgaccacacgggtatttatgggatgcctctggctgagtaaattgttttcacatgggagttggtgtgccaatggttgtgcaataccgaggatgaggagacgaagtgttacacatttattgcccatcatgggtgtctttttgcctctattgtggcgtggtaccagtaggagtaggaggcatcctcggtatttcctgagtggatgacggctgtcattgcctgatactcggctatggatctttgcccaactaggtggtatgcgattttcatgggttagctttggaaaggccttatcacgaacttccggtaccggccagtaccggtgtaagtttcgtgtcgtgtgggtaaagcgtgcaatctctgcagagattaatgaactgttttaacagccatacccacggtcaagggcgagtgtaaggtgtttctcatagcgtagatttgtttgacaaaggtttgtggaaaagtggttactgaaaagggaacgttaccagagtccgcctgtgtggcagacagctaacctttgtggttaggaacgggtctgtgtgacctgaggtgtcgtccgacaccgaggtgttgttagggccatgatggcgttgatgtgctgggataaccaggagatttgtgtgaactgtgttgttgtgaaaaaggaactaatagagaaaacaatttaattgttgttcgttaattgtgacaagttgttgcaaagcaacttgtggaatgggtcgaggcgtgagcctcctcccgacaactaaaacttgactcactcactaggagttttgtgaaataaatcattttgccaaaatggcagccttcacaaataaaaccgtagcctccttgttaaaccgacatgtcattcttttccctgatgtagcgcccgttccgtcgtggcgcctagcgggaaaattatctcttaaaaaccctagttgcgaaatttgtttccttgcttgttgtcgagtgaccgagccatctcagatctcaaatccccgatctatcgtcgagttcaatccagaatccaaatctctcaaatcaaatccctccgcaaaaggctattttgcctcccccgggttcgatgggccgaatctctctcggcccatctcccctttttttcccggcgctctctctctctctctctctacctctccccctccgctccgcccgcgcgccgcgcgcgcgtgcgcgtgagccgcccgcgccgagccgagccctcccctccgctccctcgctgccgctccccgcgcgtcgttcgcgcgcgcgcccgcgtggttgccgcccgtgccacgccgttcacgcccgccgggcccgctgacctaccgcgcctgcagccgcgcagccgctcgggcccgcggagccacgcgcgtgcccgagccgcgccggtcaa

SEQ ID NO: 312 - DNA, 2390 bp, Oryza sativa
tgtcgtagatcgcgagccccccggtgacgaccccgcccgggaagttgatgtagaggtggaccggcttgagcgggttctccgactcgaggaagagcagctgcgcgacgacgagcgaggcggtctcgtcggcgattggcccgtggatgagcacgatccgctccttgagcaggcgcgagaagatgtcgtacgccctctccccgcgcgaggtggtctcgatgaccatcggcaccaggccgaacgcctggtgcgacgagtaccccgccggctgctgcggctgcggctggtacggcatgggcgacgacgagaagtacgcccgcggcgccggcgccgccaccgccagccgccgcagcgcgggccccgccgccgagccgggcctcgccctgggcttgggggagaaggcggggagcggcgaggcggaggctaggtgggcgagggcggagggcgtcatggctgccgctgccggttcggattggattcggggatttcgagcgaagtgaaatttggggatatgagatggggaggaaggtgagttataacgaggaacggatagggcgaggcgaggagagaaggcgagacggtgcgcttcggcttggatctttttgtttggttgggggcttggggctctttcctgcggtgcctgtcgtcttgggccttgcttgtgtggcaagaaagaatttggcccatataagaatagtagtagtatattccttcttatgttcgtggcctttcccctctgttttgttttcttctgtcagtttcgctggattttggtcggatttgactgaattttgtggcgtttctgcaacaaatgatggaaagctcacaagttcagaccttgtagctagtagtgtactactagtgcagcgcaacctgtgcagtttgaactgagttaccgagcttgttgtggagcggcaggagccaaaagatgagattgttcagttcggcgtacacacaggcaaagtgagtcagtgacacggtggtaaaaacaagcacgttaacccgatgaaatccactcctttatcttccgtcgccaagagagatcgacggccgagacgggtccaagtcggcagggggtccaattggccgagaaagcgcagcaacctcgtggcgccggagcgtgcgatgtggcatgcggcggcggctgtacggcgcgaagctgatgcgtgaaagaaggctcctctcactttggctttctctccgacttggcgcgcgtgcgggtgacaatcgccgtcccacgcacactcctggcctcctgggctcctggctgctgctagtctgctacggcgatgtccggttagttatgcagctacttttcagtaatcagtggcttggtttacagccagagaaaccggttagatttttttcacttcgatatttttttcagaaaccagaacagacaaagagggcaaactgccgtttcatttcttctttcctctttctaggtgaaagctaagctcggaaactttcttttttgcacgtttgttgccgaaatttttgacaaattgatcctcaaaacatatttataaaatagatcgtatcgaaaattaattgtaaagaccattagcgccaaactaaggtggcacctatttgccatgtaatctaaactcagcgtcacatgcatagcccggctgtagagaccttttgtttctacccaaaggttcaagacttgaatctcctgtctccctttttttttcactaacgtagtagcgtggtcctcatctagttcaagttttaaagaatcatatgttatcaattttattgtatttttaaacttcgaagttaaacttaccttacataatatttatcctttttgtttctttacgttttggaacagaatcttagcatcaatgttttgatacgatgtaagttcttttttcaaaaggatatgtcaaaattttggcacttgttggcaatactctttttttctggccatgtcatgtttcattttccatctccaagaccctacatgggccttgctagtaccaccaatttatgggttttcagctaggaataagttcactttgtgaccctcaaaagtgatcgaaatctaatccgtgaccctaaaccgcaaaaccggatatctcgacccctcaactcttaaaaccggtgtcatttgactccctcggcggttttggagggcgatttcgctgacgtggcgcctacgtggcagtattgactcggtcttctttccatgtggcgttgacgtggcgcttaggtggcattagaaataaaaaatatgtgtgggacctatttgtcatccaccaaaagtatgggtgggacccattgacatgtggggcccacataaaaccatgctctcctcatcctccctctctctcatactcttcggcgagcggcggctgagggatgggggctggcggtggcggcaacca

SEQ ID NO: 313 - DNA, 21578 bp, Oryza sativa
ctttccccacgccgggatcgagctccggggaggggagctgcgagctggtacgtacgcttgatttctttccttgccaccgcgatattccgatgtatccgtgatgtgtcgttcatgggtagatcggctagggatttggcggcgttgaggaaagcgatggctgaggggtggggggaattgttgtattagactctcgaagctgatatctggtgtggatttgcggtggaagccatggtcggaggcccagtgccttccgggagttgttgggttatcgggagcccggagggcagtgcggctcgccgactgctgccatgatccccgtcggcaaaatctccagattgggggagatggggggtaggaaccatttggattagtagtgtatacacggggtttcgtttattatatttagagcgctctacatgtagacagcacacagcagctttaacgtatggatggtgtatcgcagggaatgtatctcgaagacattggattaggctattattacatttagagaaccagattgggtttgcgataactagaaattgagtctgttatgaatttattgatggagcggacagggaattacgattactatctgtttagcttttcagttgtgaatgatgattatttcaatttagctaatcaaggttcctcaatcaaaccgttctaactttttctatttatgctcttggttacattttgacagaaacactttgtcatatcagtcaacagtagagaggagaccagatgcaggtcagttctaattcatctttggttgcacatttcttgtatagttagttaggtatgtaatgtgatggccaactcttaatcaactaattattcgggttatgttttactggtctcactgagacgtccatgctaaggtggtaacatttaataggacaatccacatttggcagcaataactgtactcatcttttcctttagtaaacggtttggcgcctagtatagggctcgcgtgtttgcatggaagagttggcactcggtagttggagagctttgccgacggttaccaatgtgaccagtactggtttttgtacacccatactttcttgtcgtcatacactagcaaaagtttgtgtacatcccttacttttactaatggctcaattatataacttgatttacttcactacaataaaacttataaatgtttggaagatcatgtccaagagactttcagtattattgttaactggaatgagcttaactactactccctccgtttcacaatataagtcattctagcatttcccacatttatattgatgttaatgaatctaggcatatctatctatctagattcattaacattaatatgaatgtgggaaatgctagaatgacttacattgtgaaacggaggaagtatgtgaattgctcctttagtttggttcctaacatgctatctgaatgtcttcaaaatattttctatcgaaaggcatctagagctaggctctttaaggagtataaggaggtgcagcgagaaaagtcagctgatccagatatccagttaatctgcgatgattcaaacatattcaagtggactgctcttatcaaggtggtttttatattgcaacttgcaaggtgatgctagaaacagcaatataagtttttaactaatgccttttctgattgtatatgttgttagggcccttcggagacaccttttgaaggtggtgtatttcaacttgcattctctattcctgagcaataccctctccttcctccgcaagttcgcttcttgaccaaaattttccacccgaatgtgcatttcaaggttacttctgcattgccttctctgcgtacattttactttaggaaatttgacctatttgaaggcatttgtctctttcaagtgttggtgagaatgtaaatatgaagttgctgtcatcttcttcattttatcaggttttcctgtaacaatctgaatgtactaacatgacagaatttactgtgtagactcaactgtgctcttcctgttattgtttttgtcaagtcgcttctatattgttacatctgaattaacagaattgaaggagtaatttcagttatcattctttttaccttgtttgtgtttccagacaggtgagatttgcctggatatcttgaagaatgcgtggagcccagcatggacactacaatccgtttgtagagccataattgcattgatggcccatcctgaaccagacagtccacttaactgtgactcaggtagctccaccttcctactaattctgccacatatagttcagccattattttgtaatgtgaaagtaatagatgttcatgctctcactgaatcaagctatggtgcatgaagatttccatcttcgaggcctcaaccactccatgatgtgatctttttggagtagtttgagacatgaaaatatttggttctaattattgtcacatggtacattagccagttaaaaaatatggagaaaaacttggctatttactctaatggagcccctctatataaccaaaggaattacgtgataattgatatggtcagactccagtatcaccgttgtcctaggcgagggccaatgagtcccaggacgaggctgagtccacctcgggtggcgggtgtgcttgggatgctgattagattagttcgttacattgaaatagtatatctttccaattgttatctcttcccagttagagtccaacttgtaagggccattaaaaggtgtttgctacatcatcgcgagtttcaagttccttgtcctcattctttttatgcctcatagttccatgccgcctactctcctgggaagcctcatcatccacatgtcctaatcttccgcacacaacagaagaaactgatttatgtagttacaatatttaattttgaggcggtcagagaaaccattcctgctgatccattttacgcaatatggattgaataattgccttgtaaatatttcattgttggttattagcatttatactaatgagctaagatgtgcagtgtcacttatattgtatagttcctcattatgaattagaatgtaattttcccagtaaatttgtattggtcccattcaccgcctcacggtttatgtttgagattttttcagatggcactttggtcacattgcatccaaaatatgattatcataggtcaaaattatgaattactgtatttgataacttagggagctcttgtgtaatttcatcatctgatgatcatatacagtttgtcgcttcaagcattttgcaagtccgatttctgattgattatatagcggtttaaattactttttcatactttttacttggttgtttgaaaagaggcctgctgtgatattttaatccttatcttagtttctgctaattttcttccgtaaatataggcaacctcctgcgctcaggcgacatcagaggctatcaatccatggcaagaatgtatactaggttggctgccatgccaaagaaaggttaactccagggtgcaaaaggaaatatgcgccaagcgaaggcatggctgattcatgtgatttgctctgttaagtgtaactcttactgtcaccatgtgaacatctggtacttattttcttacctcactcttatggatgtatgccctggagtgaagagaagaaaaacatgcattgtaatgcttggtctatatgatgtcataaatataactgggttcggtacttctaatgcactgtccattgttcaattacttctcctctttttcctgtccggataaaagaagaatacttgtcctgtatgtttctgaaatcgccatacggctcctataaaacgccaggttagagccgcactactctaatcttctatgatgctgtcacgccgagaattcctttcatatttgctggtgttcagtttaattaacgccgcacacatacagatcacccgttgttgtattgcgagcatcgaaatcaatcaacactatatatgattttattgttatcgattgttccaatcgaatttccactgtgttacatgacttggagtcttggaccaaagaaaagaaaatttcctgatcagttggtatcgctggaaaacaacctagtgggcgcacgacgcccgttcctcgccatcgttgaagaaggcagactgcatgcgagcgactaggggaacgccgtcggaggcatcttcttgtcagccaagaagtggctgaagaggctgagcgcctgcctcggcgcgtgcaggggaacctcgtgcccggcgccgcggatcgtcacgaacgtcaggccctcgtagaggatcgtccatcctccaacctgcataaatggttcagtttgatgctcacaacgacctgtttctgaatatttctttgttgtaggatggtttaattacctgctgatggtcgtaccacggcgtccactcctgcaccgtcttcagcccaagcttgttcagggtgagcctcgtcgacgtcacggggatccttccatcggtgtcaccgctgcacccagtgaaactcattgtcagctcaattcaaacgccatgcatctattgctgtgtacacgttgttcagacatgctgaagtatactacaaggatgtttttttcacctgaaaacccagaccctgatgccgccggcgacgagcttacggatgatggggagagtcgagaagggagcatctctccacttgccgatcacgtcgctgcaacaaacacaccgtcacaaaacgattctgtcaactcaaagcttcaaagactcaaaagagaacagaggttgcaaacgcttattgtttgcacctgcagtgcgtccagttgtagccgatattggtcacgttggcgtgcagcgcctcctgcacgtcagcccggttgaagtacacctcggcgtgatccgacgtgcacggatcgtaccccgccggcctcatgtaccacccatgctgttacaaaatgacaccaaaaaaaaatcatgttgtttcttctctctgaaaaaatgtgatcgttctgtgtgccgatgagttgcctacgcacgtatttggagaagatttttggggcggcgccgtggacggcgacctggcgctggccgaacgccgccgacgacgagacctcggtgcagacgggggtgtagaggctgtacatgtcgatgaggcggtacacggcgaagtactcggtgagcgcgctgtcgcacgcgtcggtcacgttctccatgctgaagttgcagtacttcttgacgtcggcgtacacccggtccgagatgacggcgtggtcccaggcgtagtcgatcatgcccgtctggtccgtctcgtcgtccatcagggcattccctatctgcgtcagagtaatgagacgacgtgatcgaagaaataaaattgtatgagatcagtattagttcgaggcagaattgtgtagctaccatgaaacccttgaagttgatgtagttctccttggggccttgcttgttgccgtcgaaaatcttctccgaaagctgtggaacgtaatgccctgacaataacgcaatccgggaataatgagctcgcatcacgattttttcagaagctagatgctgaagtgtgtatgtgtatcagttcagttaccagcgtagctctctccagcgatgtagaagtcgtgagatttgtactgagggaagcgcttgaaccagttgagcaggaagatgtaagcatcatcagctgcgtgcatggcaatccgagttcagatactgtttggatcatccaaaattgaccccttttttttatcagagtattctgttgttgatgtagaggttaatttaccggtgatcttgtcgccaagctgctgcagatcggagcttgtgttagtgtatgagaagccgacacccacaggggactccaggaacatcagattggcctctgcagatttttaacagtgaacattcagttgtgccaaaaaaaaaaactctgaacccctgttcattgcgaggagtcagtgacagactaacagaatgcagggtttggcatgaacaagcagtacgtgcctttgttccacgagtacttgttccattttagctccggcttgcccttctgcaccaagaatggaccgagctcctccgcttctccatacccaacagacgaacacccaggccctgcagcaaaaacagcaacatttgtcatcctaactcaaacactcagtacacactcctgacgaagaattacacacagggtttttaagctactagctcataatcacgaacgaaaagagagaaaaaaaaaagaaacttcacatgcatggtgaacgtcgaccgttaaaacgttgcagagaccagtagatcagtcgtgtccatcccgcgcgagagacaacgacgcgatcacgagcacgagtacgacacggcacgggtcgccatccagtcataggccacaccacagcggaagcagcagcagccagctagcttagctaatggaccgaattattcgcgcatttctaacgagaaaccgagcttagacacagctcactttcgcgctcccgatccctttccggcgtcctgcctgcctgcacgtgaacgtgatccatctcattcgaccagttcacggcgtgcatgggtgactccgcgcgcggcacagtacgcagccacgcgcgcgcccggtgagatccagcaccgggccaccggcacaggcgcgcacagccgtggcccccgtgggcgctcgcgtaccgtcgtttcagatattttccccggccggcaaggcaggcagggaaggcaagcagcggcagtagtagcttcgatccgttccgtggtggggcgcgcccgcgggttgggctcgatcgggcacgcgaggtggtggccgtgtcacgacgcgcggccggtggtggcgcatgcttttgcttagctggtccccgcccgtgtagcatgcagcagtggccagcggtgtgtagtagcgtacgcctccgcctcagcgcgccactgctcgctatagaagtagcgatgattggtggccggtggcccggtgtgcgcgtccgtcctcctcggtcgcgcgtgaaagcggcgccataccgaccgacccgctttgtttcttgtctccatgtacatgatactacgtggaccgttggtgatacggtgcgtgcgtgcgtgcgtgcggccgtgcgctagcgagcacccccgtgcagtcgtgctccgtatgcctttccgggtcgatgggtacgtacgcgtagtgcggttccaacttccatataggcagaaacagaaggcgacgacgagtgaacttttctacccttttactcttttagtctctggaagcttgctctgagctatatatgtgggtaaaagggaatcggcggcaccaacagctgacggttgttcgtttttcacgtgtacgtttccaaactatatgtacatttttaaaaatattttctgtagaaaagttatttaaaaaaattacgttaattcatttgttaagtttgttttaactaatccttaattattatacgctaatggatcgtttcatattacgtgcgaagagatggaggttgccccaaccttcacctctaaacacagccaacctctttgttgacctttagaattttaagaagtaattggtaaaaaaatttagctggtgagaatctagaaaagctataaattctatctatttattttctaaattatataactacatatttttaaaacctagataaaaattagactatttatgaaaagttttagttttgaaagaaaccgtagctaccataaattcctaaaacaagacctaaacaagcttgttttggtctcctctaaaaatattaaataataggttaatactgcacacaacagggccaagtttcctttaaaaaaaagaacaacaacaacaagaagaagagagcgcaagaacagtaagtgtctctcctaaccactaatcggactttgtcggatggtgtgtaattgttctttcctaacaaatcccaactaacaaccataactacatagaattttcaacgttactaggttctgactgacatatcacagatgcttcgacgccttctgattgagtgcaaccaaaaaactcaactgatgcaagcaagcaaaatgatataagcccccagaccacctctgccactttgcttcagatgctggcaaaaaccgcgcggcttaattcagatcccgatgaggatgtgaattgtgccggaagatcagcttatcgccgggaaacggacacccgcgaggccccattggctgcgtggatctccctttgttcccggagcaagctagctgctagcctggctcgtgttgaccatgccaagcaggattggctatccctctggttgctaccagcaaccagtccaaatgcagaaatccagcagcatttcgttctctagctgctgctgcagctagctcgcatggatcgcgcccatccttctcgatcgaacgggggtattcatgcagtccatatcgtggggggtccccgggcggcttgtcttggaccagctgctaggagagtacgatatgctcttggctggacagcaaatccgtctggctagcgagctagctcatcgatcaagcggatggattcaccggtacgttcgtgaggatgagcaggccacagtgacagtggtggacctcgtcagacttgttctgtgctaacttgaacgtgtatttggctaatttttcaaattggaggtgaatggggctcggtctgtagtataattgaactgggacaaacactgaactcaattcaaaacttaatcctgccttctctatctagtagattaacttatctcatatagcaaaaaactgaggcaccacaaattatactctggaccgtgcaaactttctcctaaagagaacaaactagctagttactttccaacccttcaattttccaactcttcgtctccggcgctttcgactgggacggcgcctcagagcagctacatatgtatgtgtcctctagttgtgttttgttactctcgttctgatttttttctaaagagaaacacggagatgagatgttgacatatgcaacgaataattacaatatgcgctgttggatgagattcattcggatagagtgaacattggagggtttcaggctgagtttgagaaagaggagatagagaagattgggaagatacgtaaaacgaggtgagctattagtgcatgattaattgagtattaattatttcaatttcaaaaatggactaatataattttttaaagcaactttcctatagaaaatttttataaaaaatacaccgtttaatagtttaagaagcgtgacgcggaaaaaaatgtgcattctatctccaatctcccagaacgaacgctgcctcaatcacaggtttttggaagccgttcaggggaacgcccggttttggcctcctaaactagttttagcatctgaaccgttatggtgcagacaatgattttcttttcagattttctgatagtaattttatttttgaagagttttagacaataaattttttgagacaatttacatttttttaaaaaaaggataaaaaagatgaattacatcaccagcctctgcaactaagatacacagccaattgaaggcgacgagttgtagactaactaactaatatttctttttgttacgtaggcttcaatttgcacaggaatattctggccagtttttgtgagcaatagccaattctgaatccggtgatcactgacaatggcgtacctggctcaaagctacggccggagctgggttacgcgtgtggctgaatattgtttggcaatgttatgcaagttggtcaaataaatgtgataagtcgactgtacattagccattgaaagagactctacgcaattaaggtgtactcttttcgttctaaaatataagagattttgggtgaataagatatattctagtattacgaatctgaataggctctctgtccatattcataatattatcatgtgtctcatccaaccaaaatcttttatatattttaagatggagggagtaggagtatgtgactaaagtaggtacttcacttgagttagttataatagcatacagactattactccatgaaactgccaatagtgaattatgctagctggaggacaaccatttgatgggatagcagatggctcctcttttcgcttgaaatgctgattaattgattggttagttgggcatggtgattgtactatgatagacacttgaaacatgcattcacttacgacatgtcacaattcacacatactgatattgtcatctctacccgagcctcttaatcactacgatatcatcaatgtatatatacttcaaaacattaaagaagaaatgtctagtttgagttttagaggtaacgagaagatcacatcttaggattagtcgattagatcattcccagcaacatttttatagaaaacccagtatcatttttgtgctccagaaaacctttaacacccagcgattttaagttcttagggtaattttatcatccttaaaaagatactagacgtactactctttttagtataaaatttgctgtaaaatcttcgtacctccagatactttctcaagaagtaaaaaaattctctcttacgtaaggtaaaaaggtatcatactttttaatattaaagatacctggcacacaaaatttcgcactaaaaataattttagaacatttcggaacttcgaattttccttaaaacactccgttagaaaaaagtgagatcgccattctatcttcattcgtaattaacatcaatataaatataagaaatgttagaatgacttaaattgtgaaacagagggagtgattaataccgagttaatgcgcacacaaattttgtggagcaaaggcaaatggcagttggtggtagaagtggttaattgtgtgtcgagtgctagtattacgtaccgccgttgagccagaggacgaggggcttcttgtcggcggcggcggtggcctcgaagaaccagtagaagagcgcgcggccgtgcgtctcgttcaccgtcacgtacccggcgtactgcgcgaaccgcacggcgggttgccccggcagcctcgtcacgcggtcggcctcctgctgccgcgcggcctccgcgtccagctgaggcgagccgccagcggccgcggcgcagagcgagagcaacgcgagcgcgaggaaggaggaggagacggcggcagcggtagcgccggccattgttgtgtgtggcgcgctgtatagctggtgcctaccgtaccgcgcgctagctgctgccggtgcatcgtcctcggcggattatatatagagagagcaggagcagtgagcacagtttgataatgacaaaatttactaaatacattgtttactatcgacaaaatttgatcaaataacctctttgtgatcgcattgacgacataggaaaaatcctcaattctaacggaggtatatgaccaaatatttaatatactgtaattggaataatattgcaaccgtatcctgcttacggctactccagtagagtttacatagccgaggtgataagtggagcgcttctaaattataaatgaccattcctcaatcctaggatatatgatactccattcgtcccatcttaaatataactattgttttctgcgtctaattttaattgtttatcttattttttttaaaaaaaaattaaaacataagttacgagtaaaatactattgatttttatcatctcataaaaaatactgattataatattttttaaataagacggacgatcaagttgaacacggaaactcatatttacatttaaaatagaacggagggagtagtacaggatgtttgtctgacacaccaacagaatttgggagaaaacgagaaagcaaatctaaaaattaaggcctgggtatgcatgtacgacacatatacacgtaaatggtgccgtatctaaaaatactaatcgaatgaaattgctcccaatcagaaaaaaatacaaaagttggtttattgaggacaacggatcgaaatacatactatgtgtttggtttatttaaactttagtctaatactcaaattaaaaatatcccaatgcttggacttcctgaaactcaattcaaaattgtgtttggtttgaccgagcaggaattttagaagatttttagttgctataattaaaaatacccctatgtttggttttatgtactcttgtgctcactctggttataaatatttagtgtttataacaaagttcgctcatacctttaaaattccgaacaccaataatttctcacatgcttaaatttaaaaactaaataaatggtttaaggttgttattgaatgttcatactaaatatttgttggtgctatctatactacttataaaataacaagttttatacttgattttcatacattttaattctttttttgcgaggtcatattttatttatgtcacactggagtgtcttttttttgctttgattgtcactagttaaagccctttaatgagtacatatcattatttgctttgattgtcaaatactctgtttcatgttgttattgtactctacgtatgatgctcgctgcagttaatcacatactaaattcgttgctgatacgctttttttttctccagagagaatcacatgcagtgctttttcagtaatttgagatatcacagcattttttttatctcgtactgcaaagcaactattgagtggcaagcaaaaattgttcataacttgttttgagggcagtacatattcgaagctgtcatgcagatatcttccgtgcttgtttactaacttcaggagatcataaaagcagtctctgaacttgacgttttgtgggtggatttagcgtgtgcagctaacgagtaagaactgagatcagtgttttttttttctgtgtacaacatgccaaaacattgcatggatgacggaaagaacagtattattttgagattcgaagttctggatgaactttgcgccggcctgacagagctttgccggacaactttggtcttggcttcgtcgttcaaaaaaaaactttggtcttggcttcgctttttgtttcaacttaaattttaagctaaattacagtaagaaggtgtgcgtgtgcgcagtatgctactacatcgttttgtccgtttggaaattacagagaatgcacttccaagctccaggaatcgattcggcatttcggccggcacatgtctttcctgaatgtttttgttttgccaaaactttttttttacagaaaattcgctccctgcaatttaggcaatttggtaaatcttgtactaagacaagcaagtcaggatgcttaattttagagttaattttgatgtttaatttactttttttattggtttttaataagtcgctaaaaacatatatatatatatatatatatatatatatatatatatatatatatatatatatatatatatatatatatataagttacattgataagtcatttttttccattaataagtgtgacggctgatagaaaacgatggagctgttaactgtcaaacttgtattgggaagagtagggccgcatataaaaaaaaattcctaagttatcaccagaaagatgggctatcaagattcaagcaggaagcaaattctgatttggtcaacagaatgtgtttttattctatgtgattagattgaatacatctctctctctcgtattccgtgcaaaggatgatgatattattttttttaaaaaagagagaagtactataattctagatttcttaagatactgcaaataaatatttcttcacaatgtttgtacttcaaaaaaaaaaaaactccacgatgataacctaagaattgcacatatagcgacatcatcactgaaaatgtagcagtttcagttgtgacttgtgggcacaaaccaaaccattcttaaacttaataatgaagcaaaatgtgatttggcctgaatatgtttgttctagatggttaaattcaatactatatctcaaaatgtaggcggtacaagtctactttttatatttgacaattaatacacgtggaaaacatgtaatttggttacatagaaatagtattggccatcattttttttcttgagtaatacttatataccttaatatgctattataaattgtacttctaaaacttcgacaaaaatctaaaacatcctattatttgtaacaggtgaagttcagcaattaaaaacatcccttatgctcgaagcatcaggattctttagtatgttttaaagaaaagttcaagtaagaaattagatattcaaggaagagaaggcacgttaaactaacaagtcaacagctcatctcatatgccggaccatttaggcctggtttaattcccaattttttttccaaaaacgttacattaaatctttgaacacatgcatgtagcattaaatatagatataaacaaaaactaattgcatagtttgtatggaaatcgtgagacgaatcttttaagtctaattagttcatcattagctataagtgctatagtaacccatatgtgctaatgatggtttaattaggctcaaaagattcgtctcgcggtttccaggcgagttatgaaattagttttttcattcgtgtcaaaaaccccttccaacatccggtcaaacatccgatgtgacatctaaaaatttttttttcgcgaattaaacaaggcctgaatcaatcatgatcgtcatcccctcaagaaatctcattagttgttgtcagtatattgcaatatcaagctttgatcaggtggagacaaactccgaccgaaactaatccccaaacactagctttagtacaataatgtgtctcgttgtgctgttgctaacctattttatgtcaacacgttgcgacaaactgacagcaagcttgcttgttctctcaataatttggttttttgttccattcccaaatgagttggcaacttaattaactcgcaggaggatagatacttcctgtaatgataaacttgatttgatgctcttcatcaattgaatattcagctccaacagaaaatgaatattcactattcagcatgttgccaccaatctgaacaagtgatgctcgatgtgaaagcgaaggcacaattgcaaccccaaaataccggggaacaacacaagatttaatcctggagatcataaaatacattggccagctaacttggtggatagtcttcctccgagcaaaatcaaaatcttaaggcttcccggagtaaccatttgaccaaagtacatttcttatcatcttagcaaagaacagtgtgttctttcagaatcgattgagatagcaccagtcaccaggcaagcatattccaaggagatgagcagaaacacgtccatctgcagacagcaatacagcatggttcaatggagtgcatagtcagcagtcaacttgcatacatgacattcagtgaagcgggaatttcacggaagaacgggtaatgcggcaaagaaggcacaattagataaactttggccatgcactatagcatgagttcagttcaggacagatgagcaccacaatactggatacccatcatgatattgagcaacttgaagcagccctaccagcactactactactactactactctatatgacgatcatctcaaaggaaatcactagataagaaataaaagctgtatttgctcatctttcatgtttcagatgtatggatggctatagcaccactgcaccaatgaactaatatttgcttggcaaatgatcaagaaaatcaaactatcaaactactattggactctatgccatgatattctaatcttgaaatgccaaaactagctggcgaacattctaggacaactctagtacttgacagtcagattaaaaggtaaatcaattcaataaggaaataagttttgtacttgttacatataagaaaacaacgaaaggcaggcagcaaaaatgtcaggattcccttttctatgcacaaccatatgatagtacttatttagcaaccgtaatgatatatccataaccattgatgaattatttccccgtaagaatattgggattaagaacacatagttcccaggactaatgaccatgtaactggtagtttggtactcatattttttatgcattacaaaagccttgtgagaagagtatagaacaggcactctaccaaaatggtaattaagatcaaggactccagatgagcataataaaattgccatctcacttcagaagctaaatcactcccagttgcaatttgccgatcgacaccgggacaaaaataattgttagaaagcaatgcaggaagaattgttacaggctcacagctaagatgtgcaaaactagctccatcgtctcttatcctcttcttcatcaactgggatataccactctggtcgcttcttcgagttgctgtaccggtagttcaggaagagctcttcatcacatatggaccttgtactcaccagcactagagtcttcagaactggagactccccttcctgattaccagaacgtccagacttgaaccagaatgaaccaaatcgtttcattgtaacgggctcttcttcaccaccaaaagtaatgttagggatgtagactctcatgtccttctctgtcaatggaaaatcatatgggcagatcatgacattgggagttgacccttttggtggatggtttgcaaagtgaccaaaagcgagtgggtttcgtcgttcaagcacttccccaaaattttcagtgtgacccttcttcagaggcttgctgagcatcctccatgccctatcagagttgctctcttggcttttggatggcactgcattgtaatccaccaaatctgagccatcccatatttctctgctatcaccacctaattgccatggtttggcatcaattattgttccatcataccttgtgatcagatagttgttgcacgcgtcgatttttgggtatccagggatatatcgataataagcaggtgaatatacaactccagggtagatggctaggacagcaccagcattagtttctccagataagaacagaccttgccctgcatctttgtgagggatttgtgacggcctgatgtcaagggtgtattgaaagtgatccctaaatttatttgacaattcagcgcgatttaaaggcctagtagaagggacatctgcactgcagagtaaatggatcagaactaagcttctcaggattcaactcataaaaggaaatatgtaagtgtaactgtgtctccaaatgtaacaaacatgatgaacacaaaaatttcgctgcaaacagagatatggggttaacataatgcatatacttatttctgtttagcctacttcagcagcacaaaattgattaaggatgttaaatcatggtacgtaaaactgaagcataagcgaagtacacaaaaataggcagtttgctagccaagcaagtacttgtcatatctgatgaacaatattatacttcgtccctttccaacgaatgatcaagatttgaaatgaaaacacaggcactgtactgtgattgtcatatttgaactcagaagtatgctttggtgcaaaaaaaaagtcaaaagtatcagttactaatggtacttatgcaaacacataatgtactaaccaattttgactgatactgtatgcaagtggagaactgcggatgtactaattcaatgcatttagttagaacaaattacctggcttgtttgcagatgcaactcctgtgccaacagcgaaactcaacccactacgccgaggataattattagcttctgaagcaccattttttgtatcaggaagaagaatgctatccattgcttgacacatatttgtaagttgatagtgaacattctcctgtacttgcttctgctgctcagaaacagaagctttgctagccatgtcaataatctcctctgcgtccttctcttcagcattagcccccaaacggtaatagctgagcacacatcgaaaagaactcaggttaggaaaatagtcatcttcataatgcagttgaaaggctgtggtgaattaacattttgaacatagtaataataaatcatatattttagtgggatgatccgccagttgctgataacagaagagtttgaaagatgcacatgtctaaccaaagggtttcaagaagatcaagtgtgtgtagcatctaaactatgagaatccaacgactaccttaattgcttttattgcttattagaggtttacattatttaaactaaatttgaaatagtggtttcaggtgttcgttatttacggaaacacaaaaactacatgctgcatacacataactggatatccatctgcggcatattacagtgaaaaggaactggtatttttcttcagatattggcaaacctggtgtagagaaacaggcgatttacgtcagcttcgaattggagatgccttggatctcgagcaaacaatcgattgttagcaaacatcggattcttagccagtgttttgacagcctggaaatgcatcagttaatgaattggaacaaaaaaaaagtaccgacaaaatgaatatcataatgttgttcgatgggacaagcactgcattcatttagtcatttgagtcggcattagaaagagtgtgccgaagtcaagcacacatcacccgaatcaacacaagaaagtgaagaaattctacgaaagaaaggcagggacgacggagagcgcaacagaggtaaaacaatgacttgcaactatacaaactagattgcccacagcctagttacaatcaaaatgccaccagattccacaagcataaacaaaaaagaaatccgcgtgttaaccggatccacggcgcttctctcgctcgcgcaaggagcagatcgggatccggaggtgatggtttgcggggggatgtagacggcgaagagagaaagcgtgtgtacctcttggaacctgatgaagagggagcccatgcctgctttggcttggcttggctggcggtggcggccgctggccgctgtgcttgtctggtcgcgcgggccggggcgagaagagcgcgacgacgccagcggccggcgtagcggtgaggttgagagcttcgggaatcaggaggcggcgatcagtctactggtggtgggtgagaagaagggttttggcgtcgggaattgggccgcccccacatcttcgtggactttagcccgttactgtttgggtcggctctgcattttattttatttttactttttgcaattagctgatctttttccagaacgaacaattacctgattttaacatttcgggtctcatcggttacctaaaagcttattataggttgtaatagattattagaaaaagataataatttatgtgtaagatttttatatgtattcttagcaatataaaaaccaatatggaaagagaaattacgttgagaatatcttaaaattaagttttcaaatttaaattttgattttgggttattctttttagggtaaacgatggggctcgtagacatatgctgctttagtaggaaatccgtaaggtatatgaacgaacttctaaattggagaagaggatatttataaggatacttttattatgtaatacttcctccgttccagaatataagaaattttagcgttggacacggttactaagaaagtaggttggacacggttactaagaaagtaggtaaagtgagtggtggagagttgtgattgaatgagtaatggaggtaggtgggaaaagtaaatggtggaggattgtaattttattggtggaaaaattgttatattttggataaattctaagtgctaaaagttgttatattttggaatagagggagtagcaccttgcatgaagatgctatgagagggcatggcgcattttctacatgccctgatgcttagattccagtaccgaaaggaagaagttccatgtttcggacaatggtatttgtatccatatacttttcttgagccgtgcataatctcttcctaaattagttaagcatcaccagcaacagtgctatttcctgctcgtttgatacgacattgttcttcacataaccgatgttctattattctcagtttcctattcgtgcttcacttattttaaattagtctggataatgaaacttgctcttcactgaagcaaagccgcgacggcatgatagtcaagttgggaactcctcgtagttcatcaagccaagcgaacctctgtaatcggttaagtgtgtggtatgttcagggaaaccctgggtatgctccgatgatgaaactgctctgaaggacgtaatgtcctcattaaaaaaaaactaggtgttcagtgcaaaaggctaaagtaaccagacattggattaaaaaaaagtcattttaccagggcgaaaggcctaaccaaaatggcatcagataaatacacaagaatggaatttcaaacatgtcactatggaatataccggtaagaaggtatccatttacatcagaataggtggatatggtgaattggtgaatcctcaatttgaaggaccttacagaatctccgtctcatccaattgtgttcatatacaaatcgattacctgcatttggactaaaccaagtatgtgcaggtataattcaatgatccacccatccaggttgggatgaacaagtgatcgtggaacctctgctttcccgattcatacgatgatgctctgaagttataaaaagcatcaggctccatgcctgttaagccccaagcatcaattcattaaaaacaatccacttctgtaacttggtctagttcatatgcagatcatagtttatggagtactacataaatgcaacaattttgatcacagaatagtgaatattaaacaaaattatgcaagtttgtaatataccaaacttgtcatgtttaactactttaagattcagatcatctttcctagcttcataagaatcaaaagtcaaatgactccttccgctacaatgcccagaactgcaatgatgaatgtcaaaacactagtatggctgacatggagttccagctcaaaacttatccagatctaaattgattatctactatatgtctggtgaccaaaagatggtcaaacctttcagctagtttacatcataaacccttttcttattagtcgattactccagccatctatgaacactgtgctccattatctaaaaaatgaacactgtgctccattctgacagcctaacaaacaagtctcaagtaagtaacttctgaggccctgtacagtgctccccttctgaaatataaaaccagctcggctggcttaggtttaaaaaaaaaagtaacttctgaggcttcctgtgtagtcaggaaactgaaaataccttttagtgaatcagaacatcacagtatcaatcataatttttagatagcacacaaattcatattgttttgatagaaggcctaaaccaccagggcaaagtaagagacaatcaactcccttaaatcaaacaagaccacactgaatgatcaacatggacatcttaatgaaaactaattggtcactgagacaaccgaatgaacatatacgctctaacccctaatgttaggcagaacgcaaaactatgccttggcaaggaggaatttgcagttgagatacaacaatacaaaggaccttacgaagttatcagtatggaaggaataaaatttccttagatttgcaataaatatcagcagtagctcaattcaggcaatcaagacaacatgtaaggagccgaacacat

SEQ ID NO: 314 - DNA, 1736 bp, Oryza sativa
acagcacagctagtgctcatataaaggatcaagaacataactaatagaataacaagttggaataactcacaatagcatgtacatgacaaccataatatatacaaaatagaaatgtattccaacaatgaagccaatgtaaaaggttacctgtagacaactccaatgttcggagtcaatgactgaatcttttgcacctgaatttgcatataactatgtattagtgcttctgagaaacaaacaacgaatagcatgtcgcaactcactaaaagaggaattcagcattaagagtgatgttagacttacagatgtttcatcgactaaaatagaaggcaatttcttctcagtggcgataactacaccattagcagctgcaaacataacaaatatacctcagaatcaataaactaggctaaaagggaactgaagagaatcaacagactgtagtctctgagcagtaactacacaaaaacatatgatagaacaatctggtaaaaacatatgcagtatgttctacaccacaaatttattacatacaacaattacatctatcagcgtgaagaacgcatgtcaaatagtttctttcaatttttcatacaccaaaacaaaattcatgggctaaaaccccaagactttaaattgcataaatactgacaagtggcaacaaaagctgattttaagggtatgtaaacctaccagtaaggtggacgttgacagggcaaacaaattagaattttgcactgatactaaaatgggcttccaaaccctaataggcactagatcagactgcacacacatacaactactaatgggaaaactaggtcagcatatacattcaacgccgtaaattggcatagaaaacttcatcatcacagatgaaaccaagcagcttgtatttcttatgtggttataaaggggagcacttgccattgctgttacaagacatacatttatgtagattaataatgattttccatggaatccacaagcatttgtaagcgaaaacgaagcaaacattacaaaattcccaagtatcactaaagcagaatagcagatgcaagtaacatggcacctattagtaacctaagccgtagcaaacttcacactccaggtctccagaacaaataaaagctctgcaacgacctaaagttatgcgaaaagtgcaaaatccccaacaagcgccacttcgtcatgtgaaccgaaccagccaaaatctcaaacctcccctccccttctcgattctcataacgcaatagaagtatagagaagggattgcttcacgggacgcacctttgatcccgagggacgtctggccggatccgaccgcggtgagcgcgtgctcgatctgcaccagcttccccgacgggctgcaaacgaaatcgccacaaaaaccacagatgacgaaaccgaaaccgcaccagatcacgcccgatctccgggcgagggaggcgcaaggcagcacatacctgaaggtggtgagggagaaggagtactggctgtctcccatggccgccgacgcgcaggcctacctgtgagctgctgctcttcgtgtctcgcggcggaagaggaggcgaccgagcgagcgattgcggcgagacggcgtgggaagggagagggaggcagagcacaactcgccaaggaagaagaggagagagagaaagagactggatggatggattgctccgcaagaaggtggtgggtcttgggccggaaatctggcccatctgttattgggtcag

SEQ ID NO: 315 - DNA, 592 bp, Oryza sativa
cataatgtagaattgtcccccacataaatcacgtcgaatttctcgcctgcagcaccaagtttgagtacggcttttaaaatccaagcgtgtagtttatttcgctgctcgggcgtttgtactgattcatcattctcaatatcgtccaacaccaccaagtctggacggtatgcgccgtgacgacgtccacgcaatttttgtcccgcaccgactgcttctactttctgatttttgctagttaaaatagcccctgcacgccacaccttacccgcactcaactcggggaaatcaatatggaggcgtgggttgctttcgatttcgactttaatcgcttcgagcataccgtaggcttgctctttcgtatccattgcaataatgatgtatttttttagatcagctaccatacaccacagtgggaaaagctgagtacaaatggttgattttgcctcaccgcgaggtgcagcaattgcctgtcgaacagatttacttaattcgccaacattgactgaagccggcaaattctcgaaaaggtattcgtgcaattgagatttgtgctctgaacgcacataatgcggaaaataattttgcacaaaaa

SEQ ID NO: 316 - DNA, 10846 bp, Oryza sativa
aggcagagcccctcctccctctgccgccacgcccccgctcccctcctcctttttcccaaagcggcaaggaggcaagccccttttctctccctcttttctcctttttccgtcaccgccggcgtcatcctcctccctccgccctgtcgccgatttggacgcgagcgccgagcgccagctcgcgccttgaccgccctaagtcggttcccaaaccgccattgccgcccttaaagccccgggcgccctccctctcttctccttccatcgcctccactccattgccgccacccccgtgctctgttcgccgtcgccgttcgtcattgcgcgtgtcggaggagccggcacgagcaaggacgcggaagaggactccgggcgcgccctctccttcctcttccccggcccgaggccggagagattactcccgcgccgtcggcctctcgtcactgcgcccgcccgcacggtagagcatctccccgttctccctcctcgctccatctccccccttagttttcggtagtagcttgtgtagcctccccgtatctagccggcgccgccccgaccgttgccgtcgctcgccgtgtgctcgccgccgtaaccgcccgagctccgtagcacccgctcgtcgccggcctcgctcggcgtagctccgcccaatccgacgctagcatcggattcccgtagccgcgtagatgctctcgccgccgggaatcggcccctcgtgacctcgtcgccgtttcccccttcttccgccgccggatgccgccgccgcaattcgccgccgtcgggcatcctccggcgaatccgagccattggctcatctcctctcatcctgtgcagctacccggtgtgcttgccttcgcctgtatcgccgtggttcgctccgccgctcgccgctgtcgtccgccgtccgttccggccggcgtcgtcgtctacctcccgccggcccgcgtggcagccacgtaggcgccacgtcggcgccagctcagccaaagaccgggtcgagccgatctcggtcagtccttccccgtgcgcgcgttccaccgcgagccgtgaggctgcgcgtgggcccgccgcatccgcgtccaccgcgcgccgcgcgcgtgcaccacgtccctccctcaccctagcgccgcgccgcgtgctccctccgcacggtgagccgagccgctgacaagcgggtcccacccgggaccacgcgtggtgagcccggtcaaccggctctctctctcctcccctcccgcgtgcgcgcgccttgggccggccggcccatttagctcggtcggaccgctccatttctctcgggccgcgccctagccgcccgaggaaaagtctattatccctccctctttcctttccttttcttttctttttcaaaaaggatttaattaaatcatttttcctttagaccaaaaatccaataatcttagaaattcaatatcttcccaaccgtaaacccgtttgactccgttcaacttccaaaattcctcaaatctcgagatctatctaatggcacgcttagaggtcattaatagggctttattttcgccgtttgttgagttgccccgtttcgcgtgtagtttcggagcccgaagacccgcagtgcgaggatttcgaggatcaagctccagatctcgagcaaggcaagccacctttgaacatcttgagcctatatttgaaatttaattatgttgcttgaaaaatattatgcattgataggatcgcacttaatctgttgtcccgtctgcaaggcagattggcagacctacctaatttgttgcatttgatccttcctttgttaattgtgataccatgtccccttgtaaccatccagttgcgtctcgatattcgtgcaccctgcgcgagtatcgacggacgccttcaaacttaaaatctgaaaaacaacttgggtaaaacttgggttttacaaaagacttggaaaacccgacacctgggtcggtgcttgcgaactaaatgaatttccaaaaccgcggaccggggaacgtaccgggtgtacggtttcccgctcttgcacttaaggaccgtttccttggaatttcatccaaacataagacaagtacgaccacatgggtggaatgggacacccctggctgagtaactagcttatcaggggagccttgatgccgagagacatgtggattcgccggggtggtgtcggggaggacccctgggcttcctggcacagtatggtctgggacctaacctgttgttggtctgggacccctctcgtcggcatatggtaaacctgtgtcggctttggaaatgccttgtcatgaaagcttggaggtctcccgacgtggctgatccccacgggctgggtgatccgggttagtaatgtcgtgtgggtaaagtgtaccccctctgcagaggttaacaaactgttcgaacagccgtgcccacagtcatgggcggatgtgaggtgattcctagcgtagttttgtttaactactgcttgtgaaattgctgttgtgaaaaggggttcgatgtttgaaaaatctgtagctaatggtatcagctaggcccgggtggccgtttgaaaagttgttggcccgggtggccgtttgaaaagctgttggcccgggtggccgttgaaaagctgttggccgggtgccaaccttgtttcaattctaaagactgatacattgcacatactccgaccggacgagatgcactgtctcatccgtgtcgtttgagaagcactcacttagttgtttcagaaaagagttcaaataaaatcaattgtaaaaacaacagtctctccttgaagcctgcattaaacacttatttcccctggcttgctgagtactcccgtactcacccttgctctatataaataatccccccagttgctgaagaagatgaagcggatcctgctgatgaagagttcttccaggagcaagccggctacgatgagttttagggtttcggcctagttcccaagtcgcgcctgtgatgtttggtcctagtcctggcttccgctttccttttgtaatgcagttgtgagctcggggtctgtccgcagcccaacatgactgtacctctactctataataaagagacctctgttgctgtgataatctgtcttcctgtgataccagcactgtttcctgggactggtatcgaataacaggttaatttggagcgtcacgggctagttccggtcggtactagttcggggcgtgacacctggcttgctgagcacgttaagtactcatccttgccccttataataatctatagagtttgaagatgaagacgtcgacccgaccgccgagaagtatctccaggagcaagccgagtatgaagacttttagatgtttcgtgcctagccccaagcctcgcctgtggaataagttagttgcctaggttctttgcctagtgcgtagtcacttagttgcttagtactccacgctgttcgtttctgcgccatcgcttttgtgtttttctgtaatgttgtgttgttcatctatgggcatgtccatgatagcaacgtttgtaaggactactacccagtgatgtaataaagcagtttactttgattccatatttattctgtgagtaccagctagtgtatcctgggactggtactatatcacaggtaatgcataacaccccggtgtgagttagctgtgtttatggctaacaaatgtcggggcgttacaaaaaccagtcaaaatttcacttggaatctacttccgtcccatgccaaaaacctcaaaatttcacagatttcagtctgcttaattttgtcgaaaacataaacccacatggtgggagggttataaaattatgatcgatataaccacaattagcttactttatcttcgttatttctatcggctatataatcaacaccgatcctataaggcaccatggcaaatccagggttgggattagtcaggatgggaatgggtatggtcgatccatttattcactaaacctatccgtaaatttgtcataacggatttttagggtcgctccaaaattataaatggatcaaatggcttaaaccattagaacctagatttaaggggttcgacctaaaatgacttcacatgtataaatgtttcaagaatttgtacaaagttacttctctatataataaatcattcctacaaaattcaactaaatttaacaagtttttatagtgtgaacgcgagtttaaaaattttgggtccgaattttacacacatgtaactataatttttgaatcttagtaatgcggcatatataggggggcatgtctaaatggcttaaaatttgtacaaagttgcttctccatataataaatcatctctacaaaattcaactaaatttgataagtttttaaaatgtgaacgcaagtttaaaagtttttaggcccaagttttgcatacatgtaataagaatttgttttgtctactagtaacatagatgatcaatttggatatccatgtatatcctattgatataatagacttatgatgaattgactctattaaaccatggataaatgaacttacttaaaatggttaaaccaacgaggctggcccgaggcggtcgccggctcgacagcctcccccacccgcggctcctcgacgtgcctctttccgccacaaccacagtcgacgacgtactcccctcgcgacgatgacatggtggtccggacggaggtggcaggggtccaggcgacggcctccaacgatgccacccgtgcaaaagagggtggcaagacggtggtcagcgcctaagcggcggacacggcgggcgttcggtgtagatggaaaattcgggacccccggtgtttagtgtttccgaagccgaatcggatcacaagttaagcgccgattccgaagcagaaacgggacgagacaacgggctatataaccacggggcaacgagtgcacgcactcagatcagtactacgtacgcacgctcgcgacgcgatcaacccaacccgatcctgcgacatggaggctctgccgcagatacggcaaaccctcagcgagatcgaccgccgcatccccgacgccctccgcgtcgcgatgggcctccgcttgcggcccaccgccggcgccgcgctggaggaagtcacgaggatcgccgcgtcctgcctgcctcggccttgcccggagggcggcgacgaccccatggagtgcgacaaggcggcgccggcgcgggcgctgcggatggaggccgcgtcgtgcttcctgcccgaccacgacgaggacacgcacttcgttcgccccgaggcaggcgtcgtcgccctggcggacggcgtcggcgggtaccgcgcgccgggcgtcgacgccgccgcgttcgcgcgcgccctcatgtacaacgccttcgagatggtcgtggccacgacgcccggcggcgcggggggcatctgcccctacgcgctgctggggtgggcgtacgagcaggcggtatcggcgcggacgcagggggcatccacggcggtgatcctgtcgctcgccggcgcgaccctgaaatacgcctacatcggcgacagcgcgttcgcggtgttccgcgacggcaagctcttcttccgttccgaggcccaggtccactccttcaactacccgttccagctcagcgtcaagaacgggaacagcgtcacctcggcggcgcgcggcggcgtcgaggtgaaggagggcgacgtcgtggtggccgggacggacgggctgttcgacaacgtgaccagcgaggagctccagcggatcgtcgcgatgggcagggcgctggggctgtcgcccaagcagacggcggacgtcgtcgccggcttcgcctacgaggcgtcgacgacgatgggcagagacacgcccttcagcctcgagagccggaagaagcaagggacgattttccggcgagggaagagggacgacatcaccgtcgtcgtcgcctacattgtctgatcatagggtcattggtgtacattctatgatctacacgggtgtacgtacgatctgtaggctgtagcatactaaattgcacgatcgatcagcttgtcgtcttgtcgatcgatgtctctcgagcaaaatccttgtattatgcggttgttaaaggctttattaagatttgtattaagtcttacggtgtatatacataatgatcaattccaggataattctgttgttcgttgttcgttctgttttattatgagaattcaattggatgatctaagataattaccgatactacttttataattcgtccactgcgctttaatatgagaaatacataatacaagaatttcaggggaacatattttattgtttgcatgttatccacataatcatgattttaaaatacagcatcaacttttttttttgtctaaaatacaccctcgaactttaaaataaggtattaccctctaactatcaataccgtgctcattactccgtcttaggccttgttcggtttggaggtgattgaaaaggattggaggggattgagggggaataattccacaccacaataggtgtggaataaatcccttccaatccatccctcatggggattaaccgaacaaggtcttattgtttagtatgatatcggggacaccacgtaggatgcacgtattaaaaagccagaaggccctagatgtcagacctacctctcccctatctttctccaccttcctgtgtcttcggctgttcggcatcctcagaagtatcgcggcgaggacgccattgacgacaatctcttcgatttgttcccagtcccctacccgttttgccgtcgtgctaaccggccaccgccgatgcaccgcccctctccttactccctctcctctccctccgctggcgaggatgacggggccagccccatcgactaagctcagataagacgtttttgacgacgatgtgtgtgtgtgtgcgtgtgtgtgagtggcggtgaaagacagatggggaggaagcgagagtggcgatggcagcggagcccaagcttgatgtagaggtgaagctcatggaggaggagcgggtgctggagcccgagttgacgttcttagctcaaggcgaatggatagtgacgacaaactttgacaacccaagcacgaagtagagattttgccatcatcgtgcacatcctcttctttctcctccgctcaaggacgtgctattgcagctcacccccgcaccttcaccgtagcgactgctgagccgcagtctccgctgctttctccatgccaacagctagacaaactaatctaattatttagaaccacttgtaaagagtggcaaatagttaattattcctcacatatgggcttggccaatgtagcgtccacatgcaccaaaacccaccttaacatctctgggtaaagtgtcatgtattgtgttgatagttgggtggtgtattatatctagttttgtagtttggcggtgtattttagacaaacgtaagagtttaggtgtgtgaaatatgctttttttttagaaaaaaaaagatagattaatacatgatatatcaattaaaatagtgcaagttaaaattcgagttcatcaagttgtagaaaaagaataaattaaattatagccagttaacttatatttttagtcaaatttatttttttctacttggagtaattctatcgcatattaatttatcttattttttgttttagttattttataaccatgtaaatcagtaaatgatatgtaaaatagtgagtgtgtatttccttgatagttcagatagtttcccaagtttcatgttgtgttgattgttagggcatatacaatggttatcaatagtggtctcttagcattgctaattagaaatatttgttgatatggaagaaagagaaagatgagagacaaaacatcgttgttatgcataacaacagcttaacaacgactcttaatcactataatatgtaaaatgaatacttttttagttaatgattagagtctttatcgtctcaactattataaagacacgtctctaaataatcttgtttaaaagaacatactcgcctctgccattaaaagtgcccttagccgtaatccgtctcgatctccgactccaactgcatatcggacagcatatcgcctgcagtgcgaataggactcgtataccgtttgccgcgctatttattaatggatcactgtctacgtagcctggcacgcgttccccaaaaactcttaaccaaagatggagaaacgtatggagacgttggagcagatcaaagagaccctgcgcgagaccagcaagctagtccccgacattgtccgcgccgcggtcggcctcgagcaccattaccagacagtcgagctcccccacgacgacggctgcgtcaaaagcttcgccgcggccttcttgcggccgcaggcgcaggagcaggcgcatggcgacggcgaggtccagcaggcagtgaggatggagtcggcgtcgtgctacgtgcccgaccacgacgaggacgcgcacttcgtgcacgacgcggccggcgtcgtcggcgggtaccgccgcagggtcggcgtggacgccggcgcgttctcgcgcgggctcatgacgagcgccttcgcgcagctcgtgacggcggagcccggcacgcccgtctgcccctacacgctgctggagcgcgcctacgaggagacgctggagtccggcgcgcagggcgggtccacggcggtcatcctctcgctcgccgacggcaacgtcctcaggtgggcgtacatcggcgacagcgccttcgccgtgctccgggacggcagggtcgtggtgcgctcggtgcagcagcagaggtacttcaacgccccctactacctcggcggccggcggggcgacgaaggcatgacggtggggatggtgggcgagatgaaggtgaggcgcggcgacgtcgtggtggccgggacggacggcctgttcgacaacatgtccgacgcggagctcgagaaggtcgtgcagatcgggacggcgctgggcttctcgcccaagaacatggcagacatcatcggcggcaccgcctacgagatgtcgcgctgcttgctgaaggactcgccgttcgccgtcgagtggcggaagcagcacgagaacgaggaggggcacttttacggcgggaaggtggacgacatcaccgtcgtcgtcgcgtgcatcgtctcgtcggattcatgacaattctctcttttgtttgctcggttttcgatcaccatcacaccatggttgatgtttggatgaatattaataccccgtttatgtaagtaaattctattactagttagggcgcataacagagcaaccgatcgagcaggccgtttagggctcattcggtttgaagggtatttggagaaaatattggaggattcaaattccttaggaattaacactactaaatcattaaaaatggaggattgggatataggaaaagtggaggaaatttttctacgtttttcatgtattccgaataaggcctaaacggccctgttgacatcatcgctaacaatggacagaaaagtgggactctcttcaggtcaggctgtcagccagccagccagtcagttgtcacgatgtcatcttagcaaaagagagaacgccactaaaaaaaaaggctagcccatgatgctccgattcaacattcaatcagacaccatcaactagcctcaaacaccatcgtcgtgcatgaattttcttggctcgagttacactttgctgatggcacgaagcatcaactatcatcaggggaactcaagagattttcataccatatacaacacttcagggataccgcaaaaggctggaagacaaatcgatgtttcagaacttgatagtgcacaaatttcctcccaaaatcatccataaagtgacgcacaaatctcagttacaacgcaagggaggaagaattaatctaagaattcaataacttgtacagcccaaaatatatcaccgagacttctgattcactcatcgtcagcacccatgaagtttctgcaaggttgacgaggggcagcatcaagaacagcagaggaaatccaggatgctggagcagcaatcgtagcagcaagaacaactgcgtacacaaaaaaaacaaccaatcaatcaaggagaaaacagagcaagatgagaagatcagggagaactaaatggcgcaggcaccctccttaccattcatccatggtcttgtccgtgaagtcgtcggtgttcatcgcctgagccggtgggggatccatcgccaagaagtccaagaaaaaaaatatgtgaggtgaggaagaaggcagaaggctataaaggctgggaagtaggagtatactagagtaagcaagagcaaagggacaaataggctggagggaaatgcagataagtgtggagcacatgggatggggtggtggtataaagaaaaggtttttgtcaggatttaaagtttgccctgtcgactgatgaattagcttttccgggttctgtctagtgggttcttaaaatgggtagcggtttggagttttgcagtttgcaccggcctatttggtgtcaggaattccgctgattgcgcatgccatgatcctcgattcagcttcggtgacattgctatggcaagtcaccggatgacataccgtgcatctgagccatccaaaacgaatccaacgtctgctttagttgggcccgcacgcaggcaaaaaaaccgccgttttcatccccactactggcgggagacgatgcccccaatttctcattgcgcgcgtccgcgagccagcggggagtgtcgccactgaatccgggagagtcgtcgccaccgtgaccggaaaggtgacaggccgacgaggtcgccgcgagtgtggagggggtccggcggccgccacgtgaggccggggccggggccctgccgtgccgccgcggcaggccgcgcgtgcaggtg

SEQ ID NO: 317 - DNA, 571 bp, Oryza sativa
ttacattgtgaaacggaggaagtatatgaatgtgggcaatgctagaaattcttataatatgaaatattcattaacatatatatgaatatgggcaatgctagaaagtcttataatataaaacggatgaagtacttggaagatatcagaagagcctgtgcaaaagtctataggcatgtcttgtaggacaatctctagttggaaaaaaagatgaattatccctgaactatcgcggtcgatcgaattacccctctgaacccgccagacattgcttaccctaaacctttaataccggacgaattaacaccctcaacccattccagagcggttttgtcctacgtggtgtacgcatgacaatcccatcaacattttttttaaaaaatggtgggacccacatgtcatacatcattttcccctcttcctctctctctcttcacactctctctcgctctcacgaggcggcgcgcaggggcaggaggtgggctgcggcacgagacgcggaggtggaggcctgagctgggtggctccggctggcggtgagcgctacgggacagtggcagaagcagcgtggaga

SEQ ID NO: 318 - DNA, 539 bp, Oryza sativa
tgctggagttgaacgggcggtgctggcggacgatcatggtggtaggtccaccctgctgtccgggagtgaagcgcggtcggtgctgactgccttggttggaccggaactgcgccgcctttcttttcctgtccattttgttgcgctgatcctcctggcggattgccttgtcaaccagcctctcaaagtcggcgtagtccccagatatcagttggttggtcagctcatcatccagacccgccatgaacttctcctgcttctcggcgtcggtgcggacatcctctggtgcatatcgcgcgaggcgattgaactcatggaggtactctgtcacagtcctgttgccctgatggagcgcacggaattccctcttcttttgtgccacgaccccatctggcacctgtgccttcctgaagctacggcagaactctgcccatgtgacctcagtacccggtgggcgggtggcatgtggttgtcccaccaagctgacgcaggaccctgaagctggtgtgtggcgaaagcgaccttctcctggtcattgcact

SEQ ID NO: 319 - DNA, 616 bp, Oryza sativa
taattaggaatagttttttagtttccttttgtctttagaaaaatatgtgtttagtgtccgataaggactttatgttttccttttatctttacgaaagtttctttcttgtcctacaaagactaatatctccccatgggtataaatatgtacacccggagtcattgtaaactatctcttgatcaatacaactactctcggcgcatcgccaccctctttaccgaggtttttacttatcaaccagcggaatttggcacttgaagcggggctgcatcggctttcgatctccggcgaaggggtaagtcctacgtttcgccggccccagtgaatctatcggctacattggtgttgttcaaggctgcatcgcttcgatctcttggatcgctctgatttggttgatatatttgcctacctgatatctcaattctatctctagttgcatttgtttagagacacatcggtttagttgggactgtcttggttaggttcgatcttctgtcttagccgatatatctctacaatcacaatgttgttataaatagatttgttatatccatcacattagacagatctatcggctcatcgagtttaaattatcatatacaatctcgtgctgcat

SEQ ID NO: 320 - DNA, 586 bp, Oryza sativa
aaaccatatagatataagctatgatattccattaaacaaagacagtcatgaaagaataaaaatatatctatctgagtcttgtttagatagctttatcgcacttaatttatttggagctagttctactaggtctttcaatgataataagatatatgaattgcttgaatatttgaagaaaaatacaaataaaccaattttattgttaacattccctgcaatagctagaaaattaaaaaaaattgcttgtcatttttcggaagtatttatctatgaacatacgaaaacagtgtttgatactatagaattaatacgttttgctgatttggttatttcacctgatacttctattgtgcatattgctgttggacttaataaaaaattaattgcattttatagtcttgatgaacaaaatttcattcactggcaaccaaataatttagttgaaacacatattttgcgttttgaacataacataaatgaaataaatatttcagaaattcaagcaaagtggttaaattaataatacgttttgaattatttaaatactgcccaaataggggcatgatcagagggtttttccatagct

SEQ ID NO: 321 - DNA, 662 bp, Oryza sativa
ggaaattaaaattcacagtatttttcctaaaagtaaaaagttagtctttgggtaatcctctaagcacagcaacggatttaaatggtgctaccgatgttaaagctgctctattttcaaagtacataataaatggttttggtgacgtcactttttcattacgccataatgagcctaagccaactaattgaatatctttaggcaaagaggctaaccttttctgtaatacttcaatgctatttttacgagggtggccaattataattacatcaccgtgcttgcgtgcgtaatcaatagcggtattaaattgtgcggtaatatcagctaaattgtcactattatctaaaaataaatggcgttctaacgttcttatacccaattgacgtgctatcttcgctgctacactagggcctgttttactgtctaaaaaaagagttgttcttttaataatacctgcattaaattggtcattgttagccgatcagcggtcgcgccactccccatatggttgttcaagccaattgcataaggcacttgctacgcgcagtacgaattaattgattaatctcatcttgactatcattcaccattaatacgtccgcttcaataggtttagatttatctttaggctgcatgggtaagtgaattaaatatatcccgttttt

SEQ ID NO: 322 - DNA, 814 bp, Oryza sativa
gaaaaaataaaacgtaacggtgaatcaaaagaaagcagtttttctttatctcgcataattaaatcgtaagtgtcttcgtccgcttttgaattccctttggtatccgtttctttgcctttattatcttgagaaaaataaccattgtgtacacctaccgcactttttcctgtttcacgctcatagatttcattgaaccagcgataaaatttaccgttatcacggtaatttgccaccttatcaataaaaaacagcgaaagcactttaatgcctttgctattcagccatttttctttggctaaatgctctttaatggtgcactccatctgctttttcataatttcatcacgcaagagatcatcatcttcactttgtgtaagcacttgcccattagataagtggatctctccaaatgggggaaatcggcagacgcataattcattgataataaacccgtgtcgataactctcatttttgcctgatttttcatagagatcatcacctgcttgaatggtaactacttttttcttcgtttctttctccgtttgaacgtgaatttcaattttggctttgagtttacctttgccaaccacaggctcttttagcaccacataagccccgttcacatcgttttctgccagcacaggttcgacttcgatttgttttaccaatttttggttataagcgtctaacggatttaagctataaattttatggtatggatttttatgcgtggcagaataacgcaatacaaatagcggattcagggcttctatcgcctgtttggctaaatctgtttccatattttgcggttcat

SEQ ID NO: 323 - DNA, 2200 bp, Oryza sativa
agtttccgctagatctgagagtaacatttcctggttgcgcgtctttacaaccaagtcatcgacataagcctcaacattacgtcctaattggttacccaaagaaattcgagtagtacgttgaaaagtaggacctgcattctttaacccgaagggcattgtcgtataacaataagttcctatgggggtaatgaacgcagttttttcctcatcctccctagccatgcgaatctgatggtaaccagagtatgcatatagaaaacacaaaaggtcgcaccccgcagtggagtcgacaatctgatctatacgtgacagggggtaagggtccttaggacatgccttgttaaggtcggtgtagtcgatgcacatccgaagcttgccgttcgccttgggaacgaccaccgggttcgccagccactccggatggatgacctcacggatgaatccggcttccagaagtcgcgccacctcctcgcggatgaaggcttgacgttccggggcctgccgccgcactttctgccggaccggccttgcgcccggccgcacggcgagacggtgctcaatcaccttcctggggaccccgggcatatccgccggtctccatgcgaagacgtcagcgtttgcccgcaggaaggagacgagcgcgtggtcttggacgggccgtcgcccaaggcaacctccttgaccgggacctcgttgcctgtgatcatccgctgcctcggggtggcgggggcggaggcgccaagcctctcgtcgccaccctcgggctcggatgcagcggcgaggtggtccgtgcgctgctccagacaagcgagcgcgactttgaggtcgccatggacagagatggggccaccggggcccgacatcttcatctgtaggtaggcgtagtggaccgccggcatgaacttcaccaacgcgggccttcccaggaccgcgttgtagggcagactgaggtccgccacatcgaagttcacccgctccgtgcggaagttggcggatccaccgaaggtgaccggtaggtcgatgtgacctaacggccacgtgtgccccggcgtcacaccgatgatcggctgggacggccggagcaccatccccggggccttgattgcgtcaaaggctgcgggggaaaggatgttgagggctgcactcccgtctatgaggacacgcctcaatttcacattgcaaatggtgggggaaaccaccatcgcgatctgtcctccccgggcaacgcacggcgggtggtcggtctggtcgaaggtgagggccacctccgaccatcgcgcccgccgcgtcgcctcatgggtaggggccgcggccagaagctctcgcttcacggccttgaggctccggcgagaagcatgagcgcacgctcccccatcgacggtggcgacagtagcctgaggctcctggaaccccaggttatcgtcgccatcgtcgacgtcctcggcgggggccttctgcttggcctcacctcgctggttgccggcgggggccgccgggaccttgccctcacggcgcttctgcctactctactcctactacttcctcgtccgctcagccaaacttttgaccgcgcggcagtccgcgaggtcgtggaaggaggagttgtgcacggagcaccacttgccagtcgggcgctccctgctgggagcaccggcctccttatttctgtcgctcgcaggcctccccttttgggaggcccaggaagcgccctcgacggccaggacgtgcccctcgccgtcgaaataggccgacctcttcttcctactccagtcccgccgccctgaccgagcggcggacccgttggcggccggagctgccacaccggaaccagaaaagttccaggtccaggcctcctccttgcgagccacacggtccgcaagctgaaaaagctccacggaggtctagggctccttggaggcgatcttttcgagcatgcgattgtgccgcacgccccccctgaacgcgtagatcaccgcgtgtgcggggatacacggtatggtattgcggacttgacagaaccgctgaatttacgagcgaagagactcatcgacccctatttgtaccggatgcaaggtcgatacttcaccttggcgcggatatgtgccctggaagttcatggggaactgctgacacaaatactcccaagagtgtaccgacgcgggtggcaagctcctaacgggagacctcgcaagcccccctt

SEQ ID NO: 324 - DNA, 645 bp, Oryza sativa
gatttcaatggcattggtttcaacttccttgagtaattgcaaccctttgagcactgcctcatactcagcttgattattagtcgcatacggtttaatagtataagcaaactcgaaacatgcccccctagggaaaattataactaggccgataccacaaccgtgagtacacaccgatccatcaaagaataaagtccatggcactatttcaaccgagccgattgaatcatcatgatgttccacaataaaatcagctatagcttgtcccttaatcgccttcggcgactcataccgaagatcaaactcggttaaggaaaatatccaatttccaacccttcctttcaatattggagccgatagcatgtacttgacaacatcggccttgcatacaacagtacactcgttggacagtagataatgcctcaaccttgtactcgaaaaatacaaacacaagcataacttctccacaggggaatatctagtttcagcatccaagagccgacgactgagatagaatacaactcgttccttcccttccaactcttgaatcaagaccgagccgattgacttctcaccggccgataaatataacctagacggtattcctttctgtggaggaatcaaaacaggaggagagctaagatattt

SEQ ID NO: 325 - DNA, 1276 bp, Oryza sativa
tcatgcatcggcaatactagccgatcatgcgttaacccaaacacttgggtaatatttcttcaaatacttgccattgagtgctcgcccatagacttcactatcaagcccttgcaacatatatgctcccttggacacaaccttataaatttggaacggtccttcccaattcggcgaccacttgccgaatttactatcacgagtaccaatcggcaaaatcaatttccagacaagttctccttccgaaaaatccttaggtaccactttcttattataatgccaagcaatacgttcattatccttggtaacctttgcaagggctcgcaatcgtgtctgaaccagatcctccctctcatcggccataaggttgtaatactcatcagctgttaaatcgttttgtgattccattcttagagagccaattgtaacctcccatggcaaaacagcctcatgcccataaacaagtttgtaaggagggacttggatcgatccatgacaagccatcctataagaccacaatgcttcggccaacctagtatgccattgtcgaggataatcagaaattttccgcttaatcaatttgatcaaacttttattaaacgcctcggcttgcccattagcttgtgcataataaggtgaagaattcaataatttgatacccatgctatcggcaaactgaacaaactcgtcagacacgaagattgacccctgatcagttataatagtttgaggaataccaaatcggtagattatatgttcttgaacgaattgaattgcatccccagaatcaactttcttcaaaggaatcgcctccacccacttggtgaaataatcagttgccaccaatataaacttatgtcatttactcgatggtgggtttatcataccgatcatatcaattccccaacctcggaatggccatggcttaataataggattcatagccgatgccggatctcgctgaattgccccaaatttctgacaatcttgacaccccctataatatctgaaacaatcctccagcattgtcagccaaaaataccctgcacgccgaagtaaccacttcatcttatgagccgattgatgagtaccacaaattccttcatgaacttcgccggttgcaactttagcttgatcggcacccaaacacttaagtaacactccatcaatcgtccggtaataaagctcatcatccaacagagtatacttcaatgccttatatcgcaatttcttagaagccgattgagacggattatgcaaatactgatgcacatcatac

SEQ ID NO: 326 - DNA, 1360 bp, Oryza sativa
ggtggactatctccccctttcatcggctaccatgccccccaagacttcaactctccttcaccggcctaactagagaaccagccgatgcaagcaagaaaaggaaaaccagatcatcaagcatgagtaccttaccctgggctccaaagaaaaagaccaaattcaagaaaactcaaccacaaccaactgatatgtcgactaatgatctgcccgccttggatccatctattgaacaagctttagatgacgaggaaattggtgaagatgttgatcaagctgtagccgaaatgagtgacacagaaagaacaccatcggcttcacccaagcaaacgcctccaactccttacgcccccgttcattttacaagagtaagtacctctctctgacttcttctgaaattacctcactcttcggctaattacccatagactttgtggttgcagaagaagaaaactgctgtgaagaaaaaaaacagcagcaattgttaaatcggctccaccagtaagatgtccttaattcttttacttaatcaatctcaactgattatatataacacttgtctatttcgtagcctcctcctacttctcctcctatacagcaatcgtcaagtgatcagactccatcggctgtggggagtcatcacatcgaataggaagaacaaccagctgctcctgctatcccagtaagtttccctttgtctcaacaattagatcagctataatttacccagctcttattctttccgaaattgtctctgcaggctctagccgatctcttctcttttgacatcagagattaccttgatgaagcagaagaagacacttcaagcaaagccctagctcccctatccgatgatgtgagaaaaacacttgaagacatctctcatcggctagcagcctcttctttagacagtttggtagttgaccgtgggtcaattaggacacggctgtatgaagttcaagctctgattcccgaagatctggccgatgtcctaactctagccgcttatctcgagcaacatcagttcaagctggaaaaagccaagctaagactagccgaacgccgtgatcgcaaagagattaaggccacaatccaaactaatcggcagcttgtgcatgaagaaaaaaccaaacttgatcagctatctgaaggtctgatcaaatccaatattgaccggctcgaagctcgcaaaattgagctcttggcgcaacttgaggaatgcaatgccgagctagatatagaacacaaaaagctagccgatctcccaaaatcaattgaagaacaaaaagcaaggctcaaatcggctatcaagaatgttgctgacttaaccaagtctctgaaagtcatctctggaactgatgct

SEQ ID NO: 327 - DNA, 2614 bp, Oryza sativa
  unsure (1)..(2614): unsure at all n locations
agtcaagcaccagctgcagtgacacacctacttcaaccgtcgatacagcatcgtaatatacctatgccgtccgtttagccaaccgttcatatttcaaatggcgccgtgcctttataacgcgaaggcaaggaatttgtttcccaggaaaggtgatacgagcatatgtacctggcaatgacggcggaggctgctgttggcgacggcgcctcttgccgatgaagaagtagatcagcccggccgcgagaccgatcacgaccaccgcggcgacagccacgcccacacccactgtggtcccgctgcttttggatgatgaaggtgagggtgacgtcgttggcgcttcgacagcctgtggtggtgggggtgatggcggcggaggtgaaagttttggacctcgggtggtgaagggcttgcaataggcgaaggtgaagacggtgttgcactcggcctcggtctggatggtggtggtggtgaagggttcacgggagaaagaggtgaagggctcacggaagaaggtggtgagggaacccccgaagaagaagaagaaggaggtgggaattgcggattaggcctaggatttggggaaggtaccggattcggagtaggggccggaccaggtgctgggactggggcaatcactggagaagcgggtggtgaaaaaggtggtgaaggtggtggtggtgnaaatactggaggaggcataggggggtccaccggaggtggagnacgtggagctggagcaggcgtggggggaatcaccgaaggaggagatgggggatttcctggaggaggcggcggtgggttctccggaggaggtggtgtagggttccctggaggaggttgtggtggaataaccggaggagacggtgaaggtgttgttggagtagacggcggaggtgttgttggtgacgattggggcggatttgctgaagaaggtggctgtggaggccgatcagggggagctggtggcgattggggcggatttgctgaagcaggtggctgtggaggccgatcagggggagctggtggcgattggggcggatttgctgaagtaggtgcctgtgtagtccgattagcggaagcaggaggggtcggcgacgggctggacatggttgcgcggcgtgcaagtgcaacgtacgtgcagctcccagcgtgatcgctaaccgaccaataggtccaatgctaatgggcaagaagaggagagagcatcaagagcttatatatacctatgagctgtacgcagttcgccacgaggtggttttctctttggccgtgcagatcttcgtgtcgcttgcttgcttcaattttcaagcgacgtaagcaacagacgcacaggcgaaacttggtagtatccatgaaaagactaggctactcttcttatttcttttgccgtagtagctatcagtgttagataagattgaccgtgcaaagtcagagttcgattggattgtgcgaggaatagaaatggcactaaacttgctaatcatgaacttagtcatggatttttttatgcaagtgtagcattaaccacgaggaatagaaatggcactaaaccgctaaacatgaacttagtcatggattttttttttatgcaagtgtagcattaaccaggtagacctggtcagataccggcagagcacttgcgagccaatgatataggttgacagcttaatacacaaaatgagggtgacctctgtttttttctgggcagtggcttcgatacttgtatcaccattcatcactagacaagtatggccagcaatcaacctgcaatattcagaaacaacgtgtccgctcatgttttttctgctcggaagttcgtcagtcgtagctatgagagagagattcaggattttgacatatgaggcagattttattttcatttgggtgccactatgatgacatatcaacctagactgacatgtcaaaagcaatttatgtgattatttggtactaagcataagaaccgcatgtaacatcagaaggaaagagtaaacccagccacatcagttatgttaattccattttagaagctcagaacaaaataaaggaggcagcccatgaatgatgaaggttcttaagaacttcgaagagacaactaaagatcaagcaaaaaatgcactaaaataaaacacggtcactgtgaagttatccacaactggtaaattgaaatagcaatttggtcactccatcacccatagactttttgagtccatacttcattatacacgccagcagtaagcaggaacacatcttggaagcaaaaaactaaacaagaactagcaagtttcatacaacgcagtagctattggagtggatgagacggtgacagtttagttatataaaagaaattaaagatatcaaatgttcaagttgagatggttacaatggttttctaataattggtgcatggggtgacatccaaatacacgatgttttaaaacaatactctagccttattaagtctaatctaacatatatacccagtagtttgaaggaggctataggtacatatgatatgataatggtgcatcagcaaatcgaccgggtgatcaaatgcaaatatatatactccatatataagcagcaaagattttgaagttgctagcataccatc

SEQ ID NO: 328 - DNA, 600 bp, Oryza sativa
gatcttccgaaaggttctgataaacaacgatttgggcagagtcgcgacacaaatcgatccggcttcttgaacgcgcacgctcttgagccccgcaatcgcaacaccacgtcttctctggttatcacccgtgtcgaaacacggatgacctcgccgagaaggctaatccctgtttgccaatcgaagaacacaaacaagagcgagatagaaaacaaccaaaattgcagatgaatgattaagctcacgagttggggtcttacaaaccgatctagcggcgaaactattctcgacagattaatctaagcaaaacccgactttaaacgatgacggctactgaataaatatgattaggaacgtcctaaggtttccatagggcgcacacccccttgggctaagcccacgacacaattacaaggcccaaaactcaaaatcagattcggactggatgaggtgcatgacttgttttgcagattcccggcagctcggtaggagttttgatgtggaaccaaaaccatctgaaagtagacttcataagctttccaacaagtactcatgggccccgaaatttcttctagatcagcggctaggtccgtttgaagttga

SEQ ID NO: 329 - DNA, 774 bp, Oryza sativa
caattcctttggatttgcagcacctttccaacctagtcacgattcccagcctttcacacaaaaactactattttcttggcccaatcggcaatctcgaatctcgaccccactgatttcatcatcggtgaaactaaccggatcccctttagactagccaaccctaacctgggtcactggaagaataccttcaagtcttggccatctctcgaaaaacctactcctgataagagctggaccacctggtaccaacgcgtatcggctagtaagaaagttcactgggatgaaattggaatcggccaagcactcactctcaccatagccaattctgctaaggatgaacctctgatggctgccgccacctacttctggtccaacaccatcaatgctttcttattcaaccaagggccgatgactccaactttaatcgacatcaccatgattactggattagatgtaacttcatcggctaaccctatgagcatgaacaccaagaaccaattcgacttcaagaccaaaagcataggtgactggtctggctatgtggcggcatatatgggccaagggtctgttacccctcgagagcatgtagctttcttgcttatgtggctggaaaaattcctcttctatggatccagttgtggccctacaaccaactggcaattcgtaactgaagccttagaatcaaagaaagaatttcctttgggcaaaatccttctcggctatctgtaccagatgttgaacaatgcatcggcttaaatatccggcggctcaata

SEQ ID NO: 330 - DNA, 1443 bp, Oryza sativa
gtttagcatgccgcacatctgcccttcttcatacagtgacttccttgcaatggttgcgatgaagcctggcatgaatcgagtcgggactgacgtgctaactccaggagttaccacgccggctccagctagggacgagtgtcaaaaggctctcatcattccgacgggacggggcaaggcgtgtgacaggccgcatgctgccacctaacccgcgatctgaccggtctgtgaccggtcacacactgcgaccggtcacggaccggatatgcgtgcgccgtgctgcattaaatgcggcgtggcgcgcttgtccattccgcaataaaagtggtttggtgagcgccgctgtgcccacctaacccacacccgtggcgccaataccacagggggtcagggcgccccagccctcggggccgaaacaggagcggctcgacccctcggggagacagaggagggggtgggcacgtccccctcgggcccgaccccccgagggggtcaggccacgtgggtgaccgcggctgcccaagcctctagtcatgatactcccggtcccatgtcaccgacagcgacacgaataaccattggggatggcgcaatagcacgcttttgggagtcaacctgaaagtgtggacgccaaccaaaggacgtgttgccacaggtttacgctatctccaaaagaaagaacagaaccttaagagaggcgattgcagatgatacctagtcgcaagacctatacctcttgatcctaggagcaatgataaccgagcttctagactagctagtgaccctctagacaacagtggatagtgtgtagctaaccctagatgtggtagatgaaatcacctggaaactcacaagtcccggagagtacatggtaggctcagcctagaaagcatagttcctcgaagccatcaacacgaactacaatgcgaacatctagaagccatggggaccaaacaaatgtaaaattttcgcttggctggctatccaaaatagagtctgaacttcaaacaggcctacgacttggggatagcatactgcacttgtgcagagacgcacccttgagacggcggttcatctcctcatggagtacagatacacctggataatttggggcatcctaacgaattggatggcacaggagtatagcaagccgaccagctagaacgccgccacattagtccatagctggtggacaacgatggctagcaacctgggacgcccaggaaaggaatccgcattcttctcttactgagcatatgggagatatagaaagaaaggaacctgatagtgtttcaacacaaagaattctcaacactaacccacgtgagaggctgccaaaactttaagctctgataggagtgaaatacctagcacagatcatcccataggtttttctttttctgtaaagttttgacttttgcacattttttctcatcctatattcaa

SEQ ID NO: 331 - DNA, 658 bp, Oryza sativa
attttcaatcttcgggaaattgacagtgagtgcacaaacatggagagataaaagtagttcgaaatttgaataattttgtgttcattataatgtggtttgttttgcagactatgatgagtatgaacgctcgatgcttatctcccagatgagctttgagaagtcgtttggactgtcatcagtgttcatagaatcaactcttatggagaatggaggcgttcctgagtccgcaaacccatctacactgatcaaagaggccattcatgtcattagctgtggatatgaagagaaaactgaatggggaaaagaggtgttaattctccccttattatctatacctttgttgaagttcattcctcctaaaactcaaagcgtgatttcttggttctgtcctgtcatagattggctggatctacggttcagtcacagaggatatcctgactgggtttaagatgcactgccgtggctggcgatccatctactgcatgccgataagacccgcgttcaagggatcagcgccaatcaacctttctgatcgtctccaccaggttctccggtgggctctcggttccgttgagatcttcctcagccggcactgcccactctggtacggctacggtggtggtcgtctgaaatggctccagagattgtcctacatcaa

SEQ ID NO: 332 - DNA, 583 bp, Oryza sativa
gattaaagttaatcaaacaaatcattctcaagcagtacagtctaaataaaagaaagtgtcataaaggaatgtgtattatgtgcatgagcaaggaatatgccaactaaaaagattaccaaaatcacaaatttttgccggcttccaagctgtactcctgggcaacacctccggcgaacatcaacagcacggatgccaggtttattttttgttctatccagtaaagcctcatggtgactcctcgtatcctcttcatcttcatcgtttgtctggtgacacaggtcaaccctgtaagaccattattttagagaaatatagagtgaaaaaagcaactatgaaaaggaaaaagaaggcagaaaaacatatgcataataataacatgattcatgagaaagcaaaaaattgacaatacaaggttcatggcatatgttatctcatagaaatcgttaaatcatgaccatcatcttccccctttttgtttcaccctaacatctctaatgcaatcctctcaaacgtcgcgtggtaaaccaatgcataacactgaacttatacaggtttggtcctcaagatgagaccttactatttc

SEQ ID NO: 333 - DNA, 1016 bp, Oryza sativa
tcacgtacggctaaaagtcgccgggctcgccgggcggggcaccgaaattccggtgtcgcactgtcacacccgcccgccacgtctagcggaggtccggctgctcagcctatccgtgccggccgcctcgccgctggcgccggccgtcatctgcacgtccaccgtcacctacccggtgtcggcgtcggctgcgctggtggtgtactaggtggacgggttcagcccgtactcgctagttggctcgctgaactcgctgatcgtgtactcgctgacggtgcccgtaccggtggccgagcccaacgccatcttcctgagccgcttcatctggtccgtcgtgccgacgctcgtccgatgcatcgcgctctgcccgggcgtcacgccagcgttcaggtgctccgccgccagctcgccctccaggtaacgcacgatctgaccattcgagtgtccacattttcagtgtacaagctacggagttgctgaaaccagaagccgtgcggtgtgtgctgtgtgtttgtgtttgttcagtgaaggtgtgaggagttttggcaagaacctggctcatccgcgggcgagaccgcgcggtgtggcgcacggcggcggtcgcgcaggcgatcagccgccccatgtcgtacgcgtcgtagttgttctccagcctcgggtcaaccagctcctcgaagttctcctcctccacagctctcaccagcaggggtctcgcctgttggacacacacagagatgactactttcaccggccgtggcaaatggaaatctacgtgttcggttcaagactcggaagcccactcacccaagaaaccaatgtgtcaggctggtcaccgtgagacaccatgataggcttcttcccggtgatcagctccaggagcatcacgccgaatgagaagacgtcggaacggtcgttcactttgcccgtggcagcatactctggagctaaatatctggagatacaagttgttgacagcacaaagtttagtccgcgtggtgcgtgcactgaggaacttttga

SEQ ID NO: 334 - DNA, 1642 bp, Oryza sativa
gtgccatgccagctgctaggatcagaacgcccttgaaacattttatgcatgataagaacgagacagagtatcaacatggagagatcttctcaaggcaaaatctgctcatagacaagctgaaaccttactttgccagttctattaactaaaatgagttgaggaagctaatgtgacggtggggaaaatctgaatgaacagccagccaaaccatgaaaaactctcatttctatggctatttacatttgttaatccttaaagccttacccagagttaattctaatggataaacgcatactgtgcactcattggagaaccatgctacattcacaggtaattcccttcttttctgatcactaaagtttccttgaagtaggaattacatatccatatttgtaccaacaacctgtcagaaagctactagatgccagtgcacaaatgacgcattggtaaaattctagcagattaaacagactgaagtttccacatcaacggtttgtcttctggttaaatagggcttgacttgagggcctatacatcgatagattagtaaagtcagtttattagaagtatgtagaggtagaaacctatgaattttaattgaataacgtaatactgcaagtaccttgttagaggatgtaacggcagtcctccattgtggatcctgtgtaggggatggtctatccctgaacaaaataacaactcttgattgtgtgggcctttctactgtctgccgatgaggaatatctttcatgacccatagaacaaatcctgacggtatggatgatcctgcaagagtatccgaagtaaaattaacaagtggttgtgccatctctctctctaaaaaaaaaagaggcttgccaagtgctttcttgagaatggaatattatgttcgcaataaacatgagaaaatatcaacagaaaaaactattatacaacatgcattctgattccagaattattttgattgattggatgcctagtaaagagttaatttttgtgactaggcaattccactgttgcagttcaatgtgtgccgtaaatacaccatgcaactaattatttttctaaaatcattcactagtttgatggtgttgctccctacagttgagttgcacaacattcactaagtatcaggtagggagaactaagaatccaatttcaaagtggattccataaatataagaccgaaaagaaatgtaagttctggcatgactgcaatatatcaactagcagagtttgagtatttcaatctggtactacacatagaatcattagatctagcctagcttcaccctgggggtatgagaaatgaaaggttggataaataatttatccacacctaccaccacacttactcatttcactaacttattgtattaattcccacatatggttccatgttggagcatgctcacatgcattcaccatcaggcttcgaagcatgtgcacataataagcctgatggcacaccacatcctaccatattttcccattgcaacatgaactacatttaataaaatgttatcgttcaatttaagaggagttatttctagccatagatggtggagagatacctatgaaatagtacataaacaatatgatagcattgttgatgatgtattcatctgctgagtaccaatac

SEQ ID NO: 335 - DNA, 679 bp, Oryza sativa
gaatatatgaccatttattcaattaatttaatattgtatacgatcattattagtttgctttctcatgattttacaaaatacaatacatgcagcaaatgataaagcagtagagagatgcaatccacaaattgaatgattctgcaagagttataccttccgcttctcagatgatccagtttcacaacgcactttgctcatctttgaaaatagtattgcacctttaaatgatcataaaaaataaaagaaaagggcatgtcaagaacatgttgaatgagaggattactggtagcagatgaaggtcaaaatatttagtaaggcggatgtgaaactagatataaagtgaaataggactgtgagactcattcaatatttaatctactgcgagggattagaaacaagataatatgagtttatcttaggttgaaacaattgactagaaaacatcatgcctaatattgcgacataattatggtatggtatagatgagtatacataggctatgcttaccataacatgccagcgcaccaccaagtacaagaacaactactgagaatacattcaagtaaacctacaaaataaaatatttggctaaacaatcaagtcacaacacaataggtgattaaataactattgatgaaattggtgagcttgtaaatttatcaagtaaactaatgtgaaa

SEQ ID NO: 336 - DNA, 654 bp, Oryza sativa
ccctgcaaccagttgtcctcttagaataatgtagtcgtcccattgcccacctgacaacctatggatattgacacgaagcttcgcttcttcaggcctttcgcagtgcaacgacgtggcgagtgacctcgttgctgaacgttgatgtggaggagaaaaggaggtgggtcccgtgcccttgcaaggtttgcggctcctagctagggttcaggttcctcacgcccgaaaaagaaggtgcgagcacggtcccctttctgttgctgctcccaaatcttccccattcttctgcgccgccatgtcaagatccgagcaggcttggagcttgttggcgatgctgccgagtgctgacgaggaaggggagaagctggagtatgggaaaaagtggtggggggcaggtcgggtcgcggtgatggcgaaggaggagcggtcggagaggaatgagcgaaatgaagactagggcaaggaggttgatccactccgccagcttactcgattcctcactggggaaacttgatgtaccgacagccggagagctcgtcggctccacctcaggggagtgccgccttttgatccgtgccgccaagagcttgccgtccacgccacccctgatccgtaccggccggagcttgttggccacacgccccttgatctgcacta

SEQ ID NO: 337 - DNA, 635 bp, Oryza sativa
aaaaacccatgaggggtcggggctcctcggacctcagggccgacgggggtgcggtccgaccccctcggggggactaaaaggagggcgaacgcatcaccctcgggcccgacgtccctcgggggtaccaggccacgtgtgcgattgtgtctgcctcaaacctctagtcatgatactcctgatcccatgtcaccgacagtagcccccggcgttatgccagggcgatcgccctctttaagggaaacggtcgggcgtgacgccactcctaagacctggtgacaggtgggaccggtctccacaattgggcagaaacccaacggtcacaaaccacgcacatcggcaatggtaactcggctgtcaacaatgagcggtctcttcaagactgccacattacttgagtagcacacgaatctggacatggcgattcgtttcgtctggagatatggtaacgtcgcttcggtcggcgagcgtaattaacgcgcgcacgatatgatctatctcgactgccacaaccgcatatccacctcatgcgccgcaagcgggcgaatgggattagtgaaagcgtgggcgcgagaaacgagggggcgaaatagtgggcgcgagaagcgagtagccgggcacagcgttggcaagagtat

SEQ ID NO: 338 - DNA, 980 bp, Oryza sativa
cgattcatggatcgaggagttgccagcggtgctctgggcaaaccgaactacaccaagccgagcaaccggggaaatgcctttcttcctcgtctacggcgcggaagcggttctcccatccgagctcaccctgaggtctcctcgggctaccatgtattgcgaggctgatcaaaatcagcttcgcagagatgacctcgactacttggaagagcgaaggcggcgcgcggcccttcgagccgcgcgctaccagcagagcctgcggcgctaccatcagcgccacgtccgggcccgatcactctgcgtcgacgacctcgtcctacgccgcgtccaaacgcgtgctggattgagcaagctttcaccaatgtgggagggtccgtatcgagtggtcggcgtcccccggccgggctccatacggctggccacgggcgacggcactgagctgcctaacccgtggaacatcgaacaccttcgtcgcttctacccctgagggggggtcgggtgtcaggtttcgggctcgggccaaccccgcacccccccgggcgtgcagggttggccggggcctacaacatatgcataattcttatttttcttacatccgtatttcaataaaagcagtttcaatttcctaaaggctgtgtctgtaccattttttccttttgtagaatcttgacttgaaatagcacgctcgtgctcaatcctgcccttgggggctcgggtcggctaaaatcgccgaaaggggcccagaaccgagccgtgccccggggcgtgatgaactccggggggggaatcggcaaaaacccacaatcgggtcatccataaccctcggtcaccacgctcccggcctggccagtctcgacatgtggatctccccaggcactagctccggcccgcgccgtttgaggactgggacccgggcacgagcccttgttcaagccaagacacagaaggaccacggcacagaccatcctcgtctcatacacaca

SEQ ID NO: 339 - DNA, 513 bp, Oryza sativa
cagcaccttcttacgggtttcaagctccgagacgggccggcggtgagccttacggcccacctccaccatgggctccaccgagcgtcgcccctcttcgacacgcgcccacgcggcgtcgagctccgcccgctctgcttgcaagacctccacctgggcgcttaacccatccaacaccgtggtgtttgcggcagccaaggcctgcagaaggggctctgcgttcagtggggcgatagaaggcgtgggccagagccgccttggagaggatgccacgcggttcgggccgccgatagaagtgccggactcggggatgtcccccggacccggttggtcctgagcgtcgcccgagggagtgggcccaagcgacgcgcccgcagcctcgtcgccagctgccccagaagttgtcgcctgagcgtcgcccgagggagtgggcccaagcgacgcgcccgcggcctcgtcgcgagctgcctcagaagtcgccatcgcctcgtcctggcgaaatccgacttcctcccg

SEQ ID NO: 340 - DNA, 1339 bp, Oryza sativa
gcatacaataaaaggtcatgtagaaaagcagggaaaaaaacaaaaggacaacagcaaaggtatatatccagtaaaatatacccatgagtacaaatccacatccatggacccaacaaagccatctctcacaagtagcgatgatggtagacacgaaatacacaaggaatactgccataggattgggaaaataaaaatcagagttagtaaaatgttggtaatcataaaatatgcaaggaatactgtcaaaggaatgtataatgaaagtacacatgattgaactgattcactagtagagataatacaaatactttatttagaaactagtcaacctgagaagctgttagtgaagtaacaacatttttcttcttataaagttaaacatcagtatatttgattcattaattgtgcacaaattaagacaagtgatcagcagtcatgtcatttggtgtacattggacctatttaaggagagaactagcatgtccgtaatagaaaaattgcaaacaaaaatgagatctattttctatttcttaatcagagcttcaaaaccagaatataaatagttcaactattccttgtgcacatggttcctcaatgtcatagtggttgcattccagcatcataaaaaaggaagctcgctcaaaaacttgaattgtaacattttccaattgcccttagttaaaagtttaaaacatggatagcaggaaccattcagaacaattaagacagtcattaactactgactacattatgcagaaatttccagtgcacaaaaaataataaagaaacctcaagcaaaataaagggaaaaaggtattatcatagcaatacagatctcacctaagttgcataggccaatcataaaatggaatatctgcaagaacgtaggcatataacattaaaaatctggcagctgagctcacagcacagagggaaaaaaaaagtgaggcactaattagcattatttaatatcctactcttgagctctcattcgaaaaccctacagcccacgtattgaagtaaaatgtcccataccaaggaaacttgctacttctgtcaaatagatagactataaaacaaatggttgttttgataatcaatagttatgtttcattcatgagaaggtcacatgattacacatcattaaaggtatgcataaatgaaataacttttgggggttaacatttgtaaatataattatataaacaaagactatattgcaattcatccgaaccttggaatcagacaaactaaataaatgcatactgaacatgatataaagtggtatgccacaaatagtaccattagtaatctaaattactaaagtgtagaaagataa

SEQ ID NO: 341 - DNA, 1703 bp, Oryza sativa
  unsure (1)..(1703): unsure at all n locations
catagtgaacccgctaatcaggaaatgtgttgttctgtataactttcagacattaagctttgtagtaggttagtaatactcgtattctcctatttgcaatgttgcattgatgtttaagcactgttcaaatgacacggtgttgataaaatgcgtttttgatagatattaacatgaagcgataatttatatgtcaacattatatgcttatagcacagatagctggagtgtaaatcacacaactgaacatcggaatgtgaatatggtctaacacatgtgtaactcttgctctttcagaaggtcatttatctttgtcttattttgtagttgttgtcatctgaatataaagacactccaaacttggctgtacaatttgaagacttgagaatactgtcagtgagcttggatttctcaaatgaaagagaactcatcttccttctgaagctgcttgagagttgccccaacctgcaacagttgactctttcggtatgcaatatcacccattcactcttgcattcacattagcatctttactatattgagtttcatcagtaagtttaccactaatttatctacctgccattcatgcttaggctgttgatgcaaaagacgacactgcattgccaaattttgctgatcatgaggagaggctttcaaagttatcatgcctaactaagagtttggagcagctcaagtttcttggattcaggcctcaacggtaccagaaggaactctttatctttctgctaactcaagcaacgaacctgaagaagatggcggtggagttcccgaaagaccaagaagctgctgtgaggagaattttgtcagtgaggaaagcccccactcagaagaaaactaccaagtacaaacaatactacttggagttagagtatcctgtggagcccaactgctcatagggctctcaagtcgctacatgactggtctctcttggacatacattcactccctagactttaacccttaagttgcaattctctntacagagatcacacgccggaaaagttcttattcattggcttcaggatgtaacaaaacatttgagatgctttattgcttcgtgcggtatgtaattttcaattttttgtgttacaatgttatacagggaagtatgagaatacatggggttacgagtacttaaaacatgcttgtgaggatgatgaacatctatttctgctgccaattactctgaagttctgccatagactgtgtgctcaaatttgccactccatctgtgcattgtccatgtcaaaattggaaatagtgcagatgattaggatacactgttgtttgtgtgaagggcagagaaaagaaatggattttggagcaattgttcacctgttggaatcgtcagatgggacttggagctccttttctgaactgaatggttcgaaaagacggtcgatgtcctcgttcttgacctcctcaagggtagcaggactccactgtatcgcaacaaaaattaaaaaacagtatgaaaaataaaaatttctagacatgtttaagagtgtgtatgagagaaccttaggggcattgtctttgtcgatgctgagagctctaattccctgccaagttttaggtgcaaatattatgatgaatgacatcttagtcttgcctgtatcaagaatcaccgttacttattcatatagtggcaaatcacagtacctcatagacatcgccagtaacta

SEQ ID NO: 342 - DNA, 700 bp, Oryza sativa
agcattcaccatacataagaagcacacaaatattattaagacgagacaaatcgatcagcattagaaacgatgtcagagtatgtaccgatcgaagagtcatcttcagtgaagtaggagatgatcttcgcatgcccttcagtactgtagcgatccattggtttccatcaatgctcccttttgattcctacaaacaacaacaacaacaaaagacgctacttatgatttgcaggaaaaagttgattgccttgttataggacagtgaagactggtggtgattggtgagtgtactgtgtctagtttttccagaagctattggttgacgatgatatattttgggcataagatgaatactgtccacttattgttgtttagattattttgtagcatgaaaccaagatgaatattctatagtctgaggaactcaacacttttcaagcaagtaattgaaagaatccttacaaaagcttttatgatgtcctcgatagtctcagcagagaaacatttgttgatagttgggagcctatcgaagtaagattgtcattccagtgtcaatttatttcaataatagaataataaatgcatgcgcagcaagttacatttggaaaaggacatcagttcttaacttgtttaaaatactatcttcatcaggttgaacatcagttgagaactcttcaatagcagctcgaacagcagactcatc

SEQ ID NO: 343 - DNA, 706 bp, Oryza sativa
tgactcttttgcccccctcccctccccttcccttcggatccatccacgaaaatctcctgcccctgcgattccaccgcgccgcaccgatggcacgaaccccacgcaagcgccgccgccgccgcggcggagggggccacgactacctcttcggcctccccgacgacgtcatcctcgccatcctcttccgcctcacgacccgccaggccgtcacgctcttcgccctctcccgccgcttccgggtcctcccgtcccagttcggccgcgtcgactccgcgctcgtcgccgacccggccctgccgctcccgtcgctccccgcgcggccgaccttcatacgccgccttttcttcgccccccagacccgccggttctcctcctccgcgttcggccgcctcctcgacgccggcgccgaccgcgggctctccgagctcgccgtccgcctgccccgcagcgcgttccttccccagaacctcctctccatccgctccctcaccgtggtctccctcgactcctgcgcgctcccgcgatggtgccccgccgcgtgccctggcctccgcacgctcaagctccaccacgttgccatcccgcagcggatgatcagcgtcatcctcaaggccgcgcccgtgctcgagacgctggagatggtgtactgcatgggattcgccggcagctgcagtatggagtcctccacggtgaggaacctcctgtt

SEQ ID NO: 344 - DNA, 1325 bp, Oryza sativa
cccctcatagaaatcaattacctgccattgttatgagcatatatatgctgctgtaaattttttatgtacaaagaagaggatgttagaccaccctagcagcttaccatcctggtattatggaagccaacttgaccgacatccatggatggggacttcttgagattggaccagggcgtgtagaccacctcaacattgttcatcttgtttcctgcacgacaagcacatgcaagctgcaaatatcatccagtgatccaagacacatactcgtcacgttctaattatcacacaatcccctcacataggccaaatcaacccaagcggataattgatccaaggggcccactgtagctagtgccaataatacaagaagctaaaagttgctgaaaagaaaaaggccggggtggaaaagcaaaaacaaaattaagattcctgtctgtaaccagcaatataatgtgatgctgcagctttgtagaattgtaggccacacgaatatccgacaggtcacaccatgctctatttcctctatccgtggataacataattggaggtgcaaatgattatcattatttgcaagtaaacgtttccttttcttttgagaacctgcatctatccatgataaattcttcgtaactgcagaatcttttgtggtaaactgtatctaccctacttttttgcacgagtgaaaatttactagttgatcgttagaaaccaaaagaatctagccacaagcacacaaagcagatggtggaaaagaaagctaattaagctatgcgctacctctacactcaaatgttgtctgaaatgagtgcgtaccttgaatggaatgagcctttacaagctgtgcacagtcctccagcagaccgtcgcagatgctatctatcgactcgcctttcttgagcctcaaatagacgtgcgccgaggataccttgtccacgtggaacctgacgggacaaaagcaattttccttgtcgaaattagaagggaagaatccactttaaaccgacctttccatcaaaacaaccagccggacgtctatatatatcttagatcttacttctaagaaaattcctacagcactatatagttcatcttaacatggatcggaataaatatctctacatgtttcagatgaggcgtaatttgacgaattaagcagaaaagtacttttaagcattggaaacccaaggagatcgaggtgaggtcccctagatggaggaagcaaacaaaaggctgcggtagtggccacagtagtagttctgtagtagtactagtgcggatggcaggcgatggctacagacagagttgcaacttgttgctgagcatga

SEQ ID NO: 345 - DNA, 550 bp, Oryza sativa
tccttgggagctggatttgctcttcaggtttgcaaagagctcgctaagcaaggagtcttcgtggagtgtcatctgttcaatccaccttctgtttcacttgccatgggtgtaaggagtatgagtgagaaggccagctacctgtggaaaaaagttaaggctagtctaccactgactgaagaagcattacctgccagtaccaaaaaggagggaagtgcaaagaagaaattgcgtgctgacaagaaatgggtgccacatttatatgtaaccaacagtgactacatctgctgtcactacaatgcccctaattgctccaccaccaccaccactaccaccactgatggtgcttcagatgagcagcagcagcaacgaaaggcaagtgagatcgctggtgatgtggtcgcgaagctttttgtgacatcgaaaggcccacagaagtttcttgaagcgcatgggctggagcaatggtggtcggatggcatggagctgcagctagcagtgtatgacagcaagcttatatacaggcagttgaagtccctctacacagcaactg

SEQ ID NO: 346 - DNA, 537 bp, Oryza sativa
ttcgagctcggtacccattatgggataaaatagctactggtccatgtgtaattggagcactcattgatatggtatctaatacacatttaaacacttaacatttctaattatgtctggataataaaaatctaagataaggaagaacttttgatcaatatctgttgatatcattttcatggacatatggtactctactagtgtaatgatatagaagagctagcacaaaagagcagggacaaaagagagtgatgaataaggttccttctgtttctaagatgataacagcagcccattttgtatttatagctaatcttaatcagtaatacagtaatcacctgggaagccacagctgagtgttcttttactgcacttctgcgaacgtccaacgaacgcgcataatagcttcttgctgagtggaggtccccatcataatagcaaagatctccaattttatttagtgaaactgagagagtatggaccaactgtagatgaatgcaaaagttaaattaacatgagaacttactatcatgctattat

SEQ ID NO: 347 - DNA, 563 bp, Oryza sativa
cagatgatggagtgaaggatagtgaagaaaaagataaagataagggaaaaggtgtagacaaggaaaaatctaaagagaaggattttgacagaaaaactgaaagagagaaggagaaaataagagctgtggatggtgcaagtttagacaacctccttcagaggctgccaggatgtgttagccgtgatcttattgaccaattgacggtattaactcaaattgtattatcgatccacttcatgtttaacaccaattatcattcataacttacttttggttccaggttgagttttgctacctaaattctaaagcaagtcgaaagaaactcgtgcggacgttattcaatgttccaaggacttcactggaacttttgccttactattctcggttggtggctacactttcaacatgtatgaaagatgttccaagtatgcttctttctatgcttgaagaggagttcaacttcttaataaataagaaggtatgctgacattaactattttcttccctttgcattatttgtgctcatttcatgttccttctcaaaaagattcttcttttattat

SEQ ID NO: 348 - DNA, 909 bp, Oryza sativa
  unsure (1)..(909): unsure at all n locations
ctcgcgttatcactgttttatttagccatgcctatttacctttgttatgaccttattattattgttattgttattattaccttgttcaccctagaataaacaaaactccaactagtgggtactctatttatggttccactagtatgaacttaagtagatgcttcgctggttaattatgcaacattaggtggttttacaactctaaactttgggaatgttcttatcacctggacactatggaatggtaggattattgtggaattggattcacaccgccccctttattcaaaatcctcaaaatggttttaggctgggttcggggtgcatggttttgatagtagcaccttggccatataaggaccggtcttcaggcctttattgcaaagcactaccatacttccacatgtctagtgggtaaggtttagtttgtggctcagtctggttataaacaaaagtacaccgatggagatggacgaagttgggggtcgatggacatttctaggacaaatgaaggctacactagctgcggcccggtagtcgagatgtcatggcacagggccggtgtcctgctgctaggggctcagtcgtgcctacctgtcccgggggttcccgtcgtaagtggggttgggtcggtactcttgtctatgactaggatgggttggaaactatgtcacgtcttccgtccgtataccgtggtggtatgtggcacgtggctacacgtgaagaagatgtgttttgtgggtaaagatgtacacctnttgatcagagtataatctatacgaatagccgcgccctttgttatgggcaagccgatcactgtacccaagttagtgttgtaattcttaaaacctgcttaactactaaaagggggaacggatggcctgggttggctcgggacgagctgggacc

SEQ ID NO: 349 - DNA, 973 bp, Oryza sativa
cgtggggagcacgtcggccattacgccgacgctcgatactgatgcgggcatccggtttcccacgcagatcttcccgggtcggagccattgacgaaggagtggcggccgaatggcgaacagcggctggcgctcgccgcgcccttcgtcttgacgatgcggagccggtggcagcagcaccagaggccttggtggcggaggactgcccaccagcatctaggcgctggcgtgcagtcatgcccaatttggccacatcgtccagccaacgttgggctggagactccgggtcatgggcgacgggcgggtgacgtaggagcgcgcccgcagcttggagcgcgccctggggcgtgctgccgttgccgtagacgaggaggcgacgctcctcatctcgccgcccttctccacctcctgtggatgtcgaagtcgcggatccttcggccctctcaagtgccttctcccgcctaggactttggcgtggaggtggcggtggagtacgagctcgacgacgtgggtttggctccccgtcgtcaccgctcatactcggggagaggtcgtgcgcctttgctggctcggccattgggctgaacaggaaaagcttggcgcacacgaaagagtgcgagagctcagaaaatccctcgcagagtcccctacctggcgcgccagatgacggagcgtggggctcctcaccgggagaccgcacaggcccccctttgccggttcggccggggactcagggagagattctaagctctctgtatgtggaaggctcgcgagaccagaaacacacaagacacgggcgatgtatacaggttcgggccgctgagaagcgtaataccctactcctgtgttttgggagatctgtgtataaaggagctacaaagtatgagccagcctctcccttgttctgggtttctaatctggaaaaatccagttccacatctcagtgggcaaggtcctccttttatatcttaagggg

SEQ ID NO: 350 - DNA, 618 bp, Oryza sativa
cccgttggaccaatatcttgaagtcctcaggagcccaatcccatctcactccctggtgggtcctcgtgaagtcttcggacccggtgtactcccaggcgccccgagcgcgtcgctggagcggcgcaatccgacgacggaggtagtcgccgtacaccatggcccctgtgagcccctgggatcgcaggcccgccaggcggtcgaggacggcgtcatagccatcccccagatctaccggcgcccgccagctggaggcctgcgccgggggctggctcggaagtcggaggcgcgcttcgtcggcgaggggagtgtagaaccagtcgctcttccagtcgtcccacttcttgcggagggcgcaggggatgtagcggttcagcaccggcccccgtggctggaagtagcagccaccgactaccgatggcggcgacaccgactgcacggtgaagaaccaccggaacagccgaagagatgggcgcaccccaatgaacatctcgcacagatgcgcgaagatggccaatgtcatcaccgcgttgggggtgaggtgcgccatctggagatcgtagaactccagaacatccatgaagaaagaagaaaatggtggaaccagccctgccattgcag

SEQ ID NO: 351 - DNA, 556 bp, Oryza sativa
ccaacttatcttatgaacaagctaccatgggaaatgagggtaatgcacgaatggtatatgaaggcatctaggaaaggtctcggtttcataagcgtcgccgtcccggaaggcgctttcatgagtggtcctaatgggatattttttatctctttccaagaccattacgccctctacaagctagataaaatggacgttaatctcgttgcggctttctgtctgtaagtctgaactctttattacatgttgcacgtttcattcgaaacaaataaaccaaatctcatttcttctttattcattgtacagtatgcaattccacgaagctgatagaactggagcaaaggttggatacgtcgatccaacaagaatatgcaaaacacaacacaccgtagagctgagagaggactgcgagcaattggttggcaagaccccggaagaaaaggaagaatatgtgaagacattgcacaagaggaagaagctagaagtagcaacatacttggcaatagcaatgttggcgcacgccgacaaagatgtcttaatggtcccctaccagttcacg

SEQ ID NO: 352 - DNA, 520 bp, Oryza sativa
agctgatgagtattacaaccttatggccgatgagagggaggatctggttcagtcacgattgcgagcccttgcaaaggttaccaaggataaggaacgtgttgctcggtattacaataagaaagtggtacccaaagatttttcggaaggtgaacttgtatggaaattgattttgccgattgggactcgtgatagtaaattcggcaagtggtcgccgaattgggaaggaccgttccaaatttataaggttgtgtctaagggagcatatatgttgcaagggcttgatggtgaagtctatggacgagcgctcaatggcaagtacttgaagaaatattacccaagtgtttgggttaacgcatgatcggctagtgttgccgatgcatgacagccgatgtgtttacatcgccttgagatggccaatatggttatatcgcccttagttgttttttcatgttgtaatcggttgtggtttgccgatgtacaatggccgatattgttatatctcccttagttgtttttataa

SEQ ID NO: 353 - DNA, 4516 bp, Oryza sativa
atggtggccagcgccgccgtggggcggtactacatggcggcgtcgccgtacgacagcgccatcccgcagggcccgccgttcagcgacaccaccgccacggccatcctgcagtacgccggccgcggcgcaagacggtgcggtggcggccgccggtgctcccgcggcggccgcccgtcaacgacacggccaccgcgcaccggttcttctccggcatgaccgcgctgctgcgccacggcaagccgtcggcggtgccgctcgccgtggacacccacatgtacgtcaccgtcgggctcggcgtctccctgtgccagccggagcagctgctctgcaaccggagcgcgccgccggtgttctcgtcgagcatgaacaacgcctccttcgtcgtccccaagaacacctcccttctcgaggcccacttcaggcgcgagccggccggcgtctacacccgcgacttcccggacacgccaccggtggtgttcgactacaccggcgacgagagcgacaacgcgacgatgcagttcacgaccaagtcgaccaaggtgaagacgctgcggtacaacgagacggtggagatggtgctgcagaacacgcggctgatcgcgaaagagagccacccgatgcatatccatggatttaacttcttcatcctcgcgcaagggttcggcaactacgacaagaggagggcggagaggaggttcaacctcgtcgaccctcaggaacgtaacaccatcgccgtgcccaccggcggctgggctgtcatccgcttcgtcgccgacaatcctggtaattactagtactactgttacatcaattttttaaaggtaaacaaattacgattacaaaattttgtctctgccggatggatgcctgcaggaagcatagaaccttcttccagtactgtgatgaaatgtgtttttggtgacattggaaaccagtgccccatgtaggagagtgacatgataaatacatttcctaaacacaactaaacaaaactccaaggtttcgtacattaatttgaacctagttgtataatcctgcagaattttaattttagattaaaattattggtatcaattaataacataagttgtactgagtttcaagtaaaaaaaatatttatttatttattcaacaatattgatgtttaggatcagcaaaaatatataagttgtataggaattctcaatttcggattttctaattataataatttgaacattacagatttaccagatatgaagttgtggacctaaattttaaatacgaactagtattcaccagtgcattcaaccatattgtattattgcagatagactaaactgatagactccataagggacaaattttctgttaaaattagtacaccttaatctatccattatggggccaaatattgacatccctagtccttctgtatttggcagcaagctaggacgcattatttggcattggtttagcgtgagagataattaattaagttgtggattataattatttaatttggctgcagggatgtggtacatgcactgccacttcgacgctcatattagccttgggctggccatggtgttggaggttttggacgggccgacgccggagacatccgtgccgccaccgccggcggaccttccacggtgttcatgagatcacgccggcggcgaattaaattttcgtatatttataagattgtgcatatatatagccaggtgtatatgtgcttgcatgagatcaatcagcgaagcagatgaattatatatttgttgattacaacatacaatttgcataaattgattacacggtatgatttgatgagtattatgtgtcctttaaaaaaagttaattattggaacggcatgcattcgtatggttggtggacaacctatattattaggttaggttcatttgtatattccaattcttttttgcagtcatattaataaaattttctgcaaggatctgtcattctaaatgttcagaactaattaaactagggctatatatatgtacaacccaacaatcttatttttataagaaggtattaagagtaagggttagctagcttccaaatagaactacatttatactacatacatactccctggcatacatgatcatagtaacgtgaataatcgaataatataagatcgattatatatatatagtaacgtgaataatcgcatggaagttccgtatgtacgtaagagcttccaaattatgtcaagctatgataacgccgattcgaatcattattttacgtacgccgattctatagtttaatttatgtacgtaatttcacaaaattaagttgtccttttataccagtttcggcccaggctatttaccaagcaggactattgtgttgcggttgatacatgtgtacaaattgacacggcctcctagcaacggttccatatgtttctgccgaatatagcagttatatatgtgcagtgtgtagatgaagtaacgacaatacaactatctagaaagaaaataccgtcatattgggcaatgagatttgacctgcaaacccatctttgggctaagccctaagctggccagcatatattgggccagatttaaaatactaatgagaatatattcaccaggttttaccgtggtcaacttgcccactaataaaaacagcttcccaaccgttgaaggaatcgatttgcatcggtttttaaagttggggaacatatgtcatacctagttttgaagttgatatgattcgatcaaggtaagtgaagggacacataatggacttattcatagagaattagtgcttgcaatcatcaggctatatggcctacaagtcccagagcctgtgaaaaatcttttctttctaggctgcgttcttttggaggcctctcccctccacacgcaaaacaaaacgatgaattaacgtatgattaattaattattagctaaaaaaactttaaaatgattaaaatgattttaaaacaactattttatataacgttttttttttgcaaaaaaaccacatcgtttaatagtttcgcatggaaaaagagggagattaaattgggcacgacccagttcttttttcttaactctaaactttaacttcatggttttctattagcatgctttttaaactgctaaatggtcgatttgacaaaaaattatatgtacaagttgttaaaaaatcatataaatccattttttttaatttataataaatagtacttaattaatcatgtgctaatgagttttcttgttttacgtgcgctgaaaatatctctcttaactgggccaagctaaggaacacaaccttattgttcttaccaacccttgcattttcttctttgcctctagcagccagttaggctatatttcaatggtgttatctgaagtatactttctagtatctttattgtgactcatacttcttactaactatatggaactccacgcgttgctgcagaagtttagtatgataatagtaaatataatgtgtaatatatttagattatgtaagcttatataatttgtatttttttcgatcattggaaaatgctataaaccatttaagttgatgtggtttatgataatttaaatatatactatatagattgataataaaaaaagtaaaagtaaggtgatgcggattcatgagagaagaaaaatgagggaaataatttggattatagattaatcatctaaatgactgaaacaattgaggtgatgtggtttaatgagagaagatagaaaacattaactaagtggcgatgatgtataatgtatataggatattgtagaaaatggtggagagatgtatgttgaaatattatataaattatgtgagataattataacaagcttgtaatttaaagctttaaaatataataaaatatagacgatatagcatgtttgtataaggactaaaatgtaataattgctaatggacgatgatgtgtcatctttacatggtgagtgttaggatgtagtgagttgtaactttatagtatagattgagcaacagcataacaatgtacgattggtttttaattgcttagttctcgcctaaatcatagagaaaattaccaatgtccctccaacaatatactcggcccaatccttacgcatccctaccctcaaagtttaatttggatcatttccatacatttcaattagacattagttgactgataaattcctattaaacattctagtttgccttctgcatgaagaatatagggtttattaattgttggagtgtaaaaatttgttatataagactattatatttatgagtttgtgtgatataatttatgaaggaatttatgttttgactaagaaattaatatttatttttaattattacaaaatatttatgtagcatattttttatacactcctagagaactaatctttgccagatggcgaaaatcacatttttcctagttcaaataggaaccaggactaaagaatatgtttagccccggttcaaaagcccaacggcactttatgatctttagtatatgatctttagtct

SEQ ID NO: 354 - DNA, 30816 bp, Oryza sativa
gggaggaaggggatgagggtggggccccacccgtcagcgagggtggcgggcgggcccgcccgtcaggacgcgcgcgcggggaggaggagagagagggaaggagatgggccgagccggcccaagagggggaggggggaaaagactttttaggatttttctttttataaaatcattttaactttgtttattttaataattattatttgtgctctgaaaattccactaaaatttatttacgcattttaggcttttaggaaatatacaaaaatcctccaagccttatttgacttttaactttgcacattttaattgtgggaggctttcacaaggattttaattattctaggcataatttctaggatgtattttagagtcattttgggacgcgacagttctacatcgtacacgtcgaagagggagtacaagatgatagaatgcgaagtctgctccacattacaaggggctactgccaagatgaaatggtccaagcacaagattgagttctcagaggcggaccacccaaagatcgcgaccacacccggcagatatccgatcgtggttgaacccaccattcggaacatcaaggtggcaccggttccgatcgatggcggtagctctatcaacctgcttttcgccaataccttagatgcaatggcgattccacgaagcgagttgatgcctatcaacccttcgatgggatcactccagaatcatcatctaagccattgggtaaaatcacattaccagttactttcggataagccgacaacttccgaacagagcagatcacctttgatgtcgcggaattcaataccgcacatgacgccatcattgggagaactgtgctcgtgaagttcatggcagcatcccactacgcttatcaagtactcaaaatgccaggaccaaaatggacaatcactacccagggagacgccaagttggcggtgcagtgcggcaagcggagcctcgacatggtcaagcatactcccaacccatccaccacgactgagctgcccaagaaagtgagcaagcccaacaagatgccaaaaccagacggcgcaatcaagatcatctcgctgaccagttccaaccccaacaaaaccatcaagattggggcagcgctggacaacaaataggaactcgcattcatcatcttcctctgcgacaatgtagacgtgttcgcttggcaaccgttagacatgccgggagttcccagggtggtgattaagcacaagcttatggtgcgaccccatgctaagccagttaagcaaaaactgcgaagattcgcacccgatcgaaaacaagccatacgagaagaacttgacaaacttctcaaagctggcttcattagagaagttctccatccagagtggcttgctaacccagtaatggtacgcaaagccaacgggaagtggagaatgaacgtagatttcactgatctgaacaaggtgtgtcccaagtatcacttccctctacctcgaatataccaacttgtagattcgacagccagctatgagttcttgagttttcttgacacttactccagctaccaccagatcagcatagccaaagaggacgaggagaagacggcattcatcactcccttaggtgtgttctgctataccaagatgccatttggactaataagcgcagacaacacatatcagcgtaggatccagggggcacttggcgatcaactcagacgaaccgtcgaggcctacgtcgacgacattgtcgtcaaaactaaaacaagagactcgttgatcgatgaccaaagggaaacgtttgataacctccgacgatatcaaatgaagctccacccggagaagtgcacgttcggagtaccatcagggaaactactcggcttcctagtctcgagacgaggaatcgaggccaacgctaagaaaatcaaagcaatcgaaaacatgaagtcacccacaagactcaataaggtccagagattgaccagatgcatggcttcgctaagttgtttcgtcacaaggatgggagaacgaggacagccttttttcgccctgctcaagaagccggacaaattcgagtggacccaagaggccgagaacgcgttcatcgcgctcaggcactacttgtcaaacccccctatactcgttgctccacaacttgataaagaattatttctatatatcgctaccatgtcttattttgtgagtacggttattgtcattgagaaggaaagagtacaacacccagtgcactacatcagtgaggccctccatgatgcaaaaactagatacccacagattcaaaagctgctctgcgttgtgaccatgacgtcaagaaagctatgccactactttcaggcccacaaagtaacggtcatctcttcttttccttagggagaagtcatcaggaacaaagacgttgtgatccgtatcgccaaatgggtagtcgagttatgccaattcaatgtccattttgtcccaagaacaaccattaagtcacaagtcctcgccgactttgtagccgattagactatcccagaagatagaccagacgatcaaacagataacgaaacttggactatggcgttcgatggcgcactcaacagccaaggagcaggagcagtattcgttttgacatttcccacgggagttcagttcaaacatgcaatccacctcaatttccgggcaacaaacaacacggttgagtatgaaggacttctcacaggaatacgagtagcttccgcactcggcatcaagcgactgattgtgaaaggggatttagaattagtcgcgaatcaagtgcataaagactacaaatgctctaatccagagttggccaagtatctcaccgaggtcgacttgatcgaagttcaacatgtctaccgcaaagacaacatcgaaccaaacaacctcgcacgacacgcgtcaagatgagaaccactggagcctggaacttttctggaaaaaggattgcgggtgtaaggttaaatcaactcttgttgttagagaaggaatggaaactattggtaataaacccattaaacaaattcacaaatattaatactacttttttaatgcatctaaagtagatattttctaagcaatgcaatacacaatatctatgtttctatttccttcacctaataaatttcgatccttttgcatagagatgggcattgggtgtggaccaaccttaaactggagtgaggaagtactacctacaattcagcccacaccttctaaaagtgctatgagtggtcggtctccccatgtgatctttttaatttttccatcttttttcccctctttccttttttggcaccatagtaagttttatctaccttgggtttatacgttgaaagtttatatacccgtttcaattcgaatttagattctaatctttttatatttctaaatcaaaagttcacatactattttcaaattcgaatttggtttccaacattttttacacaatgtttctacacataaagtactttatatgtgcaaagtttataatgcatatattttttgtgtataaaatctatacacaaatactccctctgggctgataatacttgtcgttttagacaagggtgaggtcaaattttagaatctttgattataaattatttttaaaatatttatctttcaaatatggtgactacatgtatagattagtcttgaaaagtactttaataaaacaatatatttgttaacactttttgtcagggttacgggtaaggtataccctttacccttcgatatatgccgcgtatcggtatggtatacctgcgcatatacggacactctctgcatacattaagggaatccatcatggagttcacagatggaaagagtcctactcggacaagactgggtcgtcagtgcatcgtgcagggtccgatgtctccgagttctacttggaaacggcgtgacctgcgatataaaagggatcccctgggaggacctaaagggggaatctaatagccaacatcaccaccacagcctacgaagtcggagcctgcggaagccagattgccgagaggtgtagtcggattaacccgatacgatctcgtcggtttcatcgagttccatctttccctttgtaacttgtgatttccatcatataatcccataccaactggatcagggctattacctatcaaggggcctgaaccagtataatcttcgtcttctgtttgcttgatgtcgtactacgtagacccttgtaccagcgtaccccaatactctctatatccggtctacgggtatcacccgtcgacagtggcgcgccaggtagggggacttggtgctcaaggttctactactatgtcatccagcctcgtcgacaacagcgtcaacaccaacctcaactacgggcttcctgcctcaacaatgctagcgtggactcaagtcggcgaaattgtctttccggtttacaccacgatgccgatctcagctgggccatcgatgaccagaaacgagaacgcagtggctgtaacccaagacggctccacgtcgaaagttcctcccggcgaagtagagaacggaacatcgacgacatccgaactcaagaagaattctaatgcggccaaaccttgtcgttccgacaagaaacacaagctgacgagaataacttccaaagcgacagggtcctggtgccctattcagaaatccaggaaacatactttgcaagcctgctgggttttcctcaacgcccgcaccaagattcgcgcctgcaaggagcgtggaattcagcgtgtttctccaactcgtggtgtgtattgtcctattcacaagacaaagaaccacgacctctcgagctgtaaattttttctcagcgtcacaaagatgccatctcccaaggttcagcagccaggcaagacccttagagacgaagacaaagaacgaggaatgacgctgaccccagattgtttcatcgatgttatcgacatcggttcttccgaaccgttagtcctgcacctacttgaggactacgactcctcgtcgacaagtacgcgacgtgaggtattggctatcgacgagacaggcacattggcacgcgctaacaccggggcggaaaatatgacgtctacaccggctcagcacatcaggaccctcaacgcaatactgagggagaccccttatgaccccgttctacacgatgacctcacacaatagacggaacggttacgggagtcagtgaccaacctcagcaacgcgttcgaagaggccgccgctgcaacccacccggaacagcaaccaactgctggtgccaatggcgaaaaccccgaacagcgggaatcaccctatcgagccagccctccacctcacggcaccagcaatctctgtgatcacccaaacggtaaccgagaagctcgtcgcacacgggaaaacgagaaccgtccccggcatcacgtttcttcacgacatcacgacaatgaagaacgaggacgccactcgaacgaagaccgagactgtgatcaccaccacaaccgtcatattcgcgacgatcgtgagcgacggacgccggccgataccagtcgagggcgccgccatcatgacgaagacgacagagaacggcgccgggacaacaacggagggcgacgacaggattctcgagaacacggccggcgttctcgtaatcctacaccagaaccaagcgacccatcgtcgtcctcatcttcttcctcctccacatcgtcagacagacatccacgaaggacatacgatcgccgacaacccactgcccccagtgctgggtgtagggctttcggtcgttcgttgcacgatgtccgatggcctaagaggttccgaccgggagcagtagagaagtacgatgggagcactgacccagaagaatttcttcaagtctactccacagtactctatgctgtcggatcggacgacaacgcgttggcgaattatttgccaactgcgttaaaaggctctgcgcgttcatggttgatgcaccttccgccctactcgatttcttcgtgggcagacctatggcagcagttcgtcgccaacttccagggaacctacaaacgccacgcgattgaagacgacttacacgcattgacacagagctcgggtgaatccttgagggaatatgttcggcactttaatgagtgcagaaatacaatccccgaaatcaccgatgcttctgtaattcgcgccttcaagtccggtgtcagagatcgctacactacccaggagttagcaacgagacgcatcacaactactcggagactgttctagattgttgagcgatgcgcccacgttgacgatgcacttagacgcaagaacgacaagccgaagaccggggtcgagaagaaatcaaccacggacacacctgagtcaagcaaaaaaaaaaattgcaagaacgcggaaaggaaagctcaagcagaagtactcgcagcagaatatgctaaccctcccaagcgcccagacccacaaggtagtgacgcaaggaaagcatggtgtcccatacacaaattgaacagacattctttggaagactgccttgttttcaaaaaatcgctcgagaagcacatgacatcggaacaaggaaaacgagtacgcgtggtcaagaaggatacagagatgaccgctcaggagtcggacccagcgtatccagactctgacctccacgtctcacacattttcggaggctctagagcgtactcctccaagtgagagtatgagaaaatggagagagaagtctgctcgacgtggcagggggctgcacccaagatgaagtggtctgaacagaagatacaattttcggaagatgaccatcccaagaccgccgttatcccaggacgctatccgatcgtggtcgaacccactattcggaacatcaaggtcgcgcgggttctcatcgacggtggcagctcaatcaacctcctcttcgccagcacattggacgccatgggaataccacgaagcgagttgacacccactgatcaacctttccatggaattactccccagtcttcgtccaaaccaatgggcaaaatcacgctgcctatgactttcggccaagcaaacaacttccggacagagcagatcacctttgatgtcgctaaattcgatacagcgtataacgccatcatcgggagaactgcacttgtgaagttcatggccgcatctcactacgcgtatcaagtgctcaagatgccagggccgaagggaacaatcatcatccaagggaacgcaaagcgggcggtacaatgtgacaagtggagcctcgacatggtcgagcaaacaccaagtccacccgccacaaccgagccacccaagaaaatgagcaagacaaacaagacgctgaaaccggacggcgcaatcacgaccgttcctctctctagtgccaaccccgacaagaccgtcaagatcggggcctcactaaacgagaaataggaactcgcgctcatcaccttcctccgcgacaatgctgacgtgttcgcttggcagccgtctgatatgccgggggtccccagggaggtgatcgaacacaaactcatggtgcgacccgatgccaagctagtaaagcaaagactgcgaagatttgcaccagaccgaagataagccatacgagaagagctcgacaaacttctcaaagctggctttatcagagaagtacttcatccagagtggctagccaacccagtcatggtgcggaaggccaacgggaaatggagaatgtgtgtcgacttcaccgacctcaacaaggtgtgccccaaggatcacttccctcttcctcgaatagaccaactggtggactcaacagccggctatgagctgctgagcttcctcgacgcttactccggctaccaccaaatcagcatggcgagagaggatgaagagaagacagcattcatcacactgttcgaggcatacgtggatgacattgttgtcaagaccaagaaaagcgactcattgattgatgacctacgggaaatgatggacaacctccgacgatatttccccatgctcaatccagagaagtgcaccttcggagtaccgtcgggcaagctgctcggcttcctcgtctctggtagaggaatagaagtgaatcccgagaagatcaaggcaatcgagaacatgaagtcgcccacaagactcaaggaagaacagaagctaaccggatgcacggcagcactaagcagattcgtcgctaggatgggagaacaaggacaacccttcttcgctctgctgaagaagcaagataaatttgtatggacacaggaagccgaagaggcatttattgcactcaagcgctacctatcaaatccccctgtactcgttgctccccaacctaatgaagaattattcctttatattgccgccacgccatactccgtcagcactgtaattgtcgtcgagagagagaaagtccaacgaccagtatactatgtcagcgaagctctccacgatgcaaagaccagatatccacagatccaaaagctgctctacgcagtaatcatgacatcaagaaagctacgacactacttccaagcccacagagtcacagttgtctcctcattccccctcggtgaagtggtgagaaacaaagacgttgtcggtcatattgcgaaatgggtagtcgagctaagtcagtttgatgtccactttgtaccacgaacagccatcaagtcccaagtactcgccgattttgtagctaactggaccatgcctgataatcaatcaaacaaccagatcaacaacgaaacgtggacaatggcgttcaacggtgcactcaacagccaaggagcaggggcaggattcatcttgacatctccttctggagatcaattcaagcacgtgatccacctcaacttcagggcgtccaataacacagccgagtacgaaggactactcgccgggataagagcagcagccgcacttggggtcaaacgactgatcgtgaaaggggactccgagctagtcgcgaaccaggtacacaaagattataaatgctctaaccctgagttatctaagtacctcgcaaaagtcaggaagctggagaaaaggctcaatgggatcgaggtccgacacgtataccgtaaggacaacatcgagccagatgacctagcgcgacgtgcatccagacgagaaccactcgagcccggcacttttctggacatcctgacgaagccatcagtgaaagaggcaatcagcgagatcaacacagccgcccccgacatcagctcggaggccacagaggcggaacgcgccatcgccgatatcgagaccacagacgacttgcacaccccaccgatcaaattcatcaacagcaaagagttgcccgaggacgacgcagaggctgagaaaataacccgtaaagcaaaaatctactacatgatcggcaacgatctatacaagaaagcgccaaatggagtacttctcaagtgcgtctcgtccgacgacggcagacaactcctcctcgatatacatgaaggcatctgtgggtcacatgccgtcggtcgcacattggtcgggaaagcctttcgacaagggtttttctggccaaccaccctcaaagacgcatttgacatagtccagcggtgtgaagcctgtcaattccacagcaagcacagaaagctacctacacaagcgctccagaccatccctcttacttggccgttctcgtgctgggggctagatatacacgggccattcccacgaggacagggcggctacaagttccaattcgtggcgatcgacaaattcactaaatggatcgaagcggtacccacgggggaaatcaaggccgccaacgccatcaagttcatcaaggggatattttgcagatacagactactgcatcgcatcattaccgacaacggctcccagttcatcagtgccgacttccaggatgactgcatcgggctgggagagtcaaaatatgcttcacttcggtttcccatcctcaaagcaacagacaagtcgagagggcaaacggcatagtactacaagggatcaagacccgtgtctacgacaggctcatgtcacatgacaacaaatgggtcgaagaactcccatcagtactatgggccatacgcaccacaccgacaacgtctaacaaggaaacacccttcttcctcgtgcacggctctgaggccatgctccccagcaagctacgacatcagagtacacgagcacagaagtattccgacgaggaacaggaggagcagcgaaacgacgatgtaaatctactcgaggaacatcgcaaacgagttgccgttcgagcagccgcctaccaacaagcccttcaccgctaccacgagaagcgcattcaagcacgcatactttcgatcggcgactacgtcctccgaagggttcaaagccaagcagggcgaaacaagctctcacccaaatgggaaggaccatacacaatcacacaagtcttcgaccaggcgcattcaaaattgcagacggtgatagccgcgagttgttaaactcatggaacattgaccaactacgtgaattctatgtatgagtcaataccatccatacctgtaagacaacttacatcatcaataaagcctattttcaggcgcatattacaatcacagtgtgcctacctgacgatccctcacccagatgacacctagcgttgaaacctatcctcatgtccctttacgccatgctgacaaggcgtccgaggaacctaagggatcttcggctggggacgcccagagccgataaggccttgtcggattctgtagagacgaaagaccatgtcagacctggttgtgtaagagttctccccgcgcgtattaaccaagccgcgtaatcggaaatgaactttccaacttcgcggctgggggctaggatcagtgcttgttcaaccgaggcaggtcaaaggtccaagagccttgtcctccaagaaccattcttcgacgacaaggctgggggctagggagagtgtacaactcaaacgatgcccaaagtcaagaactgaggaggcactcttacacactacatccagagtaagaaggactcattacgatagatttcttttctatttcataagatacttcttacaattccgcacaagtccaaaattatattacatttttccctaagatgtctattgcagggtacaaaggctaccaggaaggccaacaccagtccatcgactggaaaacttcctccgcaagcggcgccatcgacttcgccaggtggtctatctccgccgaagtcctccgagaatgagcgaacccttcacggagaaactcgaggtgcagctgcggacgatgatctcgtatgcaagccaacacatgccctccggcatatcggctcaaccgacggcattcctgctttagggcttcgtcaatgcgcttgccgatgccttcgagctgagtacatgccccattcagccacgagatgtagccggccgccgattcctcgggatctcctcggggcacccggagctccctacaaacatgggccatgaacgtgcagcaactctttagataagagtcgaaccacacctcgcgacccctaagtgcctatacggcctggtcttttttcacctccaccatcgccctctcgagttccacgacttcacacttcgtcttccaatattggatgcgacggtcttggtcggcaagtctactctcgaggtctgctcttctattccgagaacacaaaaaccaagttactccgggaagaagaatgaaggagatgaaaaaaagatcaccaacctaaggaggtcatcaccacgcccgtttccacgggtgagttttgtcccatatcgtcctgcgacacaggcgtttggagggtaatcgccggggcgaccaccggtaacttgggctgcccacgctgctggacatcctcgacatcgacatccctacaaacgacaaccaaaagtactcaggaccagggtgccaacagagatcaaggcaacgattgcacgaataaaggcagttgaagccgacaactgttatacaaagtgtagtcgattacaaatgatctgaggccctactcttcaaaaagcgggagaatagactctcccagttcgccaacctcctccatcacacccttacgagcgtcgttggcggccccccggtccaagatctgccgaagatcgcgttcggggtgcgccagtcggacacacgctaggacgtgataggccccagtgtaaatcccgtttgacgcctcctccacgatgctggctgcatgcttggagggtatcgcctccatcgccgtagccagttccgcaagtgaagacgtcagcgagaactcgtcggggttcgctgggatggttgtcgtgacgccacactccccggcgagctgatgaagactggtgtaggtgacccgcagcgacccacggatctccgacaggttgttctcgagttccgacatccggtcttcgagtccccgccgttgccgctcgttaccggccaccagctccctcatcttctggaggtcctcatgaacctcccccaggtcgcgttccagcttgtcagcacgctcgttcgccgacgacgctgccgctgtcttcgcctcctcgatctcgcgactcacgccgcaagtgccagcctcgaggatgcgttgcatctcagcttggagctccccccaggtgaggacattggcagatggcccgcgagcaggtccgagggcactggacagaccgcttggcgtcacttcacggctccttggcgcgacaacaacatcggttgaggttgccgcaggagacgctccggaggccccttcggacttgtcctgcgccgctctcgcctgcgccacccttgcctgtgccgacctgcagaagatcctcaaatcaagccgccagaagataaatgaggagaggatctcgacttctgcttactcacttctcgcctagcgtcaccagtttcctccgccgcggaggtggcgaagacgcgtccacgacctgggtaaatcaagcgcgagttgagggtgacatctcttgaatacgagattaacgagccaagggacttaccggtggggaggatgctctccggcggctgccgagaacggaggtgaatgtccttcccgttttcgggacacgaccgccactagtcgtggcagcagcagcgacggccacgtcgggcgtctcccgagcgatgctctcctttagtgaggccaccgcctggtggtccgcgagcggtccaataacgtcagtcagagggagagcctacaccgcatgaaatcattttccgacccgggaagcaataatagcaaggttaccgagtacactcatgttgattgcggcttcgcgcttagtcgcctccttatcacaaagaggcatggggacgtcgcttgccgttgtcgggccgctgatcatcaattggccgacgcggcgctccacggtggcgtcactcaagcctgcagatcgagaacaaaattcgataaattagggagaacatgcacagaaggggatcaaattaaacacaagaaaaataccccgaggagaaacccaggtcgcgtcctccggcccagagtagtcaaaggctgggtgggcgcgaacctggagcggctggatccgcctactaatgaagtcggtagcgacttcataccccgacaaacctcgcgctcggaggtcatcgatggcatcgatgaacgactgaaaagcaggggtcaaggcgggttttgcggtccaagatgggattttgtctggttgttcctcaggaatgacaaagatcggatctgaatcctctatctgaagatagaacaaccttgcccgccacttgctatgacaagaagggcactggaaggggatatatcgtgacttcaggccatctcgaagtcggaaacccacacatccagataccctggtagattccatccaacgcaactcgtagtagaagcgaaagaggtcgagaaacggctctaccccaatgtaggcctcacaaagatgtgaaaagatgctgaggaaggcaatggaattggggttcaaatggagcagagaaaggccgtagaaattcaagaccaagagaagaaactcagaaggcggaggaagaaagccacagagaatatagtcctcgatcgcaactatacggcccaggacaggttcaggttcagtacctcctggttccctctccatggctccgcggccggggatggcgccatcctcctgtagctttttaagcgacgtgctggtggaggtagacttgccgagatccatcgccgccggagatcgccggagaaggggccgagatgaacaagctaggactttgcaggagcggaggagacaaggaacgcctggaggctggagagcttttttcacaacgggtggacttcaaaatggatcctcaaaatcctcttaaatagacgcatttccgacggtgtgaattccaagggaaggagagagagattaccgccggaaatttctaggtccgttacgcgcggcagtttttcagacttcagtttaaattcactcatgaccgttcggcttcacatggtgttgtcgattgcatcctatctctatggttcgcacaccgagaacgacaacagcctcgacaccagaagtcacgatcggttacacgagtccatttaagcagaagtcgggggctactgtcagggttacgggtaaggtataccctttatccttcgatacatgccgtgtatcggtatggtatacctgcgcgtatacggacgctctctgcatacattaaaggaatccatcatggagttcacagatcgaaagagtcctactcggacaagactgggtcgtcagtgcatcgtgcagggtccgatgtctccgaattctacttggaaaccgcgtgacctacgatataaaagggaccccctgggaggacctaaagggggaatctgatagccaacatcaccaccacagcctacgaagtcggagcctgcggaagccagattgccgagaggtctagttggattaactcgatacgatctcgtcggtttcatcgagttccatctttccctttgtaacctgtgatttccatcatataatcccataccaactggattagggctattacctatcaaggggcctgaaccagtataatcttcgtcttctgtttgcttgatgtcatactacgtagacccttgtaccagcgtaccccaatactctctttatccggcctaagggtatgacccgtcgacacttttatatatattataataaaaataatagtcaaagttgtttttttgaagactgtgcccttgtccaaaacgacaagtattatcaacccggagggagtatttctgcaatgcattagatttttctctattttatttctattttatagtacttatgttttgaattggtttgaaattatgaaggtgcagtgagaacagaagttgggcggttggcacgtgtgcctctggggctcactggcacaaaattgcgtggcgaccacccacacatttggtaaccctaacatcggcgtcaccctaattccacacatacactactgaagaaaccctcttctctcccggtttacagccccttgtaatcctgggttacaaaccgggagaaagaatccggatctttagtcctggttgaaatacccgagatctttagtcccggtagttatttttttttcattgttttttgcagttttgcgtatctcagccgacatccccaaatcataacaacaaaatattatctcccgacatcacaattcatcagcaacaaaataccatctcccgacatcacaaattatccacaacaacaaaatcatccttaagttatagatcaaatgaacaaattatccttaacaaaaatcatccacaaattaagagcaaaagaatagaaaaataaaagaaaatctggctagctatgtgctgcccggccgcctcccctcccggatccggcggaggggaggctgccgctgcccctcccgcttcctctgcagcgtgtgctagagagaggagcgcaggtagagatagaggagagaggaggagagatagaggagagagcgtgtggagagatagaagagagaggatgaggagttgtttgcgaggatgggaggagaggacatatcctacggattatataccatgtttgatcagcgtgggctctgatcttttttgaaccgggactgaaaatgatctttagtcctggtttgtattatcaaccaggactaatgatcatccagtcccatgaaatttttaaaccgggactaaaacatttttagtcctagttcttttcgaaaccgggactattctggttttggccgacccagcaaagatcagttctgcagtagtgatatcactaccaccatgtatcaatgtctgaaattttgtttcagatgattgtcgggaaaaattggcatttaatgtcaaatgttctttacttgttttggcaatgctttctgatagataatctgtcggtaattctttatacgacgacaaatgttctgtgggtaataatattgaccaataaaaacaaacgatctgtcggtattatatttgtgggtcaatctgtctgtttggtaaaagttggtttgccgctaatttttagaggccggcatgaaaaattggtaaatcgcctactgtaatcttatttgtcgttgggctgtagttatggctaatgatagcccgtggaactgggctggtcggattatccctttgctgttggggctcatgctgtcgggaatcatgtgggctttttcagcttttctttggtaggctttgctggggaataaccccatacttaggttgttgaataaactaatatataaaagaactaaaatatctctaagaggatgttgaatatatacagcaaattaagggtaaagatgtaatttcccgttacatacgaataacaaagagaggggacctctcccctattccactcattttcatcctctctcattcactcttgtggtcctcacgggaccaaacttgcactggtggagaagggggtttttactcccggttcgtaaccctcctatagttccggttttttaaccgggactatgaatccgggactaaagatcgctatctttagtcccgggtgaaaaaaccgggagtaaaatatatttttagtcccggttggtaacaccaactgggactaaagatagagcctttttagtcccggttggtaacaccaaccgggactaaagatagagctagattagctagatccggttgctccattattattttcttttcttcattgtgtttttaatatattgttatcactccatccccgtcccaaaatcccaaataaattatccccaaatcctcaaatccccgaatcggccatatccaaatacattacaaaatcttaaaaaaaattacatcacaactttgcaaaattcatcacactatatcacatattcacatctcacatatcacacaaatcaaatacatagatccgaatcataaattccaaaaaaacgcctactgccggccgtcggccgccggcacgccgcccgccgcgaggccaccaggcccgccgccgcgccgcccgcggacgcgccgccatgaggccgcccgggcctacgcccgccggcgtgccgctgcgaggcctccgcccacccaggccgacgcgctgcctggtcgcccgggtccgccccgccgcgccactgccccggctcatgggatgatgggggagggaaaggacgagaggagttagaggagaggaggaggaggaagagaaagagatgaggctagggagaagagataagggaggaagtgataaggctgcctgtctcgcagatgtctcgtactcttcacgcacatgccgatctacatcaaccgggactaaaaatagatctttagtccaaagataaaaaaagtagctataaacttttgaaccgagactaaagatatctttagtcccgatttttattgtaactgggactattgtggattttggctgaccgactaaagatggtttctccatcaatgttgggacttcctcccattggaggaatgccctagccatgcatgttgattttgttccaacaggcttcatttcttagctgggtttcgctgctgctgttctttcttctttggacggtttcgtgccggctgcggctagtaaggcagtaaaaaaccttgtaaaatgtttgacaaaattgttattcccattagagtgggtgcatatgccacgatactgagcttgtggcaagattgcatgagtgcccgtttaaatcatcatggagggcgacgatggtagaaacgaagggaataatacaatgttttcgcgtgtcgagtacacaacataaagaaagtggtaaatacggttgctcatgttcttcgtaatcagttcgatgatctctatcgcgtagttggagattgtgggctcccgctggaattatcgacttgttgaactgtaacactttattctatcgttaatatagtacttcatccgtttcatattataagactttctagcattgctcatattcatatatatgttaatgaatccagacatatatgtatacctagattcattaacatctatataaatatgggcaatgctagaaaatcttataacctgaaacggaggtagcactacataacatgatataggtatcagttcgcaagtgttcataggtaccaatttgacgacactaataaaagatatcaacatctatcagaaaaatagaacgggcacctttagatttgcatgagccaaaaaaaatgagagctggctcgaattgagccgaactcaccaaccatgcccccgccattgtcatcctgctagatcagtcttcatccgccgtcgtctctgtcgatcctggtctccggcgccaccatcattccctatcagatctgacggtggaaatgaagaggccgagggggagagggatcgcggcgtcatcactgctgttgccacaccgtgctgtcctcccgcctataacaccccggtaaccacgtacatagagtgctacaccaaaatacacttaaaaacactaactcctaaaattattagaaatttcagcagagtctcccctataaatacggacatccacaacagacagttataagattaatcaataacgaaataattcacacatttccataccatactagttccataaattctacataaaaaacgaaccagaacattaattgacctttacaagttctacgcaaaacttatgctaagcagaatcataatctaaaaccaaattttaatagtgcaataaaatgtgtaatccaagggtattacttcccgcccatgcatgccgatctcaatgtgtacctaaaatcaaataaacacaagagtgagtacagcaatactcaacaagtacatataaaactagaaagcacatacacacatgatttgaaataaagaatgagcagaaagttttctttctttgaaaagaaataacaaggttaaagaaaatagtagttcccatcccgggcatacatgaaatgacgaagtagtttctatcccagacagttatgaatacatcctagcatttgccggtaaagccaagtaagcgtcatcaatgcttacccacaggagcatgaataaaaaaatagatagcacatccatgactcgcatggaacatgaataattgaaaccggaaacaaagaacgagattgaaaccatattacacatctatggcaagcatggaacttaaattatttaaccaaaatcagaatcctgaatattcaaacaagaataacatcgtaaacacaagataaacttgaaatctaaatggtatgaacaacagcctaaacataagcagtcacatatcacatagaagtataacgaaataaatagataggacaaacaatctatgaatcatataattagttcgtcatacacttgcttttaaccttaacggtaacccaacaaaaccggctccacaccagatctctccgcacctgtgaagtaaagctataggtaaaacctctatcaaggaatcattgagactaacaatacatatccaaaacatcatgaaagatcaaaacctaaatttggtttttatctatcgacccgcacaagacaaactatactagtccataccctgttatgtatacatctttcaaaccacctaacgaaaaagtagcaaaggataccacttcggacatctacagaaaattatctacaactttcatgtttagcataaaaccagattaccctctatcatactcagattaacgaaaactagttgttgtaccagtttctgagccaataagcactactatttttagcgtttctcctgaaccatataccggaattgaacgaaaccagcgccattagaaaaatatcgacgatgactacaaatcttattcaggtcgccaaacttgaatctctatgaataattagcagaattgaaaatacggtttcagtctagcggccgataaaataaagtggagctgccggaaacggatcatcatatatataaattagaaacaactaggatctaaaacaaaatacctagcagtactagtttgtatgaaaaaaatgaatttggaaatattcaccaaattccctaatttttcccttcttctatcggaggcagaaaatagcatgagtgggggctaagaatctaccgcttagatagactaaggaagtaaaaagtgtaagggggcatttgtccccactcgctgtaaaattgagtaggggccaaggcccacgcttgttacactctagatccgccccctgcctatttccccttctctccctccttgttcttctcttcttccctggtgcagcaacaagcaacagcacccaatcagcaagcagcagtatctatcggcaagcaggcaaggataggcagcagtagcaagaggagaacgacgcagcagcagcatcaaacagaggagaaggggaaaaaggaatccaaacctaccactaggaataggagaaacacagcagcggcggcggcgacgacgaccggcgacgctcggcgataatggtgacgtccggcgatggtggcgccctaaacagaaaagacggctagggctgggatcgatccatctctttgccttttttttctgttggttatacaaagtctaggaaggagatcaatggcccacatcgattcaacccctggagcttcgttcggactccgattactacaaacttatagtctacttcgcactacatgatgagccctacgcatccacggttcctgatcgactattcgaacaacgatttaaaagttgaacttttgcgtgtttgttctaatatttctcgaaatacactaattcaaaactaggggtattacactgccatcaccgtgtcatgcgccatatcgtgcgccctctccctaccatcgacgcgctccaccatgcccctgccattgatgtgctgtgccggcgatgggggaaggcaagggggagaaagcagcgggcctgcgatgtgggagggtgagggtgagggggagaaagtgacgggccaccgatggggacggggttgtcactgatggttgatgggaagaaagcggtggtgatgagggtggggatgtcactgatggttaagggggagaaagcggcgggcaataggaggaggggggaaggaatgcgaggtgataggatttggaggagatgggcggccgcgatttctatgtgtggcgcgttaggattggctcgggtgccgcagttttaaaaaccaggacctattgtttattatggatgatccttttgttaaaaaaacggttgccatcttttatatagaatcggcactattatattatataagtacagatttcggttttttaaaaaaaactggcacctatatattggtgtcggtttttatttaaatttttcatcctataaagttacgaaatggtaatagctgccggttttaaataaaccggtacctatgagccggtacacataaggtgttttgtagtggtgatataagctctctctttatcctaaaaggaaaattttttattgccattgacatcgattcatttgagaaaattagaacaggtgattctacctcagaatacacagcatattgataacttctgtgatccgttgctgttattattaacagtttaaaatacccacgggactaaggctgtgtttgagaaaggggagatagagaagattgagaagatacgcaaaacgagatgagctattagtgcatgattaattgagtattaattattataaatttcaaaaatgaactaatatgattttttaaagcatctttcctatagaaatttttttaaaaaaacgcaccgtttaatagtttgagaaacgtgcacgcggaaaacgatgtgcaatctatctccaatctccccgaacgaacactgcctaacttcccttctgacatgtaattgcccgtctctttctccccccccccccccccttctgccaaatcctatcacctctgctacggacagatttggttcataaacttctctgtgcttttgcagcagtcgttacgcttccttttggagctttttgctcttgaaatcagccagatatgctagtacaatgggcttgacgtgttcttgacaaaataactccaaattgtcgtgtttatcaatatgcttttcgagtgtcacaaagaaaaaaaacattttgcattgggtatcatccaaccgatttggtgctccttatatataggatgcgtacaactgtgcaaggcgtgccgtgtgcacgactcttactatttggtattctggcggcaattaagaaacacgcaggcggtacaaaaccctggtgcaagaactgagctaaattcgacaattcgttcatattatttgaggacaaacagaaatatggaaccgagtgacattagaattactgtctctatgtcaaaatttagctacttagactgttcagattgttgtactaggtagctatcttttgaacgtaaggagtttatttttggaagtctgtatgtcatcatctctgaagcgttctcgccgtcattaactcggtggagccgtggagggtgcattagttctcataaaaaattaattcctctaagactgtgttcgctccagccagttcctgacctagacagtagtacggaaaacggagcagtccattagcacgtgattaattacatatttgttattttttttcaaaaatggattagtatgatttttttaagtaactttcgtataaaaactttttacaaaaaacgtactacgtactgttaaacagtttgaaaagcatgcgcgcagaaaacgaaatagaaaacgaaagtatggagttgggaaatagctcttgccaacaaaatcaacgctgcatcacatacactagaattctgcagctatcgaaattttggttgtatttcggaaaaacaatgttttcctaataaaagtggcaagtgtagctttctgaacaaaggctcatcaatcgattttgagaagaaaaggtgttacaaaatccaattctaaataaacatctgacttaattaaatgccaccacaagtataataggccacaatgtggtgggtggaaataggaaattgtggaagatgctaatttaaaaatacatcatcagtttgtcctgctaactgttccttttgttgtagcatgctagatttccttttcttctggatggtaagtatacatctaagcaagaactttacactttcagttaacatatttttctgaaagctgcccttgcgctacccatcactattcattagtgatgaccccgtacttgtaaatgaactccaagtgttctgctacacatagagctggtttctctcctcgtattttttttacatgaacttaatcttgctgtccaactttattctgtaactgtctctcaaactcaattatgtatctttctatctactaagtagaaacttcctagaaaatatgctaaagtttcctaaattaattaaatcacacctagaaaatagcatattgctagtgttacaaaagaatttttaaaaaagaacattatcattgatctgtttttgccaccgcgtcctatatatgtcaacattttaaaatttctgcatgtacttccctatatatgtcctttgatcccacactcgtctatttttttcataaaaaaagttagtagtatacttaattagtggcagacagaggtggttgattcatcactcattccacgccactactttttaaaactagtataagtaaaaaaaataatcctaacaatccaatacactagttggtgtattgtatagatgcctctaattcatacattgagtttcaattaaattttatttaaatctctacaatccgcactatggtaaaacaagaaaatacaatccaaacacaaggcacacacacgttagactactggtagtgagactataagatgatgacaataactgttctcgcgttgaagaaacactgcacatttatactacatcggtcgacaaatataagaatcttagtacagatacataactaaaaatatttatactagtttaggtgctgaaaaatcctttattttatgtcagaggtagtacatcatagatcaataaacagttaggatctattttccatcaaatattcaagatgaatcaatacaaacatattttagaaaaaaaatgaatttctgatgtacctatgctaaaaaatatcgaagcagttgtcattcaaacgttgcacatgctttatgaaaaatgaggttagttgttcatcaattccactaactacaacgtctaatcttttattcaaattaagaaagttaacctgaaaatattacatgccactaattaatccactttcagagccttcagaaattaattgttgctattcagttcacttttctattgcctccactttgttgccgtcttccgttccaccttggcccaagtacgcaacctcgtactcaaaggatccgctctccatataaataaaaaaaatgaaagaaaagtagaatctattcccataggaatacggaaggctacgccccggcatggatagtttgtatattcgactaatttgttttgttattcaaagtattgtttccaaagagtatttttcaaacaatttttcattaggcagctgaaatacataacaagatatagatgaaatacatatagttcatatatataatacacatactgttgtttgctaggttcaccctagaagctgcacatattttggctcctgggtccattgcggccaaaccagggaggtaagttgacccatgaaaattgacccatagggtggcatagtaagaccagaggtagtgcattaaaaaggccaataacccaacactacattcatattaatgcgattgtactccttcttcaatgaaattggccagaatatcattgatttggaaggtctagatgaacttcatgcaaaaattgtgaaaacctatgtgtcgacggggcttatccataaccatgacactatgtatcatcaattgtgaactaagacacctcggatcaccgaatacctcgtattcatcattttattgataatttcaacaatgtatcatcaaatgggggggtgctttgggtcacaaggtatctaacacacttagacaccttggggccccgagcacctcgtattctagaaattgcttatttcgtaagttttcttgtggttagttcattgattatcaaatcatcacaagatatgaggtgctcagggtccgaaagttgtttgcacgagtcagtacatatacttacagactaagacaccttcttcggtcctagagaacctcgtattctatctttttttcataatttgagatagtttacaaaaatatatatttagtaacttatttgtagttagttccttggttatgaagtcatcacaaaatgaaaggagctaaggatcctaagtttgtttggttggattagtgcatacagaaccttgtattctgttttttttttaacaatttgaggtagtttgccaaattatattatcataaaaaatgaacaatatatcatcaaaattcattattatgccttgtatctacttattacttactaaattgttccattcaattgttttatccccttttttaaatgacaagtcgccgttcttcttcaaaaagcattgtcttcgagtaatttgggtaagtttgtggtttcacgagcttagaagaaatttggtaagtttgtggcttcataggctcaaatgaaatgtgaggtagccatgtgcattggaaatatgtgattgtgaatgtaactttgtgtgggattttgaaatgaatgtttattatgttaattttgtgatgcatttgcgatgaattgggaaaaaaaactatgatatctgtgcatctgtttttttcataaggcatggctaataattcctgaggctaaccaaattttagattttttttaaaaacctaatcactaacgagtgaataaatacaccagtcatagatagcatcacctgtgacggcaatttgttaacagtgaaatttggtaagcccaaagttaccatcggtttaaaatcattatcggctgcagcatctcggaatcagccgatgggagttatcaagtcgccaatagtcggattcctgctatattcggttaaggaaatcaatctactaaaggaagcttatccctaagtgaccgagtttaaagagaatgtggcatggaagtttatctattaattaagaatagtttgttagtttccttttatctttaggaaagtgtctttagtgtcctataaggactttatcttttcctttttagtttctttcttatccgacaaggactagtatctccctatgggtataaataagtacacccggggacattgtaatctatcttcacgatcaatacaattcggcgcatcgccaccctttttacttctacttttgtttttacgttccggtgggacttggcacccgacgcggggctacatcgtcttcgatctccggcaaagggataagtccaatgttccgccggtccaggcaattgtatcgtctacgtcggcgtcgttcaaggctgcaacagtacattcgacctctcggattgcactggtttggatgatatatttgcctacctattttatcatatgtctctgttaatctagtcttagcatgtcaatttagctcaatcggctgcttctcgttttagggtttttgccggtatcggctaaatcgcgttgctagattagattagcttagacatctaccaccctaaaaactcagtcaatggcttgattgtctaggtattatgtttcttttcatacttagtgttgcatcagttaagtttgatctactaagtcgggattagaaccataatctctagcctgcttcttgattgccaataagggtttcatcggggtttcagccagtgagtaatctggatgttgcatcggctcataatgattgcatatacatataagttggatttagccgatgacaacaaaggtttcactatttaatctaatcttgtggatttcatgatatcggacctccagccgatgtgtactttaacctttgaatcgatgcttacttatcatatcattgctagccgattggtttatataggactatattgttattttattatatcatcatcagccgattgccattatatcattatctatattggatatatagccgattgcttcaaccctatcgctatcggctggtatcggcatcggctgttatcggctattggctgaaactactccatcggcttgtcagccgatcggctgttttgatctgctatttgcatatcttgtcagttgcaggatcaaactgactggcacgcccgcatctcatcatatttggacctgcactggagctaagcagatctcccaggccggtgtgttcgattttttcgtcaacataattgtatattagttcgtcagagaagattcacctgacacaggtgtggagtaagtttcccacctctaatgggacgcaaactttccgcccgtcagaggtgaccgctgacgagttgcaaaccatcttggtttggtggtattttgagggctatcagaggtggcagttacctctgcccgtcgaaagtgagtggagtcatcactaaccacccatgtctgatcagggccaatcccgtcagagatgagggtttaggtccatcatagttgacttgaccaggagtagtgccgaacgagtaaacgatgtactactaatatagatggccatgtgggctgcccaacacggcacggcccaggctcggccgtgcctgggccgaggcttttcgggccggcacggcccggccgacgcaccgggccgtgccgtgctggcccacgtgccgcactcacggcccaggcacggcccaacacgcctcgggccgtgccaggctggcccgaaggcacgatgggccgtcgtgcttttcctcagaataagtctaaatttcctccctcctattgggctgtgacatatgtatagctaaaaaagtctattttacctccctcttctttgggatgtggtatataaatagctagaataagtctatttaaggtccctattctttagatagtgacatttatatgtctattttttgtccctatactttgtgtaccgggcctggcctgctggcccatcgtgccgggccagcccagcgtgctgatggggaggcccaggaacggcctgacggtcgggccgtgccgtgcttgggccgggccaaaaaggcgtgccgtgggctgggccttcagacctcgggccttatggccaactataactactaagaattacatttgtggcatgcagaagttctttaccgagcccttagttatccctaaatatacgaaggacaaggcgagcatcctacatttaggattaatacatgactacagatttgattagattccatctttacataacgacattattctactaactaaaacgtaatcttgaagtaacgatatattttactaattaaaatgtaccgtgactaagcaacactacggtctatatatgggccattcctagcaggtgcacatcatctgcaggtaatcaggatactgcatctccatcatttatttttttttttggttacagaaaatcgaacctacattgtatataagctactctactgttacaagcatgacattttaacaaattctagtatgttttaaatacgattatgccggattgtttttatgctagttgaaaataaacaatattaatatgtataaatacgtatatgttacagtaagcacgcctctttctcaatcattgtataggaatgtttgtttatgtactaaatgtcttttatagctaccaccactgattgagttgggtcaggtcgaacttctctctatataactccttcactttggactcgtaaagctcacacaattgctacaattgtttgtagtcgatctccattcccccagtaattaggccacaaatcaaatctctcttgtgccctaataacctcctgttataattagccaattgatgatatacattagcatgactcttcactggtctcttctgctgttcattgccattgctttggtttcttcagttgctcaggctgctgttgtggagcacaccttcaatgtaattaagctgactcacactactcgtatatgtgcacgcaattccttccttcagtttgtcattttgttcatgcattagatgtatatatttaatttcatgtcattcgtttacatttatattcatgtgatattaggatgctaacattagttcatgcatgtgataatatcttgtcgttacactaatctatactttagtttatatctacttgttgtttaattaattactctctgtccaccgagctacgtacaggtacgtgccaaccgttcttttttcatttttagattagtagtacagaatactatacagtggtgtatcactcattcatattttcatatgcactattctaaaaaaaaaatttcatatgcactgacacatctgtagttacaaagtcatattttgtttacaagcaaatgcaaaatccttactgttaattactcaacaaatcaccactagctgatgaactaataaacagtaataattctagttagtagagtttttacaatgctccatttcatctgcaggttggcaacttctccatcagccaactttgccagccgccgctgatcatcaccgccgtcaatggccagctgcccggcccgacgatctacgctcgcgagggcgacacggtggtcgtacacctcgtcaacacctcgccatacagcatgaccctccactggtaaatattcaactcatcaaactcgtcacatcatcgatcgtttatgaaggtagtagaatattactagtcagggttttcaatttccatttcggctaaagtttcggccatttctctagaaccggtattttttcggccgaatctttctgaaattttttaaaaaataactgaatttgactaaattcacaaaaatttgagaaaagcctaaaattttggtcgagatattgacttgctggggatccgaaattatggaaatttcagacatttcgaaacttattaattattgcattaatgtaggcatggtgtgctccaacgtggcacgccgtgggcggacggtccggcgatggtgacgcagtgcccggtgcagcccggcggcaactacacgtaccggttcaacgtcgacgggcaggagggcacgctgtggtggcacgcccacgtctcgttccaccgcgccaccgtctacggcgcactcgtcatcaggccccgcggcggcgccaaggcctacccgttccccaagcccgacaaggagcacgtcgtcatcctcggcgagtggtggaacgccaccgtctacgacatggagcgcatggcgttcctcaccggcatcccggcgccccacgccgacgcctacaccatcaacggcaagcccggcgacttctacaactgctccgcccctaatcgtacgtcgacattgctgttggtgaaaagcttggcatgatcagccatggtgtttgacatggtgattgtgtttgcttgcttgcgcagagacggccaagttcgaggtgaggcagaacgggacgtacttgctccggatcatcaacgccgggatgaacacgccgc

SEQ ID NO: 355 - DNA, 586 bp, Oryza sativa
cgtgaatccaatcccttccaagcaacaagctgtaagaacccttcccatcgatgacaaaaaaacgtggtaggaatagtcttactgccgactgtcagctccacatttagaacacctttggtttccgatggattaccaccaaagtctatgagcaccatatttgtcttgatgagatcctcggcatttctacccaacttcttgaacgtagcaaaaggcatcaaatttaccgcggccccactatcaaccatcattttagacatcggcttcccattgacatagccgtttatatacaatggtttaagatgccgattctctgtcccctcaggtttctcgaacactgcctgttctggtgatagaaccaacttagctgattcctcttccacctcgtcgatatcggcttgatcgatcccgaattcggctggcaaggtaaagaccatgttaaccggtgccgtcacaacactcttcccctttgccaacctctttgcctcatcggctgcaacatcatcggctataggaacctgattcttaacacgccactcctgcctcggctttgctttcttcagccgatgattaatttcttgttcgacct

SEQ ID NO: 356 - DNA, 4043 bp, Oryza sativa
ttcaaagaattccacgcctctattgctatgctttgattttagatcctcggctaaaattacatggcctggaagtggccttgaagatgttaggtgaagccttaaacattgattattcaagcactttcacacaaattgctgatgaatttcttgaagtcctttccatgtatgaagagaagtttggcagcacactccgtccaccaccatcaccgccctcttcactggtctttagattattcgctgctagactgaaggagttggagctgaaggagttggagcttcaaaaggattcctcgccctcttcatcagtacaccaacgaaaagccaaaaacgagttcaacaagaaatacatcgagactccatgctcgttgcgtcttaattctcgtggacctgatcccaatattatcatgtggtggaaggacaacaaactgtttcatgttgtgttagctcaactagcaagggatgtccttgcgtctcctgtgtcgacagtctcttctgcagatgcattcaacatcaacggaagagtagttgaagatcaaagatcatgtctagcaccggacattttagaggcaatcatgtgcctgaaagattttggaaatgctgctactcgagaacaggatagaatggtgaatgctgagtttgctagtgtggtatgccttgatatgtaatcaagcaatccaatgtgttttacctcctatggttccagtgttcagctcatctttgtttctatctatctgattagttaaatgaagacatcgttatgggctttagttacttgagaactgcatggtaaatgctgagtcttctactgatcttcgaggtgatagtaaatgcattctctgcatataactcaagttttctagcttcagtgacttcagttccaattttaggggcagtccaagtatcattgaggttaatttagtccccacaaaatcggagcagtttatcacattgaaagccatagatttccatggaaatccatctggttccatcactggtgctaggtaatacgagactgttagttggtttaacacagtggcatgcattacagaacaagggagcatgcatttcatgacagaaaattagatggctttttgtgaagtgcatgtacaccgttgaaaaacgcatagaacgtttggtaagtgaattgttgtgaatgcattgctgcgaatctacagagtacatactggtatgtatttgacaaacttgaatgaaccaagtacgttgatcaaaatcttgccacattaattaaaagattgcaattattcatgtcatggaagattctgggaaccaaataaataggagaccgggtttcatgttggtagaagctagaagcctagaacatgtaccatttcctttttgttttgcaatgctgtttcccttactactgacatctttccatgtcctactttaggttacggagacattagcaatttagacataccacataacctgtgtctgtcttatcctacaaggccagatggatagtaccttttccacctcagtttcgaggtttaagttctagttttgccactgaacatttgttgaacgtttggtacaatatcaagaattactcgtggtggacataaaaaatcatgaaataaatttcgaaactactatctataacatcagatccatcaccactgattggacacttcttaagaatgaggcaattgatttttgcgatcttacaatctagtgatctctagactctagtatagaaatgcaaaagcttctgagttttccatcgaggaacgaacgatcccttatacgaattgtcatcgaagttcttcaaaatatcagtacaagtgtccttgtccttttctgccacaaaccatatatttttcctccctttctcaaatcatatagatttaatattgtcaagttatagatttaatattatcaagtttgtgggaatggtgttgcatgctgtcgcctgagtttttgtagaaattgtgtgaagctccaatgattatcttacagccttcaacatgtagatcatgggttccgagatcagatcaggaggcaagagagtcataaccaggaattaggcataattctccagaggaatcaacaattaactcagtaggtacttatctactaaatgaacgatgttttcgctggtaatggcagtagatactggtaatggatattgctcaagaatgcatgatctgttttttttgtcaagaagcagagaaatttgtaatgattattttctactgctaaattttgttaaaatgaataataggttatggcacttgatttgtacctagaaaatgccatcttaagtgtttccccctttcttttgtccattgccgtttggttactcactagcccttaattttcatttaaaaattttcatttaaattggtgggtctaatattatacatagttaaataaaattgatcataaaacaaacaaaatactatgggtcccacctctcatctttctcccgtggtcacgtacgtacatgtgggtatgtagtacgtacggctccctccattttttttctttttttttcttttttccatttatacaattgatatatatatatatatatatatatatattaaataatcataattttacaaacaaagaatataccatcatataactctttataaacataggtaactaaattagctctacaatctttgaaaataaaatttacaccattatatgtttacccattaaatcaataatataagatagttttcacttaaaacagtgtactcattactttgtattattattctcaaataatgcactgttttaaaataaagtctacaccattatagtgtgcacccattaaattaacaatttaaaatctatattaactaatttacatttatactagaactggtggacccattatttaaatcatcggatctattgttaataaataaagtgtccaaagttttcttttttttggcatgctgcacaatgcacgtttgcacttttgcctttcgcactttgtgacaaagcatcgtgtctgaggcatctaaggtgatcatgactgctgcagcgctaccgctttgccacatatcaaatcgtatatggagatgattaattttgttaataacatgaaaagaaaattaaaggtgtgatgcagtgagagaagaattaagcaccgtgggttgagtttttctagcacttaactctatttaacctgaaaccaagagttgattacataattattataatgtattgtgttatatcgtatttggattttctattatttgatcttacagttgaaataaatcattatgttataaatataagcacaatattagtgaatatcaatagaactcttactaggaaaagagtgttataagggagtttaaggccgtatttttttcctattccatcttttggatttttgtttgcacgctccacgctccacgctttccagtataagggagtttaagggttttttgtttgcacgctacacgctttccaagatcctaaactttttaactttttagaagttaattgattagtttataatctcaaatagctatcacataaatcagataattcatcaattttagttgtcctaaatcctaagtagtacatatttctttcatgcaagtcttggtgatcagtaaattggtgatcaacacttaatcaagatcgtaagatatcaagatcgtaagatgaatctgtgagagctactatgaacaattgtaaataggtgtcaaaatatgtactacttctaatggctatcacataaatcagataattcatcaatgtcagttgtcctaaaccctaagttgtattttttttttcatgtgagtcttggtgatcagtaaattggtgatcaacgcataatcaagagcctaagatgaatctgtaagagctactatgaataattgtaaataggtgtcaaaatatgtactactattaattagacttctaatggcttgctagcattgtatataaacatggacgaagctagaacgaatattaacatatatcccatacatatatattacatggttaatattctaatcacatgtggtaagtccattaaatttttttaaaat

SEQ ID NO: 357 - DNA, 2811 bp, Oryza sativa
aattacatagggctcgggtctatttatactcgagaattacaagatatgtccataccggacacgactattatctctaacaaactctaagataccataagtctttgcggcagacttttgcccaagcatatctctaaggaaattacataaaatatcataattaatagatacaattgccttctctggactctatgcatgtgcggcaatcatcttgaagcacctcaattcaacccgatgtcatacaccaagttgtattgtcggaatcggccgcatcggcttacctagtccgactcagacccagccaatcctaatcgtagccgatctggactccagccgattcctgctctattcttgaattcgatctccgcctttgacttcacttcgatctaatcttctttcccgatgccgatattaccaaatttggttgttaacacatgccccccaagtccggaatattttgtaatgtttcggatttgctgtaaatcgactccgagcaagtttcgcactttgccattttctgaccgttactgtcgtgctttaaatactaaccgttaccctcgagaagtctcacaccgtcctcctccgttttcaccgctgaaaccaactttgttctcactctctccggcgatccccccgacgcacaaggctatccccaggcgattttgtttctgatcagatctccgcctgcggcgatgtcgtcttccaccagcccgtctactgcgccatcggctgagtacgctgaggtaagttctcaccggctagatcccttttcctcgcatgacatcgatttctccttttcttatcatgttttctgcttcccggttcctttggatttgcagcacctttccaacctagtcgcgattcccagcctatcgcacaaaaaccactattttcttggcccaatcggcaatcttgaccccactgatttcatcatcggtgaaaccaacagaatcccctttagactagccaaccctaacctgggtcactggaagaataccttcaagtcttggccatctctcgaaaaacttaccccctgataagagctggaccacctggtacctacgcgtatcggctagtaagaaagttcactgggatgagattgggatcggccaagcgcttgctctcaccatagccaattctgctaaggatgaacctctgatggctgccgccacctatttctggtccaacaccatcaatgccttcttattcaaccaagggccgatgactccaactttgatcgacatcatcatgattactggattagatgtaacttcatcggctaaccctatgagtatgaacaccaagaacctatttgacttcaagaccaaaagcataggagggtggtctggttatgtagcggcatacatgggcaaagggcctgtcactcctcgggagcacgtagctttcttgctaatgtggctagaaaagtttctcttctgtggatccagctgtggtcccacaaccaattggcaatttgtagccgaagccttagaatcaaagaaataattccccttgggaaaaatccttctcggctatctataccaaatgttgaacaatgcatcggctaaaatagccgtaggctcaatagttggagcaggtggatcatggtggctgctgcagacttggttaaacctgatagtcatgaaggttgtcaatcgaccctctgtgacagaagctgaattaccattgccagagccgattgtaggagacgatggagaagaacgcactcatcgcagatgcacatcatacggagaatatgcatccacaccaaccgatgctggagcgaagctatcggctgagctgctcaaggactggttctgcagcttctacgaaggttttaagaaagatgcacggatctggtttccttatgaagacttagtaaatcttgaacttccatcagactttagatttgaagacattaatcatgaaaaattccaaaaatccagagaagttcttatagctgcaatcagcccatgcatccttcctatcggtattcaccaagggagaaacatccaagtctcctacgagttttatcacccaatgagctcggccagacaacttggattgggccaactcccaatcggcttattatttgccgacaagattcagtgccgaggaaaaatcacatccactctaatgatggatcggctacttaacctaccaggaccacctctgagcagcattgataatattgagttggcaggatttagaagcaaaaactttgacagatggtggggtgtatggaagctgcatctatttcatcaatcggcctcaatgtacatgacagatctattccctgatgtcataccctaggtaaactttgtcattactaaattgcataatggttaaccgattcattccttgactaatcttttgctcctattctgcagacaacagagtcctcccctccacatcaaagtaatagtggcaggaacattgaatatgctacaggtctaattccgaatggaggtggactatctccctgcgttatcggctaccatgcccccaagacttcaactctccttcacgacctaaccagggaaccagccgatgcaggcaagaaaaggaaaaccagatcatcggccgtgagtaccttggccttagctccaaacaaaaaggccaaattcaagaaaactaaaccgactgataagccgactaatgatctgcccgccttggatccatctattgaacaagctctagatgaagaggaaattggtgaagatgttgaccaggctgtagccgaaatgagtgacacagaaagaacaccatcggcttcacccaagcaaacgcctccaactccttctgcccccgttc

SEQ ID NO: 358 - DNA, 791 bp, Oryza sativa
aaggcagggatatgcatacacttgcaaatcagatcagatcagatcagattgattattgcctgctcctttttggatgctactgtagcaaacctaccagcaaaaaacccaatacctccatttatggaagaggagtacacttgccttttcaagtatttggacttttgcactgttgctttgcctgcaatttgcaaaaaagcttttgtttgattatgggttgtggcacaggcactaaacatcctcaaatatagtgctactccttttgatttaaatctgtagataatactaggtcggcatggttcaaacttatggaatcatgatgccactgaaattttttttggatggaagttgtaaaagttgaaacctgccttggttgaataagcactgatcctagcccccagccgtgaagttggaaagctcagtttctgattacacggcttggttaatacgcacggcgagaactcttacacgaccagatcttacatggtcttttgtctctacaggatccgacaagcccttatcggctctgggcgtccccagccaaagttcccttaggttcctcggaggtcttgtcaagacggcgtaaagggacagtaggataggtttcaacgctaggtgtcgtcgtggtaagggatctctgggtaaaacacttggcgatattgtgtacctgctatcaactttgttgaaatagaggtagtaggagagtcgctacaccgctggtcgaggaccaggtagtagtcgtaactcgaccacttaaagtggaaatgggtaccgagctcgaatatcaatatcgc

SEQ ID NO: 359 - DNA, 12217 bp, Oryza sativa
  unsure (1)..(12217): unsure at all n locations
aaggaaagcgcgtcccagcgtccagccaaggggtcgtaggcggcaaacgagacgccggcgtcggcatccgcgtcgtcgaggagcgcgtacagagacaaaaacggcgggaacgacggcgcgtacatgagccgtctccacggccggcaaacggcgtgcaggagtcgcggcgggagcggcgagaggcaaaactgcgccaggtggtccggcaacccggggagcaacggctgcggcggcgtggtggtcgtcatcgtcggcgggggggcggcgccaccgcctcctattccatgccgccgtccatgggagcagcagctggtagcgaagggcggagccgcttgtgattctggccggagaagaaagtgatcgccgtcgtggtcgtcgtcggcggcggcggcttgcagtaggggcgcttagccgcggccatcatggtcgcaatactactatatcagaggaggaacccgagttgcttcagcgagcacggcggtagcaggagcagtattatattgggggcgaacgcatgtgcgtaggcgaggtggtacaattaatccggaaaggttggggggtgcagtgcaggggagggggaaggcttgaccacctcccccatacggccatagatatgggaacatgagaggagaggtcactggtcagcttgtgtttgtgtggtgctaagcgaagctaacacagcagcaacatgtatgtacagccaggctgcaacgcgggtagccgcgacgttgggtcgccgttgcctccacacaatgtacagagcacagctgcacaggcccatgcggctagcttttaggcacgtacgtgtacacatgcatcaggggactcaggatcactcatcgaactagctggaaattattatagcgttggtcgtcgttgcaaaaagcaaaagaaaacgaggattttttttccgtgaacgcttaaaagaattacatgttaatatattataaaaaaaatctgttgcaaaacgcaatcagccagattggcttttgccaagggaagagaaaaaaacacaaccaagaaaaagggaagagaatactatgacagctaaacgcaactctaatcagttgggagagagacagagtcacactatactcccaagaaatttctaaaagaagcaacgccaactaacgaccacagatgacccttcgagagaatggactctacaaccactgagaccgaagagagcgcagagtcgaagagcctagaggaagaacatttagtattacctttcttccaaaatatatttttttatattataaatctaagatacatatagttgtttagatttatagttagatataattatattctgggatggagggggtagtacttgttagttttagttttcactatttacgtctacaatgcgagatcgagacattcagctgtgattaagtcatctatatctataaatataagtattttctagcatccaaaatttatttataaattcaaatatttctctattactattttcccagtccaacatctcccaataattccatgtatttattgatgtgtccctgagcatgatcacttctaggcaggcaaacttctatgagcatcaaagtgatttcacttttaaccttagtgcagaggaaccttatattgattgatggatagaggaagtgcgtcattagtgcagactgcaacaaaattaacccgtacgtcagctgtgattaacaaattaaggataacaaagctagtgcacaactgtgcaatgatggatccactttatgacaacataaaacgaactacacgtcagttaacttgcgtggtcaccatccaccagaaaggaagaaaaaaaatgctgtaaaacgatcgagttgacgaactctagctagcagctggtacacatatacaatctcatttggctgctgctgatgctttttcattctgtgactcaaaagctgcacgatcgggatctcccctgtatcttctcttctgctcttgcactttggacctctcgttgtgctatcatcatacagcaaattttcaacgctgggaaagtactattagaattctatgagtctgatttctttgacaaattacacacttacctacgactcgagattgcaatgcaggtgcagaaagatttttggagaaatcataccttgagaaaacgggcatgaataatttgcatataatctatcagctataataatcttataatctaaaaggaatgaatgaattatagtagaacaggccgctgactggcatataatcataacaatcttgggatcattttaggccaaaaataattggcaggccaccctttggaatttggaaaagaattcacggtaaagcataggaacacaatctgattcgacatatctgagttgggatattcgatggtggagcagatcccattcaaagcaactttctgctctctgaatttggacattcacattctttcctccttttgtttttcccttctcgtttgatatatacggctccctccatccctttattttttaaaaaataaaataaaatttgtgctacaaaaattggcactctaaagtacttgtctcatcaattatctctcattcatatttctcctaaccccatccttaccacatgtcatttaataaaatgttttatattatttctcatgaaactttaatctatgataaccaatttaaaacggtaaccttttagactgggagagtatactatctactcctccctcagtttaatacaacgaatcaagctcaggtatgtgaaatggtcgggtgtgtttagcgattacacatagactttttagttaatcacacatagacttttccgccggccgacggagggacgatgagaattgatggatgatgtatgtgcgaaaaagtagggagcaaccagccaaccgacgaaccaatgggggaggagtcaatgtgtaaaggcagggatatgcatacacttgcaaatcagatcagatcagatcagattgattattgcctgctcctttttggatgctactgtagcaaacctaccagcaaaaaacccaatacctccatttatggaagaggagtacacttgccttttcaagtatttggacttttgcactgttgctttgcctgcaatttgcaaaaaagcttttgtttgattatgggttgtggcacaggcactaaacatcctcaaatatagtgctactccttttgatttaaatctgtagataatactaggtcggcatggttcaaacttatggaatcatgatgccactgaaattttttttggatggaagttgtaaaagttgaaactttatcagtggtgtatgagcaaagagatgtttcagtggtatctttcggaatggttgtaccagtccaattttctctttgctttgcccttatcaagttgatcggagcgaaattatgctcaaacatattataggctatattttaaggccatgtttagatcccaccctaaaatttttcaccctgtcacatcgaacgttcaaacacctgcattaagtattaaatataggcttaaaaaataactaattgcatagattgtgactaatttgtgagacgaatattttaagcctaattgctccatgatttgataatgtgatgctacagtaaacatttgctaatgatagattaattaagcttaataaattcgtctcgcggtttactgacggattctgtaattagtttttttattagtgcccgaacatcccatacgacaccctatataatatccgatgtgacacgccaaaactttacaccactggatctaaacatcccctaagctaaaaaaattcactcgaaacaattcagtttatttttggttgaataaatatcaactttctatgtactgtatcatttaggtaaacagctcttttgaagaaatgaatagcaaccagatatctcaggataggaaacagatcccctgactttgtgcagtttgcagttgtgccactgacatgtgagggcataactgcaaactgcacaaagttaggggatcctcattcctcaggataggagggccatgacgtacggtacagaaagcacagctggaaatggcatgaaaaacattgggaaaaaaaagagagaatggcatacgtgaggcattatgggatagagagagaaagagatggaagaggacgacaagttgttttggccatttgctcaattgctccaaatttttttttttttttgcgtgttgttggttattgaattgaatatttgaatggtgcgtgtagacgtacgtagtgggcaggccactagcagacggtcacatgcgtacattgcgtcaccgcggaaaaggcaccgttcgtccgcatttttcaaactacatatacgtacatcagagttagctaggagtatttgccgactacattcacctcagttatttccgggttttcttattttttgtcttggttttctttaatcattgggggccatgggcgaaggacacgctgaacgcttttaagaagattgctaaatttcgaatgattaaaattgctagaaattctagtcatatttattttatttatttatcttatttaacataaagctagctgaaaggatagctagatttgcacataagcccctaaaaaatgggtacgttataacttgagaacaaaataagcagataaggactacaaaagataagaaaaaagcaatcagggtcttagtcttgcttcttcctctgcatcggttcctcgatcgatgacaacaacgacaacaagtttgcaagaaccatggcaaactgcagaatgtattgccaaatagaaaacccaggtggggcatcttggagatggagattacagttgccttagcaccatataagagcgcttcagttgctgcttcaagacctgtcgcgggagacaaagaagaggaccgaagacaacaggaagatcgccgaagaaagagaggacgttcggcgctacctgttagatgttgggattgaggatgaagccacccacccaaacaaatcaactgctcatttagttgctgacatcttggagggacccaacaaatcacagacaagacgacctcactggaaagaagcctagcaagtacctccatggccagagttgttgagacaagggagatcggatgccgatgacctccttgcattgcacaagagtagaaacatgatgtactcgaaaaagggaaaagcctgactaaacctaggactacctagtagagaagaaatgttgatccctccccctctcttcattggcagcgaaccaccaaattggaggtggaagagggagaggagaggattttgtttatctgcagttgcctggtttcgcgagagctctctcgaaccctcaaattttagtcatctttagcctactaattctctttgggagcggactggagggagagggacaaggggaggctgggacttaccagcggtggtgacaacagtcttcttctatggcgacgagagggaaactagtgagacctagtggctagcagcattgtcggtaaccaactaccctaaattcgattcctcccttctaaaaatatattcgggggatgtctctcccctcgaatctcttttttttccctagcaacagtgagctccttctcttttctagcgcgctgatgacacgccaactctattggagaacatatgaataagggtttagagttggggttaggatgaatggggtgttggtaaaggaggagagtggtttcagcaggcttagaattgatggccgtggtcagcggtggacagcggccacatgtagggcacaaaggtcgagtgggcattaccggatccaccaggttgtaagaagacgcgacgtggatgctaaatatgaagtggataagcagcatgggtgcaagagaagatgtatgataagatggggggcactttgtctaatgcctggcttgcgaaggagaatagggcgggatgaatagaatgacgactgggttgcccttgccagcactagtggcgcggcggggcacaaaaacttcaatatatgtttttttggtttcaattttaacccaacttttatgacatatttgtccacacaaacctgaaaaatttcataaccaacataccctcctaattgctacttacaatactacacaaataggagtattcctgggggcagaatgatcacaattaaatccagtaaaagatctactactactcctagttgggtagttttgtgtggttttagtagtaaaggtagggggagaacttgtatggaggaaaagagctgcatggccattgggggagcaacaccaacaccaacatgttgtcaagttggttgttggtccgatggatcctactggtatggtacagctgcccacgcgctcgagagcgatccaaagaaaagaaaacagaaaacagtcggtgtgattgtgatttttttcccctttttttttgggtttaaataattcagtggtatttaagaggttgctgtgcgtccaaaaggtagcttttggcctttatgcacgcccaggggccatcacgccaccactcatctgattgcgattggttttgtgttatttatattagcctaaggccagtcacaatgggggtttcactggtgtgtcatgcacatttaataggggtaagactgaataaaaaatgattatttgcatgaaatggggatgagagagaaggaaagagtttcatcctggtgaaactcgtcagcgtcgtttccaagtcctcggtaacagagtgaaacccccgttgaggccgattcgtttcattcaccggatctcttgcgtccgcctccgccgtgcgacctctgcattctcccgcgccgcgccggattttgggtacaaatgatcccagcaacttgtatcaattaaatgctttgcttagtcttggaaacgtcaaagtgaaacccctccactgtggggattgtttcataaaagatttcatttgagagaagatggtataatattttgggtagccgtgcaatgacactagccattgtgactggcctaacaaacacattcacacacacacacccatgcatgcttaattaatactccattaatcttgtttgtttaatttagtcgatgtgcaacagtccatggaacgccttttcgcccggattcgttggcacatggctgctgcctcctgctgttcgatcctgcttccttcgtatcgtacgatcgcatctcttcgtttttatctttttaataaaatttatttaagtggaattaaatttgtaaaaaaaatagtaatattatcaaattagatttattaaatgtaagattgatacattttgataatatgtttattttgtatcaaaagtgttgatattttttataaagttgattcactaggaaaaaaatcaaaacagaaggagtagtaaaaacatattccctccctccgataaaaaactatctagtattagatagtacgttttctggtgcaacgaatttggacaggttcaaaaaaaatgtttcatccaatttcagattagttttttttttttagaaacggaggaagtacacagtatggtacactgtatatggatccaagacagcttgcagagttgttgcagctgaaacgtcgccaccaagtctcacgtgctataaataatcaaaaccactaggggcatgatatgaattatggaatggaagcatttgcttttctaggtaaccatttgttgtacggcactagcacaattttattttgggtttttggtttatgttgagcgataaaaactttaacagccaattggatgtcctatttgatttacattattgagagaactattgttgcaaagtactatccatttaatctagtaaaaaatgaatttaacaagtggtctaagcaaaacatcataagagcattttttttacaaaaaaaaacatatattttttaagtatagagaaataatccattgatagattcagattaaacagttttccacaatcaaataaatagttgtatgtaggtgtcgtggaagattctgatggtcgggacgtgagcgacgatcctgtggaggagaaaggaagaaggatcatgattatgggagtttaattagcagcgttgacgataccgacgtgttcttcaatcaaaccaatgaggtgggcttaatcaattcgctagccaaccctattttgacgatcatgttgatccaggttattcgtacgtagattttcctgaagcttccccagattaagtgtgggggcaaatcagtctcaaacatgtcaagatcaaacaatgcaaatttaatttcctcgagcgaatccgacttgaaatttgactgtgttcttgtcccaaattaaaaggaataagaagacggtttcttaactctaatcaaattctgatgatgaaactagacatgatgatcatgttcagatttatcctcaggatttgaattattattattgttttttataaaaggagtacattgtagagaagggatagaaatgaaactgaaaaattatttttttcctttaaaaataaacaaaagggaaaaaaggcagatctttcggggatgaggaccatgtggatgaatgtgacgatgttggtcatgaggcttatcaccttttttatcatgacaggatacccgaaagaaacagctaattagctagcaaatcgatgcggtcctgtccccagaacatgccaaaattagcttttcggcaacttgccccacatgtcaaacagttgatgagctaggcgtacttaacaagttaaccactaattaataattaggcagatgtgtttgaccaatcatatatttgtttgcctttttttttgggagcatgtacatcatcacctcctatcttgtttgagagattaattagtagtcaaagctcaatggtctgcttaatttgtttggaaccacggtgctatatatgcctgctgctgtaaaaaacagcctgcaaaaagtctgatgtgcttggtaactccatcatacatattgtgtgggcgcgtgcttttttttttctagatagcatgcgttaagctgaaagctagaatatttgtttgtcatcagatgattaagagccaaacgcataaacaaatattgaaaaattatcagtaaagcaagattaccatgattcaattcactgcaatgtcaaaattaaagaaagtcaagcatacagaattcattttctgccatctcctaagctcagggaacttaattagagaacagctaccctgtgccatcaacaacctcaactattgacaagctaggggaatgctgtttgtatatgccaacacacacacaaccaagctaaagacccgtgtgttgcaacgggtattgtaaaaccaaaaaacaaaaacaaaaatgacaagtttaatttatagcatagttagttggttagtcatataatgccatatccaaagaaaaagctatatgggccactttggattgatgccaaaatgtgtcatgccaattttttggtagtttgaatagtaaatatgatggtttggtttgaagccaaatgaatggtaatgaccatgcttaatttggtacaattctagaactttcttcaccataatataaaatttggcttccaattggtattaatccaaacacattacctagtattctaccctaccaaaatattggtagtgccaaaatatgcctaggttttggcactaccaatgttttggtatggccctaaaccaaacaagcactataattacaagtttatagcatagttaattgattagatactacacatcagctcgtggcattgaaggcagactcgtacaccacaccactagtatcatttaaaatagaatagataagtacatgcgcggatgcgcctagctagaacctaggtaccatatattagctgttatataaacgatgccggccgcatatgctattaacaaatgcagcccatgatcgtaatgctcaacaaacaaacaacaaaaacggtccaccactccacattatttgcaagggatgattcagtgaagaaaacctgaaagatcaccagtgctagggttatcaaaactgagtggtttcgtaaaatccgcctggttttttgaaaccattgttggtcagtttgtagaaaccggatggtaagttatcagtttttacaagttttcggttagatttcggtaaactgattaggagaggtttttaattaaaaatcaaaaggtaaaccctgagtagtgctgattgatcagtcaatccacaaacaatataatgtgcaggccggccagaccatgcatagataggggggatttgtaattataacactgcaaacattaatctttgctataatgataggataatagtagtgttattatatcgtaaatcctggccggccaacaaataaattcgtcgtgatgcatggtgcattcaccctgtacgccacagtgctggtaattacaccatgcacgccacagtgcatatatattcacaggcctgtttgaaacagaattttacacaatttttttacgcgttgtttacttgattaacgtgataaatcaataaatagtataaccaatagaatataataattttttcaagaactgcggaacaaataatccgtggcaaaaatgaaaaaaaaggtttaaaggaacaggagcttaaagcgacattttctctgaactccccttgtccatattggccggcgtctcactatcatgtcgcacgaatagctcattatcataccattatctaaaaaggtgataatattattgtggggctattcgatatggctagatggctgcctgcaaatacagtaacaaacatacaatctctacggtaaccgctgcagcaacagcgttggagagcactgcagttgggtaaccgaacaccccgtatgtaatgtgttaccggctttagtcctttaaatctcttttcacgggtttttgtgctagtttttttttcttgttgtacctcccgctttcggcgtacgttgcattgtgtatcttaaattctgttttcttctaatatattgatatgtaattttttttcgtgtttacgaaaggtatgtaatgtggatcatgtacaaaaggtacatgtcaatcaattttggcctgctctgtatgggccagcccataggagaagaagacgactagtatgtttgggcctttcggacggcctagttgccaacctgcatctgcaccggcaaggctggcccgctgcacaggcaggagcgggcttaagaattcaacaaaataaggccgggctaaatatctcattgtccaaaaggcccaataataagaaaaagaaaaaggaaaagaaagagcgcctccctcccatgtcggccatggacagaatcctgcaattccagatgtgtgctgcagaaagccggccggccaacatgcatcatgccatcatccagctgagttggcagatgttaactgcacgtggccacctaagcctgccacgtcgggtcccacatggtagtaagtagtaacactaacatacacataatctttgtgctcctttcaaacgcaatattctcaaaccatagtggccattcagattatagccaaaataaatcttaccaaatttttgtaagatttattatatatttactaaagtttggtacttcttttgtcctaaaatgttgctacctatgatgggatttgacctatcataggacaacgaatctagacagagcttcgttgtcctaggatgacccatcctaggtagcaacattttgggacggatgaagtaagaaactaaatggatgcacatatttggcaactctataaaaaaataatatggtttgaaatggcatcaatttgaacaagcctatagaaataagaaaagcgggattcaaatgtcattgaaccttgaagatacagaaaaactacatagacaaccgtttggatgaagtacaggaaaaacacagtatgtagaagagagagaaaaaaatccaaagcaaaaaaaggaattccattaaacatgtcattccaaagcaattttagggatataatcctttcttccagaggtcctcatatgaattgctcccataggattcaaatttttcctgtagaattcatctatttgtcctttgtttcaaaggagacttatgtacaagctgcgcggcgccactgtcaatccatctaaaatgcaaaaatgctccctcatcagtctccctgtaagtattttaccctcacctaccagtaacaatgcacgctttgcttaatcagcatcagaccgatcatggcaacgggaatccgagaagaatgctgacacaaaggtcccatttatttgggcatactactgttcttctgcgagggattattcagagatttaatctaaaatttagataaggncgtcggaagcgagtagcattcaaatnnncaccac

SEQ ID NO: 360 - DNA, 7856 bp, Oryza sativa
  unsure (1)..(7856): unsure at all n locations
ttgcagcggtagagctcgaggatgctggccatggcggcctcccgctccccggtgcactccccggtctcctcgtcatccgcgtcaagctccttcaccgcgaacacatgttccgacgaggaggagctcgcctcgggcgcgggagacgaacacctcgtgcgcgtgcgcgtgcatcgcggcgtccatgtggggcggaagagccatgagcgccgaccgcccgtctgcccgtccccgcgccgccatgagcgcccatccgcgccgtttgcgtcgaccgctcgcatgcccacccctgcccaccgcccgtcccgcgccgccgctgccgcttgacccgcgcgcccctgccgaccacctgccgtctgcaccgccgctgccgcttgcctccgccaccagcgagagagaggatgagtgagagagagaggagagagagatgagagactatgacaggtgggtcccacatttttttaataaataaaatgctgactggactgccacgtgtacgccacgtagaccaaaaccaccgcggattgggtcgaggggggtaattcgtccggtttgcatagttgagggtgaagaatgcccggttttatggttcaggggggtaattcggacgaccgtgatagttccgggggtaattcgtactttttttgtggttcaggggggtaattcggacgaccgtgatggagtatttcagttcactgcaacattagatctatacatagtgaaacattgtgaatgcactagatgaaacatttttttttgaaaaaaaaccaaatttccttaatagaggatttccaaaatatgtgggttttttttttgcaatagagctgtttgtgtgtggacacgtggtgggctaggtggagcgcaggcatgcgcgcacgcgcgggggggggggggaagcgcccgaattttcctcccccgcccggtggcccgaacggaatcattatccatgttttcttatttatgtttcgcaacaggatcttaaattcttaggcatagggtagtgacggtacttctacattcagttcgtcgaagaattggcatagaatttgcaattttcaagatttcggagaggaattgaacttttgctcaagttctttgggagttttggacctggatcctttattttcgcatatataggtggtgttcttttcttccgaagatgaagactaagttttttacacaaaacgaggtggtattaacgtatgattgattaagttttaattattacaaacttgaaaattagattaatatgatattttagagcaactttcatatagaaagttttcgcacgaaacgctgtttagcagtttgaaaaacgtgccacagaaattttaattttcattcaacttttgttagagaaaagaacaacttttgctagagaaaagaacagaaccatatagtctactgtttttttacaccaaccatagagtctcctcttgctagactttgagctgaacgccatccgactactccgcaatccgggggggggggagatggtgacacgtgggctctactgtttgttttgtcgcgtagacaccacgtcgattttgctatatatttgtcgacaaatttttcccctaaaatttgacagatataattacagtacaatcgtagtgtaattacactgtaacttgcatgtaattacactgtaactatagtgtaacttgtatgtaatttttaaaaatctctccgtaacatgttatttcggtaaaatggaggtcgtgggaacaaattctttcatatatgtatgtgctatgatttgttttcttcctcaccaaaacaaatcttgtaatagatctaacgattcaaaattatgtgaaacttacatataagttacgctgtagttacacgcaagtcacaatctaattacactacgattgtgctataattacatttgtcaaatttttgaggaaaaatttatcgacaaatgtataggcagtcccaaaatctctctcaaaacggtgtggggaggtaaattgattcgctgtgctcgattttgccaattagagacgaaaatcaaactcagccaatggttgagggatccgaaataaacttttttccttctgtaggagttgatcgttggaccaaagagaaagtatcttaggcctttgaactaactcctgggtctcatgggctggctgcgatgcggaatgcatgggccttgggaaatgggtgggccaatgtctcttcggcccggtttgaagcccaccacaccaccttatcttgccgacgccgcatcgtcttctcaatccccaattcgcacgcggagctaattctcttctagggttccgacgaatcccgagctcggaggccgatggcgtcgtcgtcgtcggcggcgtctgggaagtcgcggccggagtgcatcaactcgtcgaacccgttccacgagtgctccgactactgccttcgcaagatcgccgaggccaatgagcgcatcgaggacgagcagcggcccccggtggaccgcaccgtccaccccgactgtatcaacgccttcaacccctaccacgtctgctccgagtactgcttcaagaggatcgccgacgccaaatcaggtgctagccccgcctcctcctctcgcttctgtacgtattttctgatcggagcaatttgcgccatgggtgatgtccatgaatccatactatagtggtaattctaattcgaggctaggagtaattcgattcgtcctgagcctgtattgggtgcttatggagtgattcattggcttcgatttagggttggagcgtgcggagcaagaaccgccttctgcagacgctggcaaatccgacgctgcccaagctgagggtggtggtggtgatgatgatgcggagcaggaggacgccggctcagacgacggttacccgcagatgacagagaagcagaagaagctatttgagttgcggctgaagatggtgcggtcatcggcaattccattgttttgtcatagctgttgtctgtgcagtcttgggtattcatctctttgctgtttctcgtgctgcagaatgaagctaggaaggcaaatcagcaagcgatggtggcagagaagaagaggatggagcctcgcgctgagagtagaggtgtttctaaacaaaagtggctggaagacagaaaaaagaagatcggaaagcttcttgactcaaatggcctggacatgacaaagtcttacatgctcgatacacaggagtcggccgaagcaaaatacaagaagtgggaaaaggaacctgcaccatatggttgggatggtgagttccatctctcgaatttcttcattcaatttatattcagaggcatattctgtagctttggtgaatttcgacacatccgtattcatattgctgtctctcatggccggttgtcgttgtggtgtttattatacgtgttttaagctaattccaaatgaattttctgaagttacttgaataattgtttgtcagtttgttacctagtagtatatggcatgttgttcctttcccatcagggtctaggttgtcatatcagtttctttgttttataagtttaacctgtgctttgcaaactttaccaacatatgtttctgtttttcctgcatttaaatattaaacctgcaagtgtaaattactgatgttcttaaacaagattatatgttatatatgctcttgacaaatgctccctataatttttgcgtctagccttcagcaatgcaacatctggttagcatttcttgttacatagtgcattgaatgtctggcaccatgagatgtctacttacatgattctttatatctggaaatccctgatgcttatgttatagtcagaaatcagaaagcatcaaggtagccgccataggcccatggttatagcttgttgtttgaaacaatttgagtttggccatgaactccctttgatctttttaatttaaacctcgtacctctatataaatgggggtgttctcacttgcagttttcaaccagaagaccttatatgatgcatacaaaaagaggaccaagaacattgaggttgacatggaggcatacaacaaagcaaaggaagccgatcctgaattttatcgggacgcttcaagtctccaatatgggaaggtacttgccatcgtaccaaactttgtactaattgaatttaaggcccttctgtcatggagtccttatcgatggcttgtgcgttgaacaggtgtctaaggtcccggaagaaaacatagacaggatggttaatgagcttaaggaacgggatgagaaacggaaagcattcagcaggaggcgcaagttccatgaagacaaggacattgactcgatcaatgaccggaacgaacacttcaacaagaaggttgagagggcatttggcaagtatactcttgagatcaagaacaatcttgaaagggggactgccttgccagattagaaactctgcacactctgctggtagagagtggacatgttgtctgtttccccagctgtcttttgcttgtaagttgtaacctatcaacaatttgcttggaaactgtaactgtaagaaagccaactcggatgtaatgtcgtgagaatatagcatattcgagaagttgtgtatccaaaatgagcggaatcattaactatagtgattttgcaatgtattcaaatgagcataatcattaactgtagtggggtgctggtgccccaaatgtcttgcaataagccgcacgtccgaattccaattataacgccggtctgtctagggatggacgagactacaaacttgtccagacagtctagaagatgccttaattgtagctaattgctacaattaaggttgatctagacaaggtcacgaacaagttgctgagcaagagaaattatcggtttgtctgttgccattgctatatggagtatatgttggtagtatactgctatcggtcaagcaagccagtgggtgtaaccgtgtaagaaagtgactgttcctaaccttaattttgatttggatgatggtaattcaagaacgctaattaggccggttgaggtagcagcatcgtgcggcagtgttgggaaatgatttgccttagcatatattggttggctgttcagtcacagttgagacttgagccaggtgaggatttcattttcaggctttagtgtcttgcttactcttcactactataacagtttagtctttttttgagtgtcctgttagaaatatcactctcttgttacagttcttgcgttcacctttttctaggtgatagctaacaaaatgaagatttcactttctaggtttattttacttgatggcacatggtctaagcaagcactgtactctctgcaagctaccaacatactcctacacagcaagcagctcaagttgttctctgagaaacgcctgaaatctgattgaaatcaagttggcacttaactggccaagaaaccggtcatgatagttggagtagtaccattgcttagtttctgtcacacaattgtctgaaaagctttctcctttttggaaggaaatgaaagggaaaaaaaaaagaagtcttgtctgaaagtgtgtgagaatcaggccgtcctgaagccatcactttcagagcatctgggacttgaagaatttggcaagtgaaaaaggatgtagagggatgtggattttcatccctcgaggggatatcccctcattatttacatgtcatttaaatttaaatagttatcaaaaaattttaaaaacaattaacaacatagattaatacgaaatatatcactccacaaacatgcaagaccaaattcaacttatacaagttgtaacaaaaataacaaattaactgaaaatagttatcgcacattcgcaattatattgttatttttgttacaacttatagaagttatatatttcatattaatctatgttgccaattttttcatattttttattgactatttaggtggcatgcacgaaacgagcagatatcccatggagggataaaatcactttcccgatgtaaagataaccagaaagaagaaatgacatcaggcgtgagcgaaacttgccggacgagtggccatcgcaattagttaccagtaacacacaaggaatcatcgcatctcgccgcaattaagggtcgcccgtttttggctcgtttccaccgtccgctagctttgttccatcctgaccgacggcggggaagagctataaacacgcaaatagctcgttggccaccgcgcgcgcgtcgctctcccgcctttcgtaaatgaatgagctataaactttctcacacccagatttttattttttttgccccctactcttctttctctctcttgggttgcgtgtgaccatgcaagcgagagcaagttggcatggacgacaggtgcctacttttcgagctatcggtgcggcgttatttataaccgacaacaagacaaagaggacaccagagccagccaatgtcgccgtcaccatgacggcgaataggactcggtccgtgtggacagccgggtccttctccggtggaaccacggcaaccacaccctatctgcagtggccgatctagaaaaataattcattggtatcataacgtgtctatcgatattataattatagtattgtaatatatgaacaagcagtttaaccataacttttatcgaaagtcgtcggtatcgtttgacaccgatgttaatactgtagattcgcccatacctgccaccgccggtggcgaccaaccaaaaaaagttcgccggatcgatcgatcgatcgacgcatggcccacgagcggatcgatatgatgatcacagacagcatccacacaaaaagggagatgaaaagatgcgaggttctttcgcgcgcgcgcgcgcatggccggagatcgacggcgaaagcagcaaatcggtcattcgccgccgccgttgccatcgcccacggggatccctaccactttggtcatggcttttgggacgaatagaatagaacctaattttggagctaaagcagtaacaacataaaatggaccacggtatccaaaaacgctacgaacattcacattcagattttttgtgtgtgtgtgtgtgtggatcgacaaaaacaaattcttcgctccatcgatccatctcttcttcttcttttgttgattgaaatgaacagaagcatgcatgattcaaagcttttggggggaatttactccaaaaatcaatataaaaaaataatcgagcttcaatctgcggcaaaatcaaaagagctctcgtttttgtacagtgctgtgctgtgttacgtgtaccgaatcgcatatccatgcggagacgagcttcgcctactcggggcgtgtcatcctgggcagcacgtgcagcgacaccacccgcttcccgcccggcgccgccacctcccacatgcgcggcggcggcggcggcgccgcccacgattccctcctcgctgctggtggcggcggcggcggtggcgttacgtccacgatcaacaccttcccaccgccgggggccaccacgcaggccttcccgccggcgacggtcatctccgccgcccccttgaggcggtcggactcggctaccgtcctccagcggtcggcgccccagtcgtaggcggtgagcgcgccgcgctcctcgtcaacgacgtagatggtctcgccgtcgtccgggggcgacgccgccgcggggcccttccagccggcgagcatgccgggcggcatgtcctcccagcggccggcgcggaggtcgaacacggcgccctccttggcgccgggggtgcggaggtttcttcatgcgcaactctgatgcgctctactttgaaaaccacctgttggcgctggcccacggcaaagtcgcttcgggtgggggagctatatttcgtgatgtcaaagncgatgctcgctcagggaacgagctcgtctaaccnngggacat

SEQ ID NO: 361 - DNA, 3505 bp, Oryza sativa
  unsure (1)..(3505): unsure at all n locations
ccagcgttaggattagcanatcncgaacccacaacaaggcgagatagattgaagagagccaattctgaagtatttggttcgtgaacaacttccagaaaaggaagaagaaacaagaagaatacggttaatgtcaaggaaatacaaagtgatagaagggtagttgtacaagagtggagtcactgcccctttgctaaaatgtgtaacaagagaagaaggaagagaaatcaccttggaaatgttagacgagataagagtggaagcattagacaaaatggcacaaagcacaaaaggaaccaaaagctattatgaaaaaagagtgaaaatcaggcaaatagaagaaggtgatttggtcctcaagaaaacactcaatgaagtggctattggaaagttggaatcgaaatgggaaggaccattcatagtaaaaaggaagttagaaacaggagcatacaagctggcacacctcgatggagaagagttaaagcacacttggaatgctatttccttgaagaaattctatgtgtaaaaaaaagaaaaaaaagagaaagaaagaaaaaaagaaaataaaagaaaataaaaggaaacatgctgcttgaagtgtacaataccgaccacctttgtaagattctcttttcttctcgatgttaacacatataaacaggacgtagggttgttatccataatgaaggcccgaacctgtataaaaagttgtcttgtgtgattgtgaatcgggaaaatcctccgcacgcttcggagaggaaaatcaaactcaatagcaaatcgagaaaatcctccgcatgcttcggagagagaaaaatcaaactcgatagcaaatcgagaaaatcctccgcgcgcttcggagaggaaaatcaaactcgatagcaaatcgagaaaaatcctctacacacttcggagaggaaaatcaaagtcgatagcaaatcgagaaaatcctccgcacgcttcggagaggaaaatccaactcgatagcaaatcgagaaaatcctccgcacgcttcggagaggaaaatccaactcgatagcaaatcgagaaaatcctccgcacgcttcggagaggaaaatccaactcgatagcaaatcgagaaaatcctccgcacgcttcggagaggaaaatccaactcgatagcaaatcgagaaaatcctccgcacgcttcggagaggaaaatccaactcgatagcaaatcgagaaaatcctccgcacgcttcggagaggagaggaaaatccaactcgataccaaatcgagaaaaccctccgcacgcttcggagaagaaaagccaacttgatgacatttttcgaataaatttttaccttagctattttgtatcagaaaagtattcggaaactgttttattaaagaccacacgacaaatttacatctgattgcttgttaaaaaaggaaaagaagaaggaaaaatgacattgagaggagaaggcattcccgtgtaagagacaattgagtagcgcattttccatattataagttgacgctcagatggtctaaaggtttgccaaaaattaatgctgctcgaagcattattcgaacgtcgttttctaaactcgacgacgaagtcacgcaaactgccatctcgatgttctctttgccatttaaaaaaaattaaaagaaaaaaatacaagtgtcatcgtaatgtatttccttctcttcatcatcacaattagttgcttgagaaaagagcaacttctcatgtgttcaaaatgcaatgtgcttcatgtttcgagttgaatgatacttgctacggcgaaccacaacttttcggttcaaataaacgcataatgattatcaagaataaccagcttcgaacttcaaaattttatatcctagtgttttttcaaccgaataggaggacggcggttctcccctagcttttgattcgaacacggtttcggtcgaaaacacacatcgcccttacccgtgaggggctttttgtagcagggggtgaccaccgtccctccatattcggcccaaaacactgtagagagagattgagtcattattctaagtatccgagtggaaatggccattcgaacagggaaacggtaaaacactattcgagtcagaaaataccgttcgagtaaattcttgtcactaagtcttattatccattttgaatgtttcctaagtcagtaacaggtcagctaccggataagtcgaaaagggtggtcgaactggaaaagactatttgccatggaaaagacccatggtggtggaaaagaccctcggtcgaggagaagacccatggtggtggaaaagactcttgatcatgaagaaggcgacttagacaacaaagatgccaagagaatattcctgaggaccactcaaccacttcatctagctggcaccaaaagactataatgacctccataatgtaccaaaatgcccttaggtttagctgatatagcaagggcataattgtaatttcatgtgggcccaacaaagggcgcaactgtaatctcacatgtaaagctgtgaactatataaagcagacaaaaagcctgtagcaggcaggatatcttggaatactaaaagtcttgtcacttagtgtgtgtgttcatttggtattcgcgctcatttctcaggataggcgggaaaagggggttttcccgtctatccccaatcttgtctgtgaccttgggtcacgacaatgttttctggacgcgactacgcgtcgctcgccggacagggagcgggtgaaatcgggtgctgacgtcagcgtccgatttatgtgcaaaactactgatttttctcttaaattacttatccaaatcatgatccgattgcaccattaaattcgttgcaattaaatcttcaaaacatgaccacacatggatatattccgacgaaaaaatttttagcttattattgaatttttttaaatgttgcacgatgttccaccaagtatatcggaattgtttcactaaatagatcgaaaatgtttcactcgtttaaatcggacgttgtttcaccttatataaaaacaatgtttcagcaaatagcgaaagaatgtttcagttcactgcaacattaaatctatatatagtgaaacattgtgaatacactaggtgaaacatttttcgatggaacaaaaaataaaccaaatttccttaataggggatttccaaaaggaaaaagtacaaattaccccccccccgaactatcgcggtcgttcgaattaccccccttaaccacaaaaccgaacattctttacccccatctatgcaaacccggctaattaccccctttctccaatccgcgttgtttttaattttgacatttcaatcctccatctattttttaaaaaaatgtcggacccaccttcataacctctatctctctctcccttatttatttattaatcctcttctcctagacacctccttaacttccaatatttctcatattcctaatcctcatgccatatttcacaaaactaccttttccactcgtttcctctttcaacctctatatatccct

SEQ ID NO: 362 - DNA, 923 bp, Oryza sativa
ttagtagatgctacagctggttgcgagttgatgagtttcttagatgcatactccggttatcatcaagtctttatgatgaaggaagatgaagagaaaacatcgttcatcacttcgtttggaacttactgtttcatttgaatgccatttggtttaaagagtgcaggagcaacttttgcaaggttaataggcaaggtattggcaaagcagttaggccgcaatgtagaagcttatgtggatgacattgtggtgaaaagcaaacaggcgctcactcatggcaaagacctgcaggaaacattcgagaatttaagaaaatattcagttaagcttaacccggaaaagtgtgttttcggggtaagagtaggaaagttgcttggtttcttagtgtccaagagaggcatagaagcaaatcctgacaagatcgcagcgattcaccaaatggagccaccaaaaaacataagggaaatgcaaaggctaacagggagaatggcttctttgagcagatttctttctaaatctgcagagaaaggcttgtcgtttttcaaaaccctaagaggggcaaactcatttgaggggacagccgagtgccagaaagcttttgatgatttgaagacatacttacagaatatgccaactttagcaagtccacgaaaggtcaacctttgctagtgtatgtagcggcaacaccagtgacagtaagcgcagtcttagtgcaagagaaagaaaacaagcaaatgccagtttacttcgtatcagaagctttacaagggccaaagacaaggtacacagaagtggaaaagttgatttatgccattgtgatggcttcaagaaagttgagacattacttcttatcacatgacataacgataccgtcagcatacccgataggagaggtattcaaaaataaggagtcgccagaatgattg

SEQ ID NO: 363 - DNA, 2278 bp, Oryza sativa
cacagtatcaagcctttccctttttttcactcgcaccacccagaaccaacacaagagcaatattgcattccacaaatgcccaatccaaacataacccagtttgccacacaattccccaaccgcataggccagttcgcatcagcacaatcctattttcaaccggcgagagcaatcgatacctagagccccctgagccaaaatctgcaaatggcaccttggccaatacatctcaagttatcaaacatcacaaagtacaaaggtgatacagatccaaatgagtatttgagggtgtatgagacgccggtagaagcggccggaggagatgacacaacgaaagcaaagatacttccaaccatgctagaaggagtggcattgtcgtggtataccaccattccacctatgtcaatctactcgtgggagcatatgagagatacttttcgagcaggtttcattggtgtatatgaagagccaaaaaaagcagatgacctatacgcactgaagcagatgccgggagaaaccttgagaagttttatggtaaaattttcaagaataaggtgtcagatcaggcaggtagatgatgagatgctcatagcatcagcaaaaagagctttgttgcctggccctctccgtttcgatcttgcaaggaataggccaaagacagcaaaggacctgtttgaaagaatggaaagttttgcaagagaagaagaagataagctaagggtgcaagcagaaaaggctgcattattggaaaagaaccagacaaagaacaagcaagtttctttaggagaaaaccaaaaaccagaaaccactgcaaaaccatggaaaaaattcaagaacgattccaagcaagttcagaaaaaccaagtaaacttcattgaagatgactcaaataatgtagaaggaaaagggaagagacatttgggggcaatctgcaaaaggccaaggacaatggtggaattctagcaaaggtagaggacgatagtggaataatgccagaagcggaggacaagaatatcagcttgatcataccaagttttgtaaagcacatggtccaggtggtcattctacggaagaatgttatagcaagttttgccaaattcatggtccaggagccctttccactcaggaatgtaggcccatggccttcttagtgaaaaagcatgccagtctatatgagaacaagtatgagggggcccgagatcagcgagggcaaaatgctattgaagcaccacaagtcataaaaatctataagcaatcgaagaagctccaaaaagggtgataaatgccataacaggaggctcttctttgggaattgagtcaaaaagacaaagaaaagcatatgtgagacaagtaaatcatgtagggacaagctatcagtcaaatccaccagttcattccaagacagtaatttcctttgggcctgaagatgcggaaggaatactttttccccaccaagaccctttggtgatctcagtggaaatagcacaatgcgaaattcaaagaagtttggttgatggaggaagctcagcggatgtgttattctatgatgctttcaaaaagatgcaaatacccgaagacagattgacaagtgcaggagtgcctctgcaaggttttggtggacaacaagtacatgcaattgggaaaatacgtttgcaaatagtttttgggaaaggcaacaatgcaaggaaggaggaaatagtgtttgatgtggtagacatgccgtatcaatataatgcgatactcggaagatcagcaatcaatatcttcgaggcaataatacatcacaattatatatgcatgaaacttcctggaccaagaggagtgataacagtccgaggtggccagttgggggcaagaaagtttgagctttagggaatgccaaatgtcaaaggagtccatgtcgttgatcaaaagcatggagaatactctaagttgcagaaaccagttcctgaaggcaaaactaggaaaagtccagttagatgatgatgatcctggaaaatacattttgttaggagaaaatctggaaaagcatgttaaggaggaaatcttgaaagtagtgaaaagcaacatggatgtctttgcttggtcaccagaagaactgaaaggggtagatagaagcctgattgaacataacttggcaatcaagcaagagtccaagccaaaaaatcaaaagttaagaagaatgtcaacagacaggcagcaagcagcaaaagtggagctcgagaaattgctcaaagccaaagtgataaaagagtgatgcttcctgattgtttgctta

SEQ ID NO: 364 - DNA, 1542 bp, Oryza sativa
tttctattttggtgggcaaaataagaaaaaagatttggaacgagagacgttcctccaaacatttttaaaaagaaattataagtgtgtttggattgaatacgggatcttagagttgaaaccgcacacctcttaccattaccactttcatttgtgctgaccaaatttcatccgatggttgctggtaactcaaagggattcggtgacatgtacagtactacagtgtacacagccagcaggcatattactgaacaaagtcggacagatgattaagcatgttttatttggacagtacagaattaaacaactctgattcaaccgaggaactgatcgaccggcgaagaacagcaatctacagaagaaagaattttgccaatacaatcctatgtacttcctcatcatatagtagtgaccaactagcaaacttgaaactgctcttctggatcttaattactactgcgccatgatcgtccaccagatgaagctgaagcctaccaaggacgatgcactgatcaagctcaggcgatgcgttgcgcctccgctcgccgttggcttggccgctgcaagattcagcaaacaaaagagaggctcagttacaaattacagctacatgtctgtgaatcactggaaatttctaagcaagcttgaaatgatctcatacagagaggttttaatttggctgccagttcatactgtggaaaactgaaacataatctgaattgtgatgttctgagttgacagcgaaaattgttgttctaattaagcacaggtacctgtagatgcagcgtttccagtggaagctgaagaagcagcagtgctacctgcagtgccggcacctgcaggaattgaagagagttcagatcagcatccctctgtaaatgatcatatcagttttttgtgatctgattaaaatgccagagatcatgaattggaggccatgattaaattgtgatccatgattaatttgcgatctctcaattatcaggtgcctcggattcttgtgagaccggagagacaactgcatgctttagctggcactagctagctagagttggtgcatcaaacgacaaactctccagcgaggagaggagcactgttagtgttaaactaagcaataattcagaccattattactctagctaggagaaacaaacaaacaaacaaacaaacaaaagcagtagcagtcaaaccgcatcaaccactgtacgtatgtccactgcaattagtagcagcaatctagccgcatggatcacgccgtgatcgtcgacgagaggaattaattaacgagatcaaaacattgaggaaattgatggaattatgtgtgttaccggcggcggcggccgcggcggtggccgaagaagaagccgacttggcgcaagcggaggcgtctgtggtgacaccccaacgtttggcgaggaggaggccctgcttttgcgcgacgccgaacgcctggagcgcggccttgttggtgaggatggcgcacaagcacgccgtctcgtggcggcggcctccctgagcgggccgcagcacgacgccggcgggggg

SEQ ID NO: 365 - DNA, 5381 bp, Oryza sativa
agagggcaatgagagaaaacagatttatgtgcgaccccttcccagcgttcgggttcaacgggataacaatcctcgcaagaaaacgttacttgcagcaaccataacaaaactccactcattcctacttggcgagacgggaaaaaacttaacccagaggggtttcaacgtagggggtattgtgcagtttataagagagggcacgtcctgttgtcgttttggtaaccatcggggtccgacgtttatgtaactccacggccctcgttgtgtgcgtcacctagggtggctcgagcgccatcggcggagtcggctcgaggctgaactcggggggatccacctccacggcgccggacgagcgcgcggaggtcggaaggtgaggctggtcggtggacatgcaggagaggacggatggatccctcgcgcgatcgccgggggtgggggtcgccggaaccctaaccctaggtggcgtggatggcgtcgcgcgcggtggtcgccaccgcgaagggaggaggaggcgcgcgtgcgtgcgtgcgttgcggtggtggatcagacgacgggagaaacaaagcgagaaaaaaagagaaggaatgaggaatagaatacgagacagtgggtgtgggtacaagtaaactgcagattatgtcgttgtttttttttcccgattcggtccccgtagttgcacgaattgtgtttttttcattcttaatctttgtctaacagcatactagtgattgtactttgtgctagtgagcatttgaattttgaagtagacgaaagatttcgaaaccgatatggggttgctgtttgcaatccttttttttacataaaatttgtggcagttgaatctcaactgttaatttgcaacgttgacatgtaaacaaagtagtgtgggaatattttctttacgaaaagtcaacttctttgttcgaatttaaaaagtgatccagactaaccttaggaattatttttcttaataatggaaatagtttaatctccggtttctggcaacttatgaattatttccaacagaaacattaaatgaacatagataaaattaacgggagacgtttggtttctacttatttgaaaacttttgtcgcattctgaaagtgtccttacataatcctgtatatgcaaactgataacgcataaccactctatcgacgtcaaaagcatatttattaagcagatataacaataatgaaatgtagatagagacatatagctcgaattggtaaataagtacatatgtatatacacatagccacataggacatggacacaacacatgataccctcttaaaaatagataatatgacatgatataacagctgaatatgacatgcactcgttgtcgcgttcaatttcttcgtaaccgtcgaacaacgcacacgcacacattcgttttcggatagattctcaatacttcgcatggaagtaacacggcacgcgtttacttggagtggttcgttggattagcgcgttaattaattacctcctttccctccttgtattaaccgacgcttctgccctctagttgtaaataggagagatcataggtagcatagtgcaaaagtaccagtggatctctcatctcagccgtccgatggccggccaccacacgatccggccgtcgagccaaagagtacagcacttagcacgtgaccacccctttttcaatttcttttccaccacgcgatctcgatgcgtcgttctagcagcaagtaaaataatcaaatttcctttttgtgtgtgattaaaataaccaaattatcgtcgaattgaccggcaacacgagcagtcaaattactaaaccagccattttttgtttgatgggagaaatgaagcaaccactccaacggtaattaagttaagccacactcacacacctaaccacatgaccgaaccgacaatcgcagcaggcagcttggaatgattaatagattagctccaaacaagttgctaaagatttaatcacacgcactcgtaacagaaagttcaagtcgacacctcagctaagcttaaggcttcgtttttttaaaactataattttctaattgttcgttagcatgtttttaaactattaaatatagtatattttaaaaacttttttataaaagtttctttaaataattaaataaacttatttttaaaaaaatataataatcagtactaaattatgtatgtgctaatgatctatcttttttgtggggcgctgataagttaaattaagttagtaattaacacaagcccttaatgtgtaccccggtttcctcccgtgtagctgtgctcagtgacaacgatggcgctgacacggcgtccttcttcatgcgcaactctgatgcgctctactttgaaaaccacctgttggcgctggcccacggcaaagtcgcttcgggtgggggagctatatttcgtgatgtcaaaggcgatgctcgctcagccactgtcgagcatcaacatgggcaggttggctgttcgtgcgagtgtggcacttgccggtgagaggccacaatgaggttcgttttaggtagaaccgacagacgaggttcgttgcgatagaactggcagacgacgacgacgacgctgactgcggctttgcatatatggtggcatgttggggaggaggaggagattggacagggagacatgggtccattgtatttttttttaaaaaaaattaaccagaccgtcactgatacatgggtcccatagttttttttagtttaaatgtcacgtcaaatgttacatagatgccacatcagctgaaacaaccatctaaaccatcttgagatcttattttggttttggaagttgagtaacgcgtcatttaggtattgcggtttaaggttgaatttgaaagtcgacgacaaattgagtgagcgacctaaagtgagaacttattcctttcccctgcaattgaaatgggcctaattgtcggtcacataccgagtaaatgggcttttaagcaggcctggagcatggttaggcccaatggcccatggaacgaaacccgcacacagaaacagaatgcagttcacccctggctggcaggcacactcgcagtccccactccaaaagccggaggaggaggaggcgattcaccgacatcccggagcggatcgcggagcgcgacccctcctccctccgccaccgccgccgccgccgatctacctccgccgccgcgccctcccctcgccggtccgtcgatttcagccctggccgtgcttgatttccgccgattgtgtgggcaatctcgttttaatctcgtgcgtgtttttttacttacgattttgttttcgttttggggccagtgcgtggctggtctcgtggattttgagctagattgggccgggaatggcgggggctcgcgcgatggctttcgtcgcgctctgcgccctcgccgccttccctgtcgccgtcaccggaggtgaggagtttcgtttttttctttctttccagcgtttgtttctctagatgagatgctcagattaacacctacagtgatgctgctgcacttttatcttgctccttgtggaatgtggaaatttttggctttcgattgtcaggctagggtgaattcgcgttttatgtgcatgtgttgatctgtccgcagctcagctactctaatttttaacagctgccaaatgcgaccgtatattgagaatatcttgaaatttaagtggagactggagagcggaaaatttttgtcatgcaatatctgttgatagacataatgtgattaccattctctctgtcatgcatgggaaacacttggtattaattgtatttttactcggtatcttgtgtataaagtgatacagtacatattgaactagctgtagtagtttacacttcacacgcaacattttagatatacgttactgtgctctggaagtgacggttgatgacatttgcacaatggctaggaagagccatttgtgtccatcaacatggctgtgtcataagtaagcctttataaattgggtatccaaatggtgcctacattgttgtttcaccaggtggattgcattttacccagccatccggcattgcctagataatttagtgaaagcacctactgaatatttggccttaccaattgattatatgggtctactagacctttttctagaacagcatgctctgacaagttttagggtccatacccgtcaggccatcactgtttccaacgagaacatgatatttatagggaaaataactactggtgtcatcttcgtaatgcctaggaacattttgctggaatttcaggcatataattttatcctagacataagtgtttgttatactccacgcaatttatagttttcatgttgcatcccagtgacatatgctgacaaagttcagggtttatatatatgctcgcgttttcttgtgttcagagttaaagttaatcagtttactcaaacatataggattcgtgtatgacctgaccacattaccttatcattacattttttctgtacggcattgcttgccatttagttttggaagcaatcaattctctcagtttttgaatattgctctcacctgttaagaagataatgtcccttcatcattctattaagttctctgtttaaagtttaacttactttggggttggacttggaagtgattgataaataaactttaccccttctgttcacaatttatacgcttgtgttagcttgttaggaacaattttctcatgaaatgtttcctcattatacctaagccatccaatcaccttctggacactcgtgatggttttagagcatatcccatcaagtcattctaataagtgttcctgctttgtgcagcccaagtggacccactttattctagtaaacaggtttgaagacttatccttcatttctacatctttaattggtgttattgaagcatgttttcttactgccacaattttgtgatactaggtactggactggagtagtcaagccaacattaaactacagaatttctccttaactgaagaaggtgataattagtgaacaatgacagatctataattctatatgattgcatctactaagatcaatccattcaatgtgggtgctttatttctcaatgcagatggacttcagctgctggtaagaccagaagaagtaactcacagggtaactttcttctacttaaagcccttgcaaattaactagggatattctagcttttcttgtattacaattccgaacagaagtgtccatcctttttatgccatttcttttagcattactacttgtttccaaatgagaccttatgtttcttaagcatttttttatatttccttactacagaaattgcgggagagaaccagaataaagaagaagattgaaccagtacagcaggatgatgaagcactagtt

SEQ ID NO: 366 - DNA, 4407 bp, Oryza sativa
  unsure (1)..(4407): unsure at all n locations
tccagaacagaagaaacaccaacacacatatattagaccttactcaccttatgcacacgtgcagaaacaaaagcaataatacctaaaagaaacaacaataggaagtgtgtcgatagtattaaatgaaatttagccacggtactagtgtgcaggtgcattgcacaattctcttccagtgtcatgcacattttgttaagatgtaaagcaaacttgttgactggattgtcataccaaactgattgtgcattaactataatgtgcttgtgagataagtgaagactgaacttaattaacctcatgcacggggagcatttgtgagcatgtcaacttcaagtaagataaagatacattcacaataagcaggcatatgaactccatgaaccatatctaaatattggtcaccaggagagtggtaaatgattagtttgacaagaatttcaagattcccagctatcacaaactaccaaggaactgaccatgggaaatagcatcatacttgggttgcaacaaattatcataaaacaaaacagatatccagaacctacagacagcagaacaccatataaaataaaagctgagaacaggctagagagatattctgggttcaagtggcatcaatatagctgaatagatgtacttgcgttgacaagcaaaatgtcattcaagagacgcacaacaccatagaggtcaaaacagcgattccagtaacacctactctctgactgaccaatacatcactacttaaagaaaaacataggtaggaagggcatactttccagacgagtgctgcagggtagtattgtcaaattgagcaagatagtcctgtggacagaatacaatttgaatcagttaacattatagaaaccaatggagataacaccagcttatcgatgttgcacatacagcggtacttgtcatagcctgctgttcattccaagaatcatttctcgggttttcagccttaaatggtgtgaaattgctggtcagaaaaactccatctccattcacctgatgaatatcaattgcgaacagaataaatcagtaaaagaacccttatttcgagcaaacaaactgttggaaatggtgtggtgtacctcatccaacttttgccatactaaatcactttggctgaaaaaaccctgatcagtggctaagagatataggcttccattgtactgcaccaaaaaagaacttaagaacttaacttgggtggcttattaaagaaactggagactataacttaattaatcatcataccttgaacattgtgttgaaatgattattacggaagaagacgcacagctctctttcattaagaccctcttgtagacaaaataaactgtaatgtagaaatttcgcccaggcattagttaacaggataaataagaaatatacacgaggtttaaacctatatagtaagtacgcacccatagacagttagctggctagcagtgttctgaaggaaattatctattagttcccctgcaaacaaataagaaaatgtaatatcaaacattatgcactggatattcatgtgtgtttgatcttcaaacaaatacaaatacataatagatgacaggacaaacaaaattctcacattgatgttctgcaggcccatcttgcatgtcctcactacttttctcagtcttgtcagcttgttcagcaagaaccacctctccctcataaaccggctcctgattttcatatgccaaatttccagtgctaagtatgtgctcttctccttgatatattggctcactttcctgaaggtttaagatgataggctcaggactattgccatcttccccatccagctctttagtagcatgatttggggtatcttgactagctgcagttgttagctcagagctaatctcagtgtcagaagcctgaccatgaattttctcagtgtcagaagcctgaccatgaatttgcaagggagcttgttcttcacaggattctttatcaacttgcccaagggcaggagcagcttggttgggagcagaagactcatgagaggaacagtcaagcacagactctgaaggttgaatggttatatcagagtgctctggcaagatattccttttcccatcgtcttctagttcattagacgtcaaaacctgttgggattcctccatcccaacttcattaatattaggagcagcatttgtggtgtcctgtaacatagggccatcgctcaaagcatggctgttgccatgttcctccttatttgttgaatccatcgcctcgactgcctctaattggaagctctcagtgtgtgctgtctcctccatatttgaggatgaatgagactgtgaagtgtcaaaggaaccagatccatcaacagcattagcattttcagcttttgatagactaaggactctccttagttcctcttcttcctcacgatcgcctcgtcttatgtgcaactcaactgggtcagtgagtgtattttcatcaaatgatatacctcgagaaacactaggagaaggaacccctagtgctgcagtagttgcagcagcaaaatcaacagtttcttcctcctgtacatgtctattctcttttgttgattcccccgacttaaattcagcaagcccagatgcaagagcattgtaagactttgatccaatggaagtagcagtgtcagtatcctaaaaatatgaaacaatcagaattagcatgcaggtgagaattgcagacgtaagaggcaagcgaaatctcttatgcatccagcatgtagggaggtattgactatgctgttcgagcatccttctggctatcttaacaaattgtattgcacaagataaataaatcctatattaagttttggttgctacagaaacttatcatgtctagacacaagtatacgctttttgttggagcatcacatacaatactcaaatcaaaacgcaaccatagagccagtccgactgtcttgcttttactcctaaaagaaactactgatcagaagttgtagtttgaagaccatgtcaacatagaaaacagcatatatttgtgacacgaggaggttcaacactgtctggattgcaggttggagcatcttaactagtaaaaagttggaaaacaacgtagagtgattgtcttgcttttactcataaaagaaattagtgatcagaagttgtagtttgaagaccgcgtcaacatagaaaacaacatatatttgtgacgaggaagttccgcactgtctgaattgcaaattggaggatcttaactagtacatagttgggaaacaatgtagaaaactagcttaattaaatgtgatacatatttgcgaaaccaagcaatagctgtgagtgctaccagttatcaaatagaatcaccacgtagctacttgatagagctttcaaacgagttttcaaaacaatggtaaacattgcccgtataaggtatatatcggggggggggggacaagtacactggcatacatattacacttcctttttttattgagtgttgttgcagatggtaagcatgaacacatggtctctgttctaaataacagaaactgtgaatggtatacacatgaagttatctccaagcacaagaattattgtattccatgtcgaaagaagtacagtaaactctaacccgcacgccgatccagttgtctagatacagaagttcaacatggctaaaccaaacaaacatgccataaggagatgcatacctggggatctactatccacccatggtacagcgggatatccagaaggtcaaatatggcacgttctcgggtgaactcaaagtcatcgatcctgcaacgcccacagcccgaatcatatcagaacatatagagcaccataaacaacaaaccgctaaccgacaaaccgaaccatggactcacttcctgaacatcacattcacatcaatgccggtcgcgaggcgcggcaaaaggtcaatcgcatccgagatgttctgctcccggttgcgcacatactcctcgtccttaccctgcgaatcacaccccacaaccaattcacaaggcaacacaacaaacaacccccatctctaaccccacggggaccgatcgaacctgcacattgctgttggagtcgatgaggcgctcggcgacgagcgagagcagcttctgctgcgacacctcgcccgcgtccgggttcaagctgatcacattcttcagcagcatcacgttacctgcagcaaccaaaacaaaaccccacacatcacaacgccgcgcgcgcgggggcgaattgaaacccgaagggaatctagaaggtggggggattcttacagatggcgaggagagggcacggcccgttgtcgttctggtacacgattggggtgcggcggccgaggaagcnacggcccttgtttgtgcatcacctcggttgctcaagcggccgcgccgaagccgcccgtgggggactc

SEQ ID NO: 367 - DNA, 6032 bp, Oryza sativa
  unsure (1)..(6032): unsure at all n locations
gtggcntaannattgagattcacttttnacccgcgatggcggaggagggggggacccgttcgcgttcctatcggaggatcggccggcgtggtggtcgccgcggggggtgttcccggccgacccgttccgcaacgggacgccggggtggtgcggggcgtacgagctcgtgagggcgctcgtgtgcgcgccggtggcggcggcgaggctggtgctgttcgggctctccatcgcggtggggtacgccgccacgtgggtggcgctccgcgggtgggtcgacgtgcgggagcgggcggcgcaagagggcgccgggcccatgccggcgtggcgccgccgcctcatgtggatcacgcggatctccgcgcgctgcatccttttctccttcgggtgagttctagtttccgctgttcgtcgctcggattagcatccctctcaccaaacgcgcactcagaatcgagtctggatcgatgacagatcagaaattagaacaaaaaaactttaatccgatctgcatcggatgatggattagccgctgttaagtttatagaatgaaattgaggtgattagattcgggtggtgagacgaagcactcgaaatctgtggatggattgattcggtggcgcgattggtttcgcggaattttggggtttggtgatttttggggcacgtgtgtgtgggcgtggctttgctgcaatcatttgttaggtgggcgcaacgtagcgtatggaaggtgaagtgaagggtccgtgtgtgagatatgttgtttgtttcgttttctctgcactaattgcggctgggaagagaccgacaacgaggggagggtaccacggtggttcagaagaggttagagactgatctctgcacggcgcctttggttagcttcactacaattgtggatcgaaacgagatggactagcgatgaatgatgatgccttgtctactaggtggtttgggaagatagtgagaaagagtaagaaagccttcctgaaagtattctgaaaattgttggcctttggcgctgataattaattaagttgaggcactaatcaggtgggctgttgtgtggttggatcgaaaatgtggctgctacttagttcaaattggattgctgttcacctgggaattgctcaattggacactctgcacacaaattttgagacgtttgaagtttcaattgttgtgaaaagaatggtgaaaactgcgagcgaatgttgagtggtcaatgctgagaaagcacacacatagcttatcatctctgccaatagttcttctatgcagtaaaatgagaacttgagaagggaactgcccagtgttggtggtcgtgttctgtaagcagttgcagaaatgaacgttttgttcaaacttcaggggacgaagaccacttggatgtggattttgttttatactaaagttttcctttgggccatgatctggagttttggtttttaatctcacatatggattttaatgggaaattttgaaacaactcacttttgctccttgtctatgctgggatatcctgactgagtgcctactgtttgtcattttttcttcttgcaatacaactgtttactgtctgatctttgctaaccacttgttttctactgtcagataccattggataaggaggaaaggaaaacccgcgcctagagagcttgcacctatagttgtctcaaatcatgtatcatacatagaacccatatacttcttctatgagctgttcccgacaatcgtttcttcagattctcatgattccataccatttgttggaacaattatccgagcaatgcaggtatatccattatgttttaaaagccctttttcccagttactttctttgacactattttgcaagttactttcaagtttcaaatttacaacaaatgcataggttatatatgttgacagattctcgccagcttcaaggaagtctgctgtaaatgaaataaaggttagaatgattcctcttgaccccactgttgctctgcatacttttaattaactgcatcaaattacatgtgctttttccttaataaagtgatggtctcatggtgtcaggcatcttttaattggtgatatgcaagttatcctgttgctttctgttgcctatagctgttaggctgtcaaattatcattactgcacacagtggacttctggggtagaaagaataataggcagaaaagaacaaagacaaacttgtgcttgcagccaccatttctgtagcttcctctttcatctacaatatgcaaatacaccacagttgatttcaggaagcaatgccatgcaactcatcctagaatagtgcaaagcatgattttctgttttgttatcttgttcatatggtacatactctctaggatgtgatttcagagaaaggcggcttgcaatagcttcccacgtgtcttgttattcccggaaggcacgacaacaaatggaagatttctgatttctttccaacatggtgcattcatacctggctaccctgttcaacctgttattgtgcgctatccacatgtgcactttgatcaatcatggtaagttatctggacagaaataaatccttatttgttgcctcaatgctttatttatgttcattttctgcttcaggggaaatatatcattaggaaagctcatgttcaagatgtttacccagtttcacaatttcatggaggtgcacactctcattccattcagcctagaatgtaaaatcttcatgtctttggtaataactacttacacaataaggtccttacatgaaccatactttttacaggtagagtacctccctgttgtttacccacctgagatcaagcaagagaatgcccttcattttgcagagaacgtaatccttcttgactcaaaataattacatatttggcatatttttgcgttccataccaatgtaatggacaaagtactttattacaactattgaattttgcagactagctatgctatggcacatgcacttaatgttattccaacctcttattcatatggggattcaatgatcatggctcgagcagtggaagatggaaaggtaaaaagggcaatgtcgtagtgtgatcttcatgctgaattcatgtccattgttttgactgtgtttgctggattccatataatggaacgttgcatagtgcatagatatatattaacaaatagctgccattaggctgtcttccatcatctatgaatttgatctctaataggctgggtttaacatttgcaggtgaactgctcaaattatatggtggagatggcttgggtaaaagaagtaagtcttccacattcgcactgttggtatatgcatatcaatatgggacctggtctacagatatactccctccgtccctaaatatttgacgccgttgacttttttaaacgtgtttgaccgttcgtcttattcaaaaactttgaaattgtattgttgttgaagaaaatgttgtagtaggacttggtttgtgcatgatttatatgcgaactatttagaggtgtcccacccactatatagataaagcataatcatagccgtgttactgtgtttttttcttttgccatgcatggttttcttttgctcattggtgcttttgaggcattatagttgctgctccatcaattatggtacctgatgttttttgttctttttcagacatatggtgtgagcacatcagaagcaatggcactcttggaaggctttttgtgtatgagcccagacaacgagtaagtttctcatcctcacactgacaaatatgtgctctatggcagagcacataatttggtcgcgaagtctaaaaagatgtcctccatttcctaaaagctggtatcatgatttcacagaatcatgacaaatgacattacttaactggttaacccttgcagcggacgtgtgaatgcgcaagatttttgggctcattttggccttaattgcacccctctttgcaagaaggtactggcattctcctcgcgtaaatactgccacccttaattggagttacagtacacccttcgctgaacttgtgcatctgtttttcagatatttcagtacttcgattttgaagccaaggaatccatcacattccgtcaggtatcaacttgaatacaatcaacataataactgatgccttgcgcttactaacattcaaggacgtgatgtatgcagttcttgattggatgtgcgcacctcaggaagcagccatcgtttcaggacgcctgcgaaaccgcgtttgagaggtgtaggaatcccctaacatctcacatcggcagggagcagctcgccgatgtcctgcggtcaagcatgcttgagctgatgaccgataatggggtaagtcgccagtttgcttcatgcaacatatctaatcacctatcttccaacgccatcacccagtttcgactcatctgtcattgcctaccgtttacattacagatgatgaagctgttcaagacgttggacgtcgacgatgacacggaatcagcaaggatgacctgatggcatcccttaggaagctccccttcatgatcgcgctcttcgcgggccggatcaacggggaagtctacatcgagatagtttgatcgactggattgatcgcaggggagagcaaaaatggtggatgggagtttgtaacgcggtgggagacgacagacctccgtctgtttttagagggatggtttccaacgctttcaccgtccatgtagctttctcaggcgtgttggactaaagtggctaaccggtatagtgcgcaattttgtttcatatcgtaaaaatatatatttatatccatagaaaagctgtcgcgtgatggcacgctggattgtgcaatgtggatatgatactgtacaacattggtccaactgggcgtgcacatagaaactctttttttggtttggtttggtttggctaactggatggatgattacaaactcctttttggctaactggatggaagtatctgtttcgtatcgtccatcccaatatcaatcaatatatgtctttaatttctttctttttctttattttttgagacggaaccaaatgtgtcgaactttgaggctatcgaccatcagtccatcaccatcgctacgcgtagtcagaaagtcggaatgagtctctaggaaaaagagaaaataacagccgccgggctttctactgtattattattgtgatgacgaggagggtgagatgtactatacgatgaaccaatcacatcgcgttggagggctatcatttgacagcatctgtttacgttttatgacttctttgaaggttatttacaccagggaagaaaaaacacgcaaaatgaagagcgctcaagattgggaaaagtggctaaaaaaacaacaggctgctgctatgccgcggcactaaagaagaagagtagacaagaagattctttacagtatactatgtgatgctccttgtccccctcccttttcctttctcctgtcccgtctccgatatgttgtatctttacatcacgatgcacttctctttcttcggcgtcgtcggctgtggagcaggtggcctctgaacaaagatcaaaccactccatattcagatccatcaaacagggtatactagttgtataatacggattggaacaagtaaaaccacgtgtcctcggttctgacacgatcaagggatcaagcaatagatgaaaataaggggaaaagaacgaaaacgaaaagttcaaccccatgatctgcttgctccttagaacatgttagtattaactctattttcctcttgatataacatcataacgacagtttgtgcagtaaattagcttgttggttgggttcaggtgtatactagagacaaaacaggtgattttctgatattttagccgcaggatgcaggtttcatgagtttttaaccttgcataaaagtatacggagaacatatgttctgcttcaaaaagactaatcatatttgtggataattcggcaatcctaaaaccaaattgcatatgccagtccaaagcaagtttaaccttataaactaaaagcccagaagtacagagtgaattcaaagggacca

SEQ ID NO: 368 - DNA, 4549 bp, Oryza sativa
accaaatttttttcacagattgattactgtgtgttattgttgaataaaaaatgaaaggtccatctttcctcgtcagcttaatttttggattaaactgttcggtgcatgcaatttaatatgatatcaaagtaaaaggtaaagtaaaaggtttcgagtccaatttatggctggtgtgcaactaaataaaaattatagtccatttttatttcacgctaaaggctaatccacttttatatcacactaaaggcttgaaagggcctcgcgtaaagagaagtgttggaatataaaagaattaccatctcttctcaatttaaccttttcccaacgttatttcttgctgatgaactgatgcctcctttcatggttgattgaatctacgagaagttgacaacgttgcttgtgtcgtggctcctgagtcctgacgcggtgcgcgtgacagcgatcatcgtgtcggcgagtgggacgtgggcggttgttttgctcgccgtctcgcgcgaaatctggtggtcgcgccgcccgcccacggcgttttggtcggctaaacaaaacacgtcatgaacaggtgctaactgctaagccaagcgttagccaagtcgctgtacgataaaaacatgtacactgtttctgaaatggaaataaaggttatgggttattaataaaaaaaagtcgctgtacgatactaatacgaccgattattcatcggattattacggtggcggtgccttcatcgggttcaattcctcttccttttccgcgacctgttcacgccaagaacactagcaattcttctatacgctgaagaagaatggagaatctgtccggtcagccaaccacggctctcaaaaccagataaccgggcaaaaattttgaagagattacgccatcgagatcctgccaattgagacctcaagaacaacagctcaaaccaacgtgaccacgtccaaagagagccaaggggaacgtgcaatttcagtggactacctgtccgaaacggcgagaattttgttacttaattacacagtacgacttaaaaaagattaaacatcactcaaactagtaccccagtggatccagcaaggataccgtcgtgtgcacagcaaagccagatcctgatcttacacaaatacagtagaatatcccccggcgttcatgtgagggtagctagctttaggcacatgcagaatcaacgcctctcgtaattaaaacaagaataattatcagattcagtttgagtgtgaaataacgcaagatctgcccatttgatagtcaaaaaagcgtcatatacaatcgttttcaaaatattagaagggcgtgccatataatcaacattctatgtatacggccacgcaagctagagaaccgaacaagtgggagggagagaacattttgaccgttgcttaaaaatttaattagcaatttaaatattggtgaacaggagatttaggcgtgagttgacagggagggttttatatcaaattaccaattcacgtgaaaaccatgggcgaattttatataagaaaaccgctaatgacaattccaaaatctccataagagataggagtgttgtattaggttgtgatcggaggattaaggcgatgcttgtgatacattaaaatggaaatgaagtgagcgcacgcaaaacaagaaatttgttagcacatggattagttgagttttaattattataaatttaaaaattatatttgtttgatattttaaaacaacttgtacaggaaacataacatttggtggtttaaaagatatgctaatagaagttaagataaaatctgtattttaattagaagagatggtagattttttatttttaaattttaaaaataaaccatttgaaatgttatttctaagatatgagcattgatcacgccagtagaattggtatggtaaaataacactaccacgccaatctagctggcatgacaacattatttggtcacaccggtctggctggtgtcagtgttatttggccataccaccttggatgacgtggcaagacaaaactatcacgtcgatctggttggcatgacaacgttattcggccacgtcactctaaccatcatagcaatacaaaactgtaatgccccgcgatgtgcggcgttagtattattttgccacgctaggtgggttagcatgatcaaaatgttttgaaaataagtttcaaaagtatttatttttaaaattaaaaaaaataaataatcaagaaggaaggcgtccaattacccgagcctcgtcagcatagcatgagaccatgagtccagcgcaatgcagtgcagtggactgtagtgcaggacgaggagctagaagagatagatagtggtcgaccagatcagaatcagacaggctggtgcacaagggaagctagtggtgggctggtggcagacgacgattggacacggccgcacttgcatcgcttcggcgcgcgggtcgccgtcgtcgtcgtctctcgtcgcggcgggccttgcactcgtagcgtagcgagcgtcccacccgaaggccggaggcccacgtcgtctgtcacgccaccgcacgaaacataattttttttcatttttattttttttaatatttacaaaaatattatacgggtgaaaatattcatagaaatagatccgcgctcctcgagagcggcagggtgacgtgtgtgagcaagcgctagaggtcgctgagcgggcatgggaattttgcatgcggcgaaaattgcattttgacatcggcgccgtgtgccatgtcaccttgctgccctctacttggacaacagggtcttttttttcaaaatatttttgtcggtataatattttttgtaaatattaaaaaaaattaaaaatgaaaaaaattccacgaaacacgcgtttttgcggagtggcgccaggtgggctcaggagttgtggggccgcatgtcagcgagtgggtgccaggtcgcgggtgcggtggaggagcccccacgtaccgcaatccgagtgtccgactactggactgcttgttgtcttgtgattttgctgtttggtgcccggcccggtggtaaatagcaccaacaccccttgctctattttccttccaagtactacaagtttgaaaaagattattgacctgattatcatagtggattatgtaggcgaagtaaacttggcaaatagtttagatctaagctaagcaatgcagaagataaaatctggtggagtacagctgaaaagaacatagccgactccactgatcttttggaataataaagagaaacccatcagagcatcgcattagaatgacaataaacacttacacatatattctttttgcatgctgttgcttgtgctttataagtcttcttttaagtgtacgtatatatcttgtaaaatttggaatacggaaaatgcaatctgaaatacaatcgtaagattaaatatattgtcctctagaatatggaactcagtgacaaaaataaagtggttaattttgaaattttttgaaccgtagaagcacgtatagcatatgtattattctcttttttaccaggcacgttagcattcttactattccaccctttgtcacatttgattattcccacatttagagttaatctagcatgtcacatcgaaaacttcctgatttactccatgttataaactgcacaaaaatctacaaacggcaacgttgcagtaattggtaaaacaacaggctctatcatataatgtcagctttcaaaggctattaggattacgtgttgaaagactaatttcatctaaattaatcctttagcatacaagagggaagactagagcatccacgtccacacaatcaaagctaattcaaccttcacatataagcattctttaaacctctcaattcaacttaataaggacctcaattatttatttataaacacatgtgaagagaagaaaaaacttttataaatcagttaagaaaagagaccaataattttcttttaaaaaatagtactagcagccaccgaccactcccttgactataggcaacgcgagaagaaaaaaacccagaaatgcgagggatagaacgcaaaaataaataaaggatttatttgaagacgattaaagaaataaattaaatagatttacgaccacaaaaaaggaacgtctccttcctcctcttgctataagctttcgctttcataaaagccattactccctctcctccattgctggcctcccgcctccgcctcctttcgcctcgcctccgccacccatggcttttcgaaaccctagccccgcctccctctccacgccgctcctctccgactccatctcgcccacgcccaccaccaacggccacgcggggcaccataaccacgacgacgacgacgaggagtcgccattaaaaacaaggaatattagaagaggagactagagtccatatagaaatacaattaagaaataactgaaattcggaattaaaaacaaggaatattagaagaggagtatagagtccatatagaaatacaattagaaaatgggtaccgagctcgaattcggcctaagataagcggatcatcaaaggggcacca

SEQ ID NO: 369 - DNA, 2113 bp, Oryza sativa
actagaagtgatattggaagtacttacatgttgaggctgtaagcagtccatctcattgacataatgcttgtatgccacatcccggtgagcatgtgcagtggcagtactctcaaaaaggtaggccactctcttctccatgtctggctcattgtagggccaaggagtgaagctttgcctccacttaggccttccaaccggtaatcttaaccacatccacagctgaatcaatagcacacaaccactcatgttggatgatagtgcctgacgacaacaggcctcacagagttgtccatatgtccatgccaacactgctgagccccaactgaaacggcccagatcaccaaggttggcgaccaaaggaatccatatcgccgaagcaatgtcacccccagcattaggaaacagaacccctcccaacaagtgcaagatgtatgcacgagcataacactcaacacgccatggctcagcatcgtcgtcaagatgtgagaagttctaactcagccaagacaggggtattccattctgcttcttcttccccccttgcccctgctcaatgttcagtggaatgccaaacagctgctccacttgtgcacgccatccaggagtctctgtcctgcccgtcacggcatgcccccgtaatgggagggccaagatcatagccacatcctgtagagtgatagtcatctcaccactggggaggtggaagctatgtgtctcaggcctccatctgtccacaagtgctgtcaacgcaggagcgttgaacactggcattcctctgctcacgaccaaggccaccccgagcaacccggccgcccttaggtacgggatgtacctatcgtcgaacactggggggcatgagctctaactcggagcggttgaagtacctgcattagcaattgtaaatcaattagttaatataatgtcaaatacacgctaccgatacttatgtacaagtgaatcaatgccgattcataccctccccgcctcgatcgcagccccgcgatgacgggcctcgtagtacgcctccaaggctgggtaagtcggcggttgtccctcctcggccatcctacatgaaaagtaataaattcaccgttatttacctccctaacacttatattttttttggacttcttcttttttggacgcttaggacacttagttttcttgtgaccctcctggtgacacaacgagcatctattttgcaccggcgcagcatcaagttgaatgcatgaaggtggtttccttccagaaccacccagacccgagtccatttcgttcttgaatcgtttcgatctcctcttccctatttttttaatcttcaaatttgggtcagcaacaaattcttcaccatcgtacgatggccactgtgtggggtcgaggtatggctcaaagcgacttgcccatgtgttcacaacggctcttgaagagaactgatacggcattcggttgggagattcctcatcaattgcatgaattagataaacgtggataagatgtgagcaaggcatatggtagagcaatggcctttggcaagaacatgagttcacctcaccttcaactttgaaagctcttgcgccaaatctaacaccaccacgcgttataccacccctctctgtgacctcgtatgtctttttctgcttatcgaaacaccttgcagtgtgtttgttcaccttacttttttgcaccttcatcttactatcaaccttggtggaccaacgctgccctacctggactcgcttcaaagcttcatcatgtctgttcacaaagtagtcattgcacttcatgaacgtaaatgatactatggccgtcactggaagcttacgaacaccaactagcacgctattgaactgttcggccatgttggttgtcatgtaaccccaccggcggccatttctatcgtatgcacgggaccaattatctttatccaacaactcatcttcaagccatttacgaggaccttcgggaatacgctgccttagtgcctcaacgcatccctctcaaatatccacttctcgtcaatctgacatatccttaggagctcttttgtctgatgcttgtccgcaccggccttgtggaaattagcattgaagtgcctcatgcaccatcggtggtg

SEQ ID NO: 370 - DNA, 1864 bp, Oryza sativa
gcgccccccctctgcgggccccaccaactttctccccccccccaaaaattttcgccaagtctgttctgtctccgggcaacggctggcgcccccccagaccgcggcgccacggtggctggcgccgccctcctcccccaatcgaagcccttctgcctccgggcctcggctggcgccgccctcatggaccacggcgccagggtagctggcgccgccctccccccagcccgaaacccttctgcctcgcggcactggctggcgccgccctcctcaaccgcggcgccagggtggttggcgccgccctctgcctccctgcaaattgaagatccatattgcacaaatgtaccaattcacagttcgcaattcaaatcacaattcacagattcgtacagactaaaactagttccaattgcacaaatcacaatgccaaaagtccatcacatagtcctcacatagtccatcacatattccacacatcaaacaatgccaaaagtccatcacatatcccacacatcaaacaatgccaaaagtccatcacatatcccacacatcaaacaatgccaaaagtccatcctatatttcacacatgaaacaatgtcaaaagtccatcacatagtcctcacatagtccatcacattttatatcacatagtgcaccacatatgtcatactaccaaccaatagattaacttcatacaaatcacttcttccgttggcgccgaattgcttgcgagcccggagtgtacctacatttgaaaatccaatgtttaaaacattttaaaaacaaaataagggaaatcaaataacatttgagaatggtaagctcattttacctctttttcgctgcccgagtggatcgcaagttgtattgcgtgggttgcgtcccctgaggcgcgtcgggaagctgcgacatgtctatctcctcggcgtctggtgcgacgtagtcctcatcctcctcgtcctcgtcgtcatcgtcgtcactaggtggagccggcgccttcccctttcccctcccttgcggaatgcgtgacgacgacgagccaccaactccttcacgctcttctattctgatggagtgtcgagcggtacttggacgcgcggattgaggtagtggtggtggtagtctccgcggttggtacacgtcgtctaatccaaccgacctgcaacctaatcttgctgcaagtttccggcacctttgacgaactttctgcatttcaaaaaaaaaagaagtttgttaggcataactcaagtaatgcaaagtgctaaataaattttacctctaaaacagtgcggagtgtgttctccgtgtcctcaccacccctcggagcttggaggcatgccccatttcattcacactcctgaggagctctctcgactgaaagcgtgagaagatatatgttagggtctagggtgcaaatggaaataactttgacaaatgcaagaaaatttacgactctgtctctaagtggggcgtgctccatttgatatccaactctagtccggacatcatagggattccgcccctcatcggagtcgcggtcatcctctatgtcggcttccgtccaagtagggcggaggaacaatctatatgtcctatgcagctaatgaaggtactctgagaaaagatgattttggtgtatagtctcgatgtacctgtcgttccttccggctgtcctccattcatcaatgtatctgttatgctctagcccctagtctttcaccttctttgttctcaccctgtcatacctagacaagtagaaggtgatgaaacaatagtgagcatcgacaagggttaaatggtacaaaattgaacattgacaatgaaagcacccaaagataagaaatatttacttgcgtaattcaactcc

SEQ ID NO: 371 - DNA, 1496 bp, Oryza sativa
taaaggtacaagttggtcctccgcatcagctgataatgcagtcatcaaggcaccaccgtattcccagttaggaaggttgcatctatagctagtactggcctacaatgcttaaaagcctcaatggaaggaccaaagcaccagaatacacgcataaaaattttcttggtcactccatcaacgttgacaaccctatcaagatgagtatcgatgtggtagaccatactgggattcctctgcttaatggcttgcagcaaagtgggcaaacggacatacgcttcaccccattcaccgtaaatgagcttcatagcctcctcttgtgccctccaagccttgccatacttcaccctatactggaaaacctcaaatatatacaaagctaacgcagaagcagagagtgtaggttgcagttttatggcattgcataacctatttgctatgaactttgatgtcagctgccggtggctccctgaaccttcggcagtagcacaactatgttccttacctacccgtgatatcctccacgtgccactagacctcttagttgcatggaccttctatttgcaccgtgggttttcacatttaacagtgtacctcctatttgcggcagaattgacaacacggtatggacgatggtgcacgatggcgtactcctggagccatagcttcaatgcgaccatggataggaactctaaaccctttctgagaccatccacctggaatggttctggcaactgatttaagttgatgccgccatctagtagtgcaccatgggcatgtgttaggtctctaaactcaggaatgtctggcttcctcccaaacaccttctcaaacgcatgacattcctctaatgctaacttgtcattattagtaagtggagggaatggacggtcatcatcagagtcttcagcaaattcaacatcatattgctcaacacttgcctcctcatcaacatcatctctattgacttctactgagacagaatcgtgaccaccactcaattcgacatcaaagtaatcatctggattcacatattggcctgctacttctgtcgggtattcagggttgcctccatacgacgaccaatgaacactcgccgacaaatgttcacttagatcaagcctctcttgtactaactcccttttcatctccctcactgcatccacatcatcagtaccgcaatgtctctttgatggtcctgtctcccataaatcatttccaagcaaaggtctcttcttctctccttccccctccaagtcttcttgtaccaactcagtcttacttgcaccccctccacgacgagaataatatgtcacaaaattcttctcaacgtaatgataagaaggagatttgtttagatccaaattttctacagtacgaactaactttgatgcaaacacctctagagatctaaactgagactcttttacccaatccaagtaaacttcccattccaactgacctatcacattaatatatacttatgcccttgaccaaca

SEQ ID NO: 372 - DNA, 693 bp, Oryza sativa
ttttaatcacaatattcacaccagtacaatatgtggggtagcctatctacttgttgtcgacatgccggtctgaaggtctgactcatagtcgacaaaagggtagccttcctcctcgagctcgcgcccgacggaatcagagacagtgctagatccctacggccggcctctaaaggtaccggatagggtcgatccaggcgtatctctgatgtcgatatccgccggcttgtcttggcgtatgtaggcttgtatgttgtggcttctggtgggtgttgattgtctcttcatggtgagtgtcgatcgtgttgatcgtcttatatcatgggtgtcttccatggtggttctccctagtgggtgtcgatcccccatggtgggtgtgtccccctgtcctcctaggggggcttgtatttatacccataggtgtccctttgtccaagtagaactagggaaaccaatatagatacaatccgagtagtccttgttgtttccatgtagaactctggttgtctttccttatccggaactccctccatatccgaaggttgtttccgtatagacatggtatgtggtgggtcctgccgagatttagtcaactactattaggtatcactacgccagatcctcacacctctgacgggatacctgtgacgggcaaacgaattggtcagtagtgaccattacctttgacgggttata

SEQ ID NO: 373 - DNA, 579 bp, Oryza sativa
cccatcaaccccccccccgctatcagaggcgaattgtgcgcctttattcttgcagaaataatgaacaagaaaggacgttttcatgccaaatagattcatgaaattggctagataatttattgtgatgtaaaaaagatgtttttataatttctggcgatgtaaaaaattatgtttttatagagtgcaatgtaattaactttcatatgtgcaatatttatggtactttactaaattgtcatcacatttgatcaactacgatttatgttgtactattcatctgttttctcctttttttttccttattgacaggttgtgcaggtcgatgacattatggctttaatccatttggtaagtatatatgcggttctatgagcaacgaccgaaattgtggctttcaaggggtgtgaatttgctgtgcaaaattatggcatttgaactgcatatatgtgttgttggggatctgtgatgttatattgggggggtaatgtatctgtgatggatctgtcactggaatatatctgtgatgtttctatttttcagagggcatggctagcaaatcctgaggctagccaatattta

SEQ ID NO: 374 - DNA, 577 bp, Oryza sativa
cagcaggggcgccaggtccgatcgtgacaccgccaatggcgtccccgaacccggcacggcggccctcaccagggccttctggggtctccgagccttctcccccggcaacataatgagcaggcccggctccgatccctgcatgtcgacaacgtcggcgtcgtcggcggccccgtacgaccaccccccccccagcaccaagccatggcatagctagtaacccccccgccccccaggaatgaatagcgaatgattcatgcaagcaaatccaaccaaatttggttcgtgggctactcatcgatcgttcgccaagactgcctgataatgatggtcaggtcaagattatttcaaagctgggtaagtgagtggaatttacccagctctctttctttgaaggtcccaatgaaggttaaataattcatggtcctttgggaagggaagggctggtccaatcaaaaaaaaggaacctttccaaataaaaaccggtggttaagccaagccaaaaacaaaagttaattcttctccctccggtaataataaaatttttagccattctcagctcataaaggggctgcaggaa

SEQ ID NO: 375 - DNA, 2087 bp, Oryza sativa
ccccctcggggggactaagaggagggcgaacacatcaccctcgggcccgacgtccctcgggggtaccaggccacgtgtgcgattgtgtctgcctcaaacctctagtcatgatactcctgatcccatgtaaccgacaaagggtaattcagcgggtcttaaacacaggatgtttgatcttttagacatgaatcaggctcaccttcatcgaatgctccttatggtgctctggcgtaactggttcgtaagaaatgaaatagttcatgataaaccggcgccaccaaccgaggtgtctagaaggtttttggaaagctatgtcaactcgctgttagtgataaagcaacatccccacattgatcttgtgaaagggaagcatgtgattaatacgtccccaattctccctgaagctcagccgcggatgaaaaatgatggggtctgtaggtgggagaaaccgataagagggtggatgaaggttaacattgatggttcgtatgatagccggaatggaattgggggtattggcttggtaatgcgtgactgcacagggagggccttttttgcctctagtcgccacttggagcgctgtaatagcgctctagaagctgaacttcaagcgtgtagagagggactgattctggggcttcagtacaccctcctccccattgtcctggagaccgattgtctggaggcaatgttattgattcagagcacggagaaggtgatgtcgacggaggcgtttatcgtcagggagattaaggacctggtccaagggaatagggagatcaagcttaacaaggctcagcgctcgcaaaatcgcattagtcactggctagctaataaagctcgttgcgagcatatctctgaaatctggttagagaacaattgtaaccatattttacagctcgtcaatgacgatgctggctgagtaatatatttctcccttccctcgcaaaaaaaaaaaagatacgcacatgtctgacatacacaaggtgttcatttgcatacatgcaccaccaaaaacatccaggtgtttttttttgtgaagacaggcaacatcatctctctctctatctctctcttttctttgactaatctcattttcagaaattacgatgtgcaaaagaaatagcacaactctcacaatctcaatccaatgaacctcgtctagtagtactttttgcatggattattggccacacacagcatcatttgaaaaggaactaaaatctacactgacatgaaaggtccacacggctaattaaccaaaacacacaaggagataaagaaattaaagcacgtgctcgattctgcaaaccgaagatcgatcggatccagcaccaccgaccgctccggatcagatcaaccgtgattgaaatttgaaagaacaggtcccaacttgatgcgaaatcgaccttgagcaaccattttcttccccatatatcatcactattttgcacaatgccatgtcacatcaaataattttggataataaaaagataaatgacttataattttcattaataaaaaaatataatggatcatgaccaattaaatctataagcacgcatgataccgtaggggtaaaatgaatattttcttcctcttaacggtgtttgattaacggttggcggcaatggtatataaataaaaaacaagttgttcgattatatattaaagaactgagctttgagctttgtcagtgttatattatagaatttatactttattgatcgtatagaatggatttactgcacttactgtctcacacgattttctactgcctattacaactgataggtcttgttttattgtcgcacacaacgtaatcataaaacctcaattcttaaactatgagcaaaaatatcccgaaatcatgtgccgaaaactgaaaaaacaaaacagcaaaccaatgacaccactcactgtttcacacgctctttgtaccgccttttaacacctgatgggcctcgttttgctgccgcactcagcgtaatcataaaatctcaactcttaaaactaacggataaataaaatcaaaacacaatatactaaaaacttgaaaaaaaaaccagtaacaaggtgcttcgatg

SEQ ID NO: 376 - DNA, 606 bp, Oryza sativa
agacattgagcaacatgtattcagaagagggaaatgttatgatgatggttgaggctcaagacaaggtagagaatctgaagcaagaagggagaacagttcaagagtatgccagcgagttgcaacatttatgggcagatcttgatcattatgatcccctacaattaaagcatgatgatgatattgtgattggaaataaatggctgcaaaggagaagagtcattcattttttaaaggggttgaacaaggagtttgaggatagaagagcagctatgtttcaccaagctacattacctaatatggaggaagctatttcagccatggttcaggaggagatgaggcagaaagtgatgaaaggaagtaatcctgtgaggtctgcatacatcacaattaatgacagggagtgttataattgtgggttaaaggggcatgtgagctacaattgtccttctcctaggaacaataatggtcggggtgtagctcgtggaggagcacgtggtggctttggtggctacaatgggagccgtggtggctatggaggctatgtacgagaccgaggtggccaaagaggtgaacgtggaggccgtggtggaagccgaggtataggcc

SEQ ID NO: 377 - DNA, 1022 bp, Oryza sativa
agcagcgattaggagaggcctttgaggtgaagaatcttggaccttttcgatactttcttgggattgagggtgctcgatcatcaaaggggatagttctttttcaaagaaagtatgttcttgatttggtaacagaaaccggaatgcttggatgtcgtacaagtgctactcccattgataggaatcaccaattgagtgcacagtcaggtgatccagttgatagggaaacttatcagaggttggttggacgtttgatatatctatgccacacgagaccagatatctcttatgcggtgagtgtggttagtaggtatatgcatgatcctagaacaactcatctagaggtggttcataggatcttgaggtacttgaaaggaactcctggtaaggggttgtggtttagaaagaaccaacacttggatgtggaaggatattgtgatgctgattgggcaagcagtgtggatgatagaagatctacatcaggatattgtgtatttgtgggtggcaatgttgtctgttggcgaagcaagaagcaggcggtagtggctcgatctaccacggaagctgagtatagagccatggcattgagtttaagtgagatgttgtgggtgaagaatctattgttggagctacggttgttcagaaataatactgtggtgcttcattgtgacaacaaatctgctatcaacattgcaaacaatccagttcaacatgaccgcaccaaacatatcgaaattgataggttcttcatcaaagagaagatcgataatggggctcttagactacaatacattaaatcttctgagcagctagctgattgtttaaccaagggattaggtcctagtgagagtgagtcaatgtgtaacaagatgggcatgattgatatcttttgcccatcttgagggggagtgctgatgtaatatgcacttgtattggggaccttcttgcatatgtagctaagtgaaatagtgtgtgtgtgtggctgtgaacaacacaccagaaaaaatccccaaaactgaacttta

SEQ ID NO: 378 - DNA, 2160 bp, Oryza sativa
tgataccttgctgtttattaaggcaaaaacggaagaagcggatgttattaaagaggtgttgagcagctatgaatcaagtacaggacagcttatcaacccttctaaatgttccattatgtttggagaggccactccaacggatgtccaggaggcgataaaggcctctcttcaggttgcaaacaatagttttgaggacaaatatttaggcttcccgaccccggagggcagagtgtgtaaaggcaagtttcagtccctgcaagatagaatctggaaaaggttgttacaatggggcgacagtttcccctccagtgggggcaaggaggtgttgataaaagcagtcatacaggccatcccagtatacgtgatgggggtattcaaactcccggactctgtatgtgatgatttaacgtggctaacacgcaatttctggtggggagctgataaaggagtgaggaaaacaaactggaaggcctgggataggatcacaagatcgaaaggatacggtggtcttggtttcaaagactatagactctttaaccaagcacttttggcccggcaggcctggcgtcttttggacaatccagacagtttgtgtgcaagggtgctaaaggcgaaatatttccctaacggctcgttgacggatactccattcagtggcaatgcatccccgagatggagaggaatcgagcatggacttgatctgcttaagaaaggtatcatctggagaattggcaatggatgctcggtccgtatttggagagatccgtgggttccgagggacctctcaagaaggcctatcacgctgaggaataattgcaggcttagatgggtgtctgaacttatgcgagaggatggaagctgggatgtgaacaggttagaaagtatcttcctaccaatagatgtggaaaagattctacaaatcaggccgtcatctcgtcaggaggaggattttgttgcatggcacccggataagaatggtagattctctgtaagaagtgcatacaagctcgctgagcagttggcccaggaagaagagagttcgagttcctcgggtgtgagtatgaagaaggcctgggacaacatttggaagtgtaatgtgcccaacaaagtcagggttttcgcatggaaagcaacttccgactgtttggctaccatggtgaataagaagaagaggatgatggcgagctctgatacctgtactatttgtggagtggatagtgaagatacaacacatgccttgctgtggtgtccgcattccagggcactgttcaagtctatggagggtctacactgttcttcgcccggcaagggtgacggagcgtggggctcctcaccgggagaccgcgcaggcccccctttgccggttcggccggggactcagggagagattctaagctctctgtatgtggaaggctcgcgagacaggaaacacacaagacacgggcgatgtatacaggttcaggccgctgagaagcgtaataccctactcctgtgttttgggagatctgtgtatgaaggagctacaaagtatcagccagcctctcccttgttctgggtttctaatctggaaaagtccagtccccatctcagtgggcaaggtcctccttttatatcttaaggggataccacatgcaccatttctctcttttttgtggggacttaccccaccttttcataaacagacggagacttgtatggttgccgtccgaatgaccttctgatgggacggcccatacctacctccacttccgccggaagcaggcgcgacgtggaatcgtggctgtctgctgacgacatgaccggtatcagaccagtcacgtcggtcattcttgtccaccacgtgtcagcttagcaatctacatgctcgcccttcttcacacaacatcttgcctgtaatggttaggatgaagcctggcatatatctgaccaggactaacgtgccatctctgggaggtaacacgctagctccagctggggacgagcgcctagaagccctcgtcctgacgggatggggcgaggcgtgcgtcaaatcgcctgtcgccacctaacccgcgatctgaccggtctgagactggtcacagaccggataaacgagtgcactgcactgcgttacatacggcgtgacacgctcagcccaaccgcaataaatgtggttaggtg

SEQ ID NO: 379 - DNA, 5565 bp, Oryza sativa
atgctccatgagcaaaccgaagcttggacgaccccatacatatgcactgtaattgatagaccggagtttgaagacacggtgaaagagatggagaaggtggtgtaaaatgcaacaataggaaatactccagctagcccaaagtgaaaacataggataaggggcggtctaaagtgaaagtttggtaagaaatgatgacccaatatgcaattcactaaaaaagaaagtactaaagatgtgttcgtctccctcagctgggaactaatgccctacgcacgaaaaacggagcagtacattaacgcgtgattaattaagtattagttttttttctaaaaatggatcaatatgattttttttaagtaacttttgtatataattttttataaaaagcacaccgtttagcagtttgaaaaacgtgcgtgtgaaaaacgagagatatggattgggaacctgactaaccaacgcagagtagctcgcacgatggctgttagttcctgtcttttgataagacaaaggtcgcagctgagatggcaactcggtttcaacgtgaagcacatgaggacattcaatgccatcgcattatagagtcataacaacaaataaatccgaaaaaaagaacttgcatatggaattgtgaaaaacataatttcctaacagcatctttggagtacaaacacatctattgtctcgtaagtcatatctatggcacattcgcgcaatctcaattcttaaaaccaagagttcaaaaaaattcagaaaacaaggaaaagcaaaccaaatgacgcatcaaagtcatggtcatgactcatgactcatgtggtcatccaaaagagaccagcaaaaaaaaatagaaataccaaagcgatcgaggcgatactaatatcaatatattacgttacgccgatcatcaagggaagaagcccaggacaaaaatatccgcacgtcgcatccaagagtaaaagaaaataattattttgtgattatccataaaatacttatagatactaaagttttatattgaaaaataagttcatagctcagttcctccactagcggtgtggattttgaagaaatcaaaagggtcaacggcctccgtcctaaaatataaacatatttagtacacagtcataagtcaaacattttcaactttgactattaatagtaaaaaaagattaatcatataaaattgatattactatatttattattaaacaaactatcgtaatatattgttgatcaaaatagcatatcggatattatgtcagagtaaaaaatacttatattttaggacttaactagttaaggtagtaaaagaaacagtacatgaacaattaattatcttgttgattttcgcctcgtagagaaataggcggtacaaacaaaccacccaaatggcgaagcgtcaacgtcgcaaaaagcaggatcaattatgcatgacacagtaatctccacacttctaggatcttgtttccggccagaacgaatcgtatccttttttttttctgttcctttttgtggtctctgaattctgatagagctgtgggacatattcgctcgtttccctggtgctgcttgctcgccaattcgccatggcctccaccgagcagcaagaacacgcagcaccgctgctccaacccgaggtctgtgttcatgtcaattttccgctatccaatatgtttccctcttcagtttactgccatggactgagttactgagctttgctcccgaattagtttagtgctcagtgttaacatggctgtggattttggttgctgcaggtagaagaagcatacacctcggatgggtcacttgacatcgatggcaacccggcgctgaagcatcgcactggtggatggagagcatgccgctcgattctaggtatagaattaatcacttaattactgattaaaacttttcttcttgccaatttgttcctggttaatgtctccactgaggcgatatatgcttattaattgtgcttgctgtggataggagccgagttctgctactgccttgccaacaatggcatcatgtacaacctcgtcacctacctcacaacccagctgcatcagagcaatgtcgccgccgccaagaacgtgtcgatctggaaggccacctgcttcctcacgccgctggccggcgccgtcgtcgcggattcctactgggggaggtaccgcaccatggtcgtcgcctgctgcgtcggcgtcgctgtcagtttgctaagatccccccacttcaatcagtcactgcatcccgccatgaattcagctcaggtttgaggtttggtcactctctgcttcgttcgtgcaggggatgctcatggcgtctctctcggcgctgctgccgcagctgatcgagagctcatcaacactgtccatgccttcagctcaagagttcgtcttgtttcttggcctgtacatgatcgctttcggggtgggcggccgggctgcagccgtgcctgatgtcttttggcgccgaccagttcgacgccggcgacacatcggagcgcgcgagcaaggcgtcattattcaactggtacgtattcaccatgaactgcgccgccgtgatatccgccaccggcttggtgtgggtgcaaggccactacgggtgggcattgggattggggattccggcgatggtcctcgccgtcgggctctcctgccttgtcgccgcgtcgcggacgtacaggtttcagacaacccgcggtagcccgctcaccagagtctgccaggtcgccgtcgccgccgtccgcaagttcaacgtcgcggcgccgggcgacatggcccttctctacgagctaccggatgacgcatcctccatgaagggagttgagaggatcgaacacaccacggatctcgagttagtttcttttctatgtcgatgtgccgtgttggttaattttcagctcccgaattcttgagatgtatctgccatgatcagattcttcgacaaggccgccgtcgtgacggcgtcggatgaggaggcgccgcgcaatccatggaggctttgcgtggtgacgcaggtggaggagctcaagattctagtcaggatgctgcccgtgtgggcgtgcatcgccttcttctacaccgggacggcgcagaccaagtcgacgttcgtcgagcagggcatgccgatggacgcgcacgtcggcgccctccgcgtcccgccagcgtcgctggccgccttccaaatgctcaccaccatcgtgctgatcccgctgtacgaccgcgtgttcgtgcccgccgccaggaagcacaccgggagggagaagggcatctccgaccttctcaggatcggcggcggcctcgccacggtcggcctcgccatggccgccgcggcgacggtcgagacgaagcgcgccagcgcggcgcggacgacggcgagcatactgtggcaggcgccgcagttcgtgctggtgggcgccggcgagctgctcgccaccatcgggcagctggacttcttctacagccaggcgccgcccgccatgaagacggtgtgcacggcgctcgggctcctcgccgtcgcggcgggcgactacctgagctccgtcatcgtgacggccgtgtcgtgggcgacggcgagcggcggccggccggggtggatccccgatgatctcaacgaggggcaccttgatcgcttcttctggatgatggccggcctcggttgcctcgatcttctggcgtttacgtgttgtgccaagaggtacaacaaatcaaggaaggcttgttgatatttcagggcttgttttcgggaggcacaaatcctggccgatgcacattgatgggccgaagaacttgatgctaactggcccaagacccggatcagccaacagagagttaggctttgcatggtaatcacatggtggaaaaaaaatccgctccctccgttttacaatgtaaattattctagcatttttcacatttatattgatattaataaatctagacatttatatctatctagattcattaatatcaatatgtatgtgagaaatacttatattgggaaacggaggaaatacattttaatggacccgcaatattaagcctcggggcatggcccaggtgactcgaggcttgggtccagccctgcaaaccgggctacccgcggattcttgcggtaatacgtataaaattgtcataagctaatttggtatgtgatatttggagacagagtattaggccttccattaggacagttgaaggatggtgaagccacagaactatagaagtggtgaagagctgtgaggtggcaaaggaccactaaaagagaagcgcctcaaacgcagcaaggagtcacaaaacgccgaagctatacacatgtcaaaaccacgaacgtattggctcgtgtaaatggcaaagccatagcggcaacaaagtcatgtcggtgaaggtcgcaaaatccgggtaggtcatttgaagtttggttctaatagacgcactggcttaattaagggccacggcccaagtaggcccatgaatactgccagagtcggtaagataaggaaatgacagggacgcccctttaggtgttcctattagagtatattcacctaccaaattgttataccttaaatggaatttatttatttaaaaaatataatgattagaaatcgctacttaatttttgatggcccaatatggtcctatatacgcacatgtctgcctttgaatgttttcacttcatccagaaaaatagaaggcaggagaaagctgcatgtgcttataaattggatttgtcgaaggcttatgatcgagttgactggaagttcttggagcagtcaatgtatagactgggtttcgcttatcggtggactcattggattatggagtgtataaccacggtgagatatgcaatcaaattcaattgaaccttgctcgaaacatttgctccctctcgtggactccgtcagggcgatccactgtctccgttcctgttcttgtttgttgcagacggcttatctctgttactgaaggagaaagtgatgaagggtgcaatttcccccgtgcatgtgtgtcgccgtgccccaggcatatcacacttactatttgctgatgataccttgctgtttattaaggcaaaaacggaagaagcggatgttattaaagaggtgttgagcagctatgaatcaagtacaggacagcttatcaaccctttctaaatgttccattatgtttggagaggccactccaacggatgtccaggaggcgataaaggcctctcttcaggttgcaaacaatagttttgaggacaaatatttaggcttcccgaccccggagggcagagtgtgtaaaggcaagtttcagtccctgcaagatagaatctggaaaaggttgttacaatggggcgacagtttcccctccagtgggggcaaggaggtgttgataaaagcagtcatacaggccatcccagtatacgtgatgggggtattcaaactcccggactctgtatgtgatgatttaacgtgggtaacacgccatttttggttggccggttaataaagaattaaggaaaccaacttgaaaggcttgggataggatcacaagatcgaaaggatagggctgcagg

SEQ ID NO: 380 - DNA, 1246 bp, Oryza sativa
agtatatcaaagaaggaacaagaaccaagttgataaggtgacagggaaggagcaagtgcaccagaggagccaaattcagaatcagggggagagaagtggtgagcctatgcaagagcaagacaaggagtcacaacagctgcagcagtttgagtacccagtcccagattcctcctctagcctctctccaacaagttcctccctccttgagacaagtggtaacatttctcctacctttaaacaagtagagttacctcttgcacaacgtagagaaactagatctaatgctggaagacctcctatacgccttggttttgaacaccttagttctagacatgacattgcaaactatatctcatactctcatatttcacctgcatataaagcattcattgcatcattgcaaatagtgcctattccaaaggactggagatgtgcaaaacaagatccaagatggaaggatgcaatgaaggaggagttgcgtgcccttgaaaagaataagacatgggaacttgtgaaactaccaatggggaaaagagcagtgggatgtaaatgggtatttacagtgaagcaaacccctgaagggaaaagtggatagatataaagcaagattagttgcaaaaggttatagtcaaacatatggaattgactatgatgaaacatttgcacctgtggctaagatgagtacggtgaggattttgatatcatgtgcagttaactttggatggcctcttcatcagttagatgtcaagaatgcttttctacatggtgatttacaagaggaggtatatatggagattccccctggatttggaaatagccagactgttgggaaggtatgtaggctcaagaagtccttgtacggtttgaaacaatccccacgtgcatggtttgacaggtttaggcgtgcattgtgcaatatgggatattcacaatgtaatggagatcacacagttttctatagacataggggggcacacatcactatcttggctgtttatgttgatgatatagtgatcactagagatgatgtagaagagatcaaatgcttaaagcagcgattaggagaggcctttgaggtgaaggatcttggacctcttcgatactttcttgggattgaggttgctcgatcatcaaaggggatagttctctctcaaagaaagtatgtccttgatttgttaacagaaaccggaatgcttggatgtcgacaagtgctactcccattgataggaatcaccaattgagtgca

SEQ ID NO: 381 - DNA, 619 bp, Oryza sativa
ccgccgcctcccccccacactttcggcgcactcgcgaaccttcgcaacgacggaaacgacaagctaacacacaaaacgaggaaaaagactaataaaaaccaaataaacagtacataaaaagtaaacaaacacgtagatcataattttagatgaattatgagacttgaacggcctcattctgacttcaaatgaatttattatgaattttacaagattaaatctaattaaagcccatttaaaaaaaattaaataaatttaattcaatttatggacaattttaatatgtagatctttattttatacaacttttgcaacttgaaccatattaaactgagttactatgaatttcagaagattcaatctattagaaaaactggaaaaggagaagatgatgatgtcatgatgacgtcatcaatggtggccggctcggatggcaacctcgccggagctagggtggtcggccgggattttggagggcatctacacgtagagaacgacgagacgaacgcgacggtacttaccaacacaccggacgaccaccgacgacgggcggcgacgaaagggcggcggcggcgactcggcttgcacggggcggcggagcttcggtgaccggcgaccg

SEQ ID NO: 382 - DNA, 543 bp, Oryza sativa
caacgcgcatagccccagttgagttttgaagtaaacacgacgccgagttttatgcatgcgacgcgactcgccgccggtcacgaacttacgatggcgtccaccgccgccggcgacgacttccgggattggtccgggctgccggaggacctcctgctcaccgccatggaggcgatgcaactccccgacctagtccactccggcgccgtctgcagatcgtggcactcggcgttcgccacgttccgccgcctcgggctccggtcgccgccgcacccgccctgcctgctgtacgccgccgccgccgccgacgacaatgccgtccgcctatactcgccgtcgtccaccggcgcccacttccgcgtgcccctcctcgacgaggaggcggccagcggcgtcgtcggttcggcgcacgggtggctgttcacaagcgacagggacgccaacccttaccttcttaacccgtttaccggggcccgggccgcgcttccgccggccacggtgctcgggcgcgtcaggggcaggaggttcggtttctccccccgcgac

SEQ ID NO: 383 - DNA, 680 bp, Oryza sativa
ggtcgactctagaggatccccatctaaattatttttggatttcactaagttacttttttgatatataaaagtaatttaataaagcctaaaagtaatttacatgtaatatagaagtaacttataaaaaaagaaagtaacttctaaaatatatgttaattactttaaaactttattgaatttacttttatatatttaagaagtaacttagtgaaatctaaaagtaatttagatatattataaaattaatttgtgattttttatcataatatttttatcataataaaaaaaactaattacacagattgcgtgtaaattgttagatgaatattttaaacctaattgtgccttgatttgacaatgtggtgttacagtaaacatttactaatgatggattaattaggcttaataaattcgtctcgcaatttacagacggaatctataatttgtaattgatttttttcacatttaatactctatacatatatccaaatatttgatgcgacgaaaaaattgagagtttgaagggaattaaatacagcctattacaatgtggaaattttctatttcaacacctcagccacgcctgtgatccaacatgtcatatcgaactggcaatacaggcccctcaaccgcacttcctgatctcactcaccactccctgcaaccgcattcaccactcc

SEQ ID NO: 384 - DNA, 595 bp, Oryza sativa
tggccatgaaagtggtatgatctgcagggcctgggccggctgatggatttgcttggcgtggaattgacacgctctgcatcgccggaccaggtcgaccgcatcattgagagctgtcggccaatagaaaccttgtcgaaaggctttgccaaccaaggtgcgcgaggcggagtgggctccgcattcgccttcatggatatcggcaagaagctcgacgccttgttcccgaggaatgctcttcaggaggattccgttagccgcgcgccgatagagggtcccttctaccagcacgtaacgtttggagatgcgctggacgcattcactcccttcgcggtcctcgggtagagtcttatctgtgaggtatgcttggatctcagcgatccaagcaatcaatctaagggagctaggagcgctcccctcgggtcccgaggcctggactccgacgggcatcgggggcctgtcaggcgcgtccgtctcccctaaggggtcgggtcgcgccgacagtgggcaagcctttttcaaaggcgccccgtggggtctgggctcgcgaggaagcgagccgtgagaagtcgtcgcaaaccgtgtatcccgtctgggc

SEQ ID NO: 385 - DNA, 600 bp, Oryza sativa
  unsure (1)..(600): unsure at all n locations
atctatataatatcctattgtactattaatttgtaccttcttaattcaatcatggttcctcactactgtacgtgtagtgtgtacgtacgttatgagaaatactccatatatgttgtgcagctagctagctatacgtggtgcatgtgtatcttggcaatcatatatgtatactactccctccgttacgaaatgtttgactctgttgactttttagcacatgtttgaccgttcgtcttattcaaaaacttttgtgaaatatgtaaaattatatgcctatataaaaatatatttaacaatgaatcaaatgataggaaaaaaattaataattacttaaatttttttaataagacgaacggtcaaacatgtttaaaaaagtcaacggtgtcaaacatttcgaaacggagggagtactacttaattacttctgtagtcgtacagcacattctattttgccaatctcaatattcttagagagagagagagagagaggttgggggcatcatcatcataaaatataaggaagcacttatacatggagagttaaatacatcttactacagcatgcatacatagcaggccactccctattnctgtttgaga

SEQ ID NO: 386 - DNA, 595 bp, Oryza sativa
cgaggccgtggcgtacagcaccaccgtccaagtcgccgtgaagcccgagcgacgggaacaccaaacgtcatcgagccatctactgttgcatccatctactcaattgagagaagcacatggtgcacaggtgacaggagaatcaagcgtcaagacaccaagcaatccgcatcgatcatcttcgccaagctcctatgaacggccgcgacgcaagccacaactgcttcctcctctacatcagccatacatttgtcttctccgacacaacatcgccgatggtcttcatcaacataggaacaagcgcgccgccgccgactcgtccacatagatggacacctcgcgtcctctgacagattaatctgcaagacgcttcatcgacgacatcgaccgcgtcctctacgacggcaacgaccgcgtcaccgatgacggcatcgatcacgtcatctacaacgacaacgactgcatcaactcggcatcattattgtgatgaccgcttcacggcgcagaaggaccaactgaagtggtggcctcatcgccaacgacgtcctctgacatatgcaagacgttcccaatggcattctctcatcctctgacatct

SEQ ID NO: 387 - DNA, 2740 bp, Oryza sativa
tatatccaaacgtctgagttttgcaaaaatatctccagtgtgcagcttctggcatatgatcctatcaacgaaataaccatggaggtatgctttctcaacatgctgaacattccacattgaatgaatgctgtcaagcacaatagtcttttgtcttgtgtaaataccaagttcaaacaggtttgtttgtctttcaggattgatacaagaattttcagaagatacatgagtctcatacccatcttcatggttataaatgacaatagagagggaccgtattggtaaggttgtcttactaatcccttgaaacgaggtttctgaacgaacagtaattccaagggactgcaatttatccatacgcacaagctcattaattggcgcctcataggatgagcactgcagtaaattaaatgagcaaacatccagcacctccaaattctggagttttggtagtataccatttggaataactagatttggattattccgaagatgcaagtgcctcagtctggtaagacagcctaactccactggtaccgtttttattctgttatttgacaaattcagatatcttaggttgacctgcatgcaaatctctacaggtatattggacaatttattaaaagagagatctaggtactgcagtgaaagcaacgaggggaagttcccgaaagaaccgtcttccaaataattgtgctggagtatcaagacttcaagggttttttgattgctaggaatacgaggcagttctgtaattttaagccccactaatagaacttgctctgccaatccccaattctctttggtttggattctccatttgttcttgtcctcgccttgactgtgtacaacccataaggcaaaatcacggattgtagattgcatttgcactgcctctccatcttctgctggctctaaaaggcaaaattcttgcaaggtggtaatatgagagaaaccttcgttgtaagacgcttcaatgtcatccccttgtattaatcctgaccctatccagaagtctactaatttccgttgattaaatatatggccctctggccataaagaacacaacttaaagcaatctttcagaattcctgtcaagctgtcatacgcaagttttaatctgaaaaatgttgcctcttcactacctgaccattgagtgtcacgaaggcatgattcagtcagataatgaagggcattttgccaatatattgcatccttcttattgtgcatggcctttccaattgttaccagctccaaaggtgaaccaagcaattccgcggaaatatttcttggcaggtacacatgcttatggcccaagtaatcaagatcagcattctgcttgaaaatttcccatgattctgtatgatcaagacagtgaacctcaattctgttctccacttccacattcatttgatcacagacatggctagagcatgccgtgaaaaccactcttcggttgtagcagcttccaaccaagtcaagtgatggaatcccaacttcttctagatccagtctctgccatacacagtcaagcaataaaaggaaatttctctccttcaagaagtcgaaaattcttgctctatgttgcatgccgtcacagttagccaacatgagtttcttggcaatttcactttgaacctgaaagtggccaagagttacatgctagaaatgcatcttatgatggatatggaatgaaagggccaaattgtttatatctgtccatgcaatggttgtcaacaacatatccagtgcaaagtatcatacatttgctaaaaaaaattatatatttgtagatgtgctatttctcttcattttgtaaatacctcaactgaatatcctacctctcaaaaaaaaaactgaatatcctagtgttatactactcgcaataaatcagtatgcatgtatagatagtaccttggctacggaggaatctctcggagaggcgattcgcagcacgagatcgaaggtgtcatctcgggagaagtactcctcaacgagcttgagtaggtaagtcttccccaagccggcgcggccccagatcgcgacgatgccgttgggttggatcgtcctcaccctctcgatcgcggcccggagggtacgatccctgctcgcgaaccccgtggagatctccatcggttggggcagcttgctcctgcgcacgatccttcccccttcttcgcacagcctcttcacctgcggcatcatcagcgacgcgaccttgctgacgcggtagcagccgagcagatcccagaagatgagcctggggatccggccgtgcgcgctccgcagctcgccgaaccggaggaggtagatctccgcctcctctgtccaggctgccgccgtcgccagcctcctgccccgccgcgccgccacgcgggccctcgtgcgcacgcagtccctgacgtgcgccaggtgctcgcacgcgccacggaggacgtggaatcgagcgccggcgaaataatcccggttcctcaccattgctatcagtggagctagctcgagctccgtgctccatatgatcgtcgcggcgtcagatggagtcgccatggagaggcctccttcgtggtttctccaaagtcaaaccacggaaccgccagctctccacttttaatttccggtgtatgcccaactggggattcctatttagcgcgcgctagcgcttgatgggtaactcgcgcaggcgcgcacgtaccatcggcgccgtttttcttttctttatagagaaaggtagggctgcaggaat

SEQ ID NO: 388 - DNA, 11711 bp, Oryza sativa
gtgagataagaagcattaaatttaagtatggaatagtagtgtttacattggaagaggagtgtctagtactagtttcttaatgatgtggagtttgtgaaaaccatgtctagtgtttttggttgggaatggcctcaacgatggtaacctaaacagtttgttttcccaaagccgtacttcataggatctctgatcacataacttcaattaggttaccggctgtgggtaactcaagactatacagtgacacccactatagatgattttgaaaaggaaagtgaaaggaacaaagaagaaggggatgagaaggatggtgagtgggcccgactagaaccaatggcgttagacaacaggagtggtgatctgcctacttttggggggcatttaaccatttgccatttttagcatgtacaaacatcaatgtggagcaaaccatttagaatttctctagcagattgagtaaattttacaaaatcctaggtattagggcatccattacataaaaccctagttattgtgatttgtttcacgaaatcacatgttttgagtcaaaatgtttcaagaaacctcatattcatatagactacttatattttattattacataagattgtttttttcatcaattcacattagttggctaaaaggacatactcttctcgtctactttatttttttctcaattttgcgccgaaaaagcttaacataataccggctgattataatataataataggttaagtatacacataaatgatcaaaacatgattaacaacacttgttaaaaagcaactaacgttatatatgtactaaaaagtatctcatacattctttttacaattattatagataaatatattagtcaaataaacgatgtaaatttatacctggggttttataaaacattttactctaaaacctggggtttcatgaaacaaattacaaaacccagggttttgtgttacagaagccgtaaaatacaaggttttgtgaaatttactcgaaaataacaacctacctgggtctcccttttcacacaaggaaactaagaaaaaatgactttgtacctctccttgaaaagattttctctagaataccaggttggaaaggttggtttctgctgcacatgaaactctggtcaagtcactcctatcttcaattccatcctaccagatgacaaccttgctaatccctcaatgggtcatcaagaaaattgacaggaacagaagagcctttctatggaaaggaactgaacctgataatactcacccaggaacaagccttgtgaactggcaaacaagcaaatgcactaggggttgggagcttccggatctggatcgagaggcagtgtgacgaaagagctggtcagacagatggaattcgatgagtccaaactacgtactaagatcgaccaagtatggttattggggcggtaggactcgtcaagcaccagacgatagaagcttcaattcagatcccccacatgtcagtttgtagtaatgcagaggaccctcactctagaagcttagtctttccgtttttccgtttttctttttttttatttggttgttactctattataaaacccagaatctaagtatttctgtaaccatcagctgtgtatatccactcatggatgatataagtgcctaatttctatccaatatgtgaaaaaagagagactaagggaggaaacattttttattttgttgtttcttagttacgaaacctagaatcttaaccttcggctatgtatccttagctagctatggatacaaatgcaaaatttttatccattatgtaaaagaataggagagccaaagtgaggaaacattttttttattttgttgttttctagttatgagacctagaatctaagtatgtaactttcggctacgtacgtatatggatataaatgccaaatttctatccattatgtaaagaagaagagagacaaagggacaaaatacacaagcatggagcatagcaagtcgacctcagcgggggacggcactaggctgggtggctagggaatcccttaagccctagccaacacaggatcttatcggccaccgttgcaaaggaagccctttctaacacgatgatctcacgagcgacaacactacgaccccccgctcacactccgtgctgcaggctgaggtctatcacattctccatgcttcccctccaatttcgagaggatctccgtaatccgttgcacctgcgctgcttcttgccatatagaacaattactcttccagcatccccaccctcacctaccataggggttctaaactcttgaggggatatttcctgattgcttacatgttatttaaatagttatttttttaaaaaaaatcaacaagatagattaatatatgataaatcactccacaaacatgcaaagccaaatttaacttctactagttgcaatagaaaaacaaattaaactatagctagctaatatatattcacagttaaatttgtttttttcattgcgacttatagaagttaaattttaagttatatgtttgtgaagtgatctatccactactacagaaaacacaaataggtgccggttttcccaatcggcaccacggaggcagcactaatatgaaaagaaataggtgccggtttaagaacaaacacctttgaggttccctgaataaaaaaaaatctggctcgatgacgagccgatgcattgagccgagcagtccctcctcccacatccatccacaccacagcaagaacgagcatatcatcatctatccatcacatatccaatccacagatggactcatccacatatcaatccattcatccacaacacaaattttgacacttaaattcatcctggatcttggcaataaaaaaaaatccatagatggattcatccacatatcaatctattcatccacaacacaaattttgatactcaaaattcatcccagatcttggcaataaaaaaaaagaatccacctctctgtcgttgtcccgccatcgttgtcgtcgcatggtcgcgtagccgccgccgtagtcgtcatcttcgagtcatcacgccgcctcccctcggcgagcccaccacctgcatccgcgagccccgccgcccctgtcgcagcctcccctcccgccggatctagcagaggggagggctcctccacctgccgctgccgcctcccctcccgccagatctggcgaaagggagggctcctccaactgccgccgccgcctcccctcctgccagatctggcaaaagggagggctcctccaactgctatcgccgtcgcgtctcctccgcgagcccgacgcctaccgtggcctaccaccgcagagccggtgggaggatgagaagaagagataagggaggaggagaataagatataagggagagagacagtgggagagagccggtgggaggaggagaagaagaaaagataagggagagagattcacaatatcgagagagataaaaagacgcccacccggccggcttgtctccacctggctcggctcgttttaagatgtgtcggttttctaaagaaaccagcagtgcggcacctttaataaattaaaggttttttttcaaaaaaccagcatctatagtataggtgtcggtttttctttagaaccgatgcctatagttatataaaaatgccggccttttttgtgtttttagcccatagaggagggaaaaggcctataggtgctggttttagtatttccagtacctatagtgatggcatctatatgatgttcatatactaatctatcttgttgattttttttattttttccataactatttggatgagatacaaagtttagaatccactcccctatgatgccctcaagccatgccaatggcatcgtagatgacctcctatccctagatcgacgcttccaactgtgaccaagcagatggaacaccgccactgcaactagctaccagatctcaaccaaggtctccaagtctcaaggtacggatgtaagtgcgctgtcgcactacccatataaaaacccgtgttttagtttatttaatataaaatttaaaagaaaaaacggaaaagaaagcccactcgccccagctgcgcttgcatacctacctcgaggcgtccctcgcgtccaggtcaagtcccccttccatgccctcgtctaaggagtggacgacggacgtcacgaaacggcatgtgtgccagtcgtttttggttgatcggatcacgcggacggacgaaacagcgtgacattacatttttttctctcttgtttttcggcggctgccgcgtcttcttcttgctcctctggtaaggtgtactacctcacatgcctaatgagaggaaaatatagaagagcgcgttgacaccgttgactttggattttccgtctccttcctccgaagtgcagagaagaaaaggaggagctgagctgagctgattgcttgattcctcgctcgttcaatctactctaatctatctctataggaagggaaacccaaaccataatgcaaagccgtctcgcagaggagttgcgagcgctgaagttcgaccgtgtttggcggccaagtcctcatcgctcggaatcggatggcggcagctgcagctaccgcaactcgatccagcgggtcgtcaccgcgtccgttgccgccgcgtccaccagcagcaccaccctcgtcttcccgtcgagtggctcggtcacgagctcgtcttcggcatcctttacctcctccgctcccggctcggaggcgcacggtactccaagctccgggcccgagagctacaggttgctgcgcggggaggcgttccggggcctcagcgagatcgcgagtcatatggtcagcgacaggtacaccgagaggctaataacggagttctcccggccgcggctggggagcggcagcggcggcggcggcggcggcgacgagatactgcagacctggttctccgaccttggcgttgactgggttctcagagtcgacgagatgaacctgcaggagaagccatggagcggcgtggaggagatgatcaaggggtggctcgccgcgctcaccgtcatggcggaagccctccgtctgacgaaggccaccctcagcagcggcgatggcgactccggcggtgtcattccggtgcttccgatcgagaagtacaggccacagatatctgcaccggcgtggatcgacgacgaccacgccggtgttacattacatgatgtaagtcctggctctggctcgtcgaatctcgaccaagaaagctcagatccggctccaaacacgagcaggagcaggagcattgccattgctacggtcaagcaagctataacagcgtattcccaagcggcgtcatcgaggtcctacaggtacgaccagcacggagctgcagggcctgaattccaattcgcgctcttcgccaaggcaagcctggtgaagatgatgtgcttcccggacgctatcgccgcgctgagcagatcgccggagaagatcctccgcgtgatcgacatgtacgcggtggtctcgggcgtctccccgagcctcctggcgctgctccccggagcgaccaaatggttggtttccgagaggatcacggccgtgctcaagacgctgagcggcatgatgaggggcatactccatgatctggagagtctgatccgagaggaggattcgtggcggacgacggcgcaggggaacgacatccacccggtcaatcagtacgtgctcaactacatcaacctgctgcttgagaatcgcgacgtgctgaacccggtgctgcagaatcgcgacgtgctggtccaggagggcgaggacgacgacggcgacgacgagctgttctccatcggggagctataccagctcgcggaggagaaatcgtcgctgacgagcaccgtcgccaggctgatcaactcggtggacgccatgatcgaggacaggtccaagatgtacgcagccgccggcgggcggatgcacatcttcctgctcaacaacgaccacttcatactgcagcaggcggagccttcgttgcagtcgttcatgggcgcctactggtacgcaaagcggaagcagcgggtcgatcggcgcatcaaggagtacctcgatctgtcctggggaaatgtcgtctcgtgcctggggtacgcagggcagagccgcaggaggtcgtcgcttttccgtagtgtctcggcgctggtggagttcaactccttgttgcagataacctaccacacggagaagctctggaagatcaatagccctcagctgcgaaccgtgctgcgcaattcggtgtgcgggaaggtaatctctgcttaccgagcctacctggagactcagggacagggcggccagttaggaacatcagccacgtatacccccgaggatctggaagatatgttgcaaaatctattcgaagggtgaacctttcttttccatatatatggagttttgatgatgtttttcttcggcgagtgcatgatgtgcgcggaacccatgacccaaagccaacacggacatgatagtactccctccgttttaaaatatttgacaccgttgactttttagtacgtgtttgaccattcgtcttattaaaaaaatttaagtaattatttattcttttcatatcatttgattcattgttaaatatactttcatgtatacatataattttacatattttataattttttttaataagacgaatggtcaaacatgtgttaaaaattcaacggtgtcaaacattttaaaagtatcttcgcgttgttttgctactttacttgttttaatcaatcatttaaatgttcttctcaaccttactacaacgcaccaccgttttctgtcttcattgaggacggttttgtgccacgctggcacgcagacgaggcgttatcactgactcatcacaagataggcagtaaattaaccgcccggccgtgtccccttctccgtttgactggtcaatgcattctgtacctccccacttccgatccgtaaccttaaagcaagtttaattttatagccaacctctagctctaaaaattaacacatcgtttatagctaatctaataagttacccatacaacggatgaaagtgggctatttgggtatgcgtgccgtcagctcatctaaagcaaataaagatagcaccaacagaggttgacagcgacggcacactagaggcggcggccactagacgacttctactcaccaaatctaaccgttcagaagagtacgtatattgagaagcagaggtgtgccgacatcatttatttttcttttctttttggttgagtgttctcctccttgtcgagatgtgagtttaagtgctttttttttttctgtatatattcttcgtgtacataggggccggattaatgaaagcccactgtctaaaaaaaattatactcgctagtgcgtagtattgtagtactccatctgtttcaaaatatttgacaccgttgattttttagcacatgtttgaccgttcgtcttattaaaaaagttgtgaaatatgtaaaactacatgtgtacatgaaagtatatttaacaatgaatcaaatgatatgaaaagaataaataattacttaaattttttaaataagatgaatggtcaaacacatactaaaaagtcaatggtgtcaaatattttgaaacggaggaatactattttagctgggattatggtctggttggagttagattcccttggatatgctgtagtaattgattactctaaagtcacctttaatatatatattagcctcgggagtgattattattcgagtggttttgcgattatgagtttttttttatgtgcaagttgactaccttttgtgcatacagatcagtagatggatccatccactggacaagatgggtgttcggtttcatttcatgggagatttttttatgatggaaagaaggtgtattacccttagtgggttatatgtgtatgatgtggagaaactaataacaccaccatatgtgactgagtgaagggtattagaatctaagaacaaaaatgtgtcgcaatgatgcaatggttatggtaacaggtgttccagttttggtgaaaagaaagaaccaaatttttccaagacttcataagaatttctctaattggtttgctttactccttattggttttgctatttattgttttattttatgcaagtattatttttaagttcaaatgtcgtgagatgataaataatgacattgttacaccttaggtgtcaacttttaaaaaaaaatcaatcaccttttatgtaagcagccaagatagatatattttctcgttgtttattaatggatagattgggcgtgggacgtaaggctacgctaaattcaatggtctcttagagtcccattgttttacagagtgtgagtaacacccatttgggatcgattgaagcagcccagcagagcacaaatggctaaatataactaaagatgcatcattacttatgggatgtaatttttataatgcttccctaattcattcgtcttgcttttattatttgagcatattttcttaggaaaatcatgaaccaattgtattgtttggtctacctaaagacattggatttttttttatgttatggtttgtgctattcatatttgagttagttctttattttccacatggtgaaccctgcaccctggtgtaagcaaaacacaaaatctaagtgcacctgtcctggaaccaacggtgaaactatatatacatatttgaagaatgatgtataataacacaatatatgttgttaatattttaagtatttaatttatttagatggcatgcaaacttgtaaaatgcacggtctataccacaatgacatattgcttatatatagcaaaacattggatctaaaattgtcaatttaattataaataaagcaacattttagatagaatataaattagatatgtacatttaaaattatggtcagcttaattctaaaattttagttttctctttttaatttgataacataaagaattaggaagagaaagagatggagatgtaaaagaataggaagaggaagagatagggatagggagagcgtacctacgttcttttttttttccggcccacacttatacgaagtcatacgtacataagtttttttctttttatggcccacggcagaggaagggattattttcttaaataatagatctaatctaatggtctaaaataccgggtccatcaatttaaatgaaaatcgatagttagattagatagtgttatgtggcggtctaggagtgtttgtaagagtgacatgttgcgtcttgagagcgtttgtagaaagtttaatggatttatagtatataataaataagatatgaaatatgttttatcgagatgaaaccagcgtgtactatttctaattaatatagcttagctgttgcatgtattgcattgcatgcctatacaataacaaaaataaaataatacattgtatggattgtttcaaccgtcaaataaatgtcttattgtttagtatatggtacctttggaattgtaaaaaatggcatttcccattaaaagtggccttgagccacctaaaagccactgtgatgtatggatggaagttcgttgcactggtcgttccttgtaaagtgatggagtaatgatggcctaagagcaagtttcttgtaaagtgatggagtaatgatggcctaagagcaagtttaatagtatagccaactactaactctaaatcatttatagtcaatctaatagcaattaatacaatagttaactacaaatatatactacatcattaataattggtctcacatgtcatatacacataacgttttagagttcgtgttacagctggctacaaatctatagctcacttctcttctctctcatctcttatctcctccacatgtgcttatagctgacttataatctattattgtactccctcgtttcaggtcataagatgttatgactttggtcaaagttaaactgcttcaagtttaactaagtttatagaaaaaaatagtgatattttttatataagataaatttattataaaaatatatttaattattaatgtaataaaactaatttggtaatgtaaatgttactatatttgcctataaacttagttaaccttgaagaagtttgactttaaccaaagtcaaaacacttaaaacctaaaacggagggagtacctgctaagagtattgattattaatgacaactcataccattcagcatgccaacgtggcacaaaaccaccctcaaatgggcgcgatggggtattgtgtagacggagtgccttctttattttgtttcataaggacaaaaaatagacaactcaatattgagcgacataaagtaaacttatcccaaagtaaatgaatataaagtcaaaaaaaattgagttagaactttattatatttaagttgaaagttttatttaatttgagttaaaagcttcactaaatttgaataaagcacttgtagtagaatttaatttcaattgaagatgtcaacatcaaaactactctattcgtccaaaaaaaatcaacataggcaatgatggaacataacctatgacaacgaatctggacatgctcatgtacagattcgttatcctagttaatatcccatccttattcaggttagcgttttttggggacttagtcttctagatcagttctctataccagaatttcatcattacttgtcagcttccgactgaatccttcatcccctattggatttgaacattttgaaggtcattctaaaggacaaatatttagacaaggccctgttagaaagcaatgcttcaaattttctctctcacccatctctagtctatcagtacatgtcccattgttagtctagacttgccgaaaagctgaagagcgttgtcagtctagacttgccgaaaagcttaagagcgcaggcatgctaccagcaatgttctcctaacagtcctagtccgtagctagttccctctccagaaatctatatctttaccgttgcccactattcagttaaatatgtcctgaacttccatgataggtttccaccctgccatcatccgacatccccttctgttcagtccgattgaattctaactttaacctaatagctttctcaaacatggctaaatccttaatacccaaacaactgttctcgcttggcatacaaattattcttcaagcaaccagtcagtgaccattgttgacttctaccactcgaatataaatctgcatgctctctttcggtgcgatgtatgtaccttatatagaaatgctcattgcaacatatattgcacttttattagtgctgacagactattttatggaccaattggtccatagtgtgcataaaaatacatgcgcaaatttgagtcaacttattatctaattagttggcttttttactaagtaaccaacaaacaattctaaaatagtttttggcaatgatgatatttctttttccaatatttttcataattactttgcaaatgtggtgaccataaaattgttgccaaggaacatgcaaaacatcgacatatgggtgaacgtattgagaatggaagagaatagattatagggattgtggattgtagtggagtgtggagctagtgcatgcttatatatgcttccttctcgtgcatggttatatgatgtttccttctctttggttgattgcgatgtgcatgtttctcctcctagtcggtagccagttccctctccagaaatcta

SEQ ID NO: 389 - DNA, 650 bp, Oryza sativa
tgctagtttcattcattgataaacaaaagagaaagcttgtagatatacttggtaacttctccatatatttgtttattttaatggattttttttgacctggctttcagaggggctaaaaaagtaatttcttactctatactcatattttatttacctggaagttgtagctattttggctcttttgaactgttaatgttcatgctgtctaccgatttttatctgaatgatgtgttttgctcaagtgcatacgctctgctattgaaccagctgtttctggatctataatttgtggatttttggatgactttataatttgcaatgcaagagttgggttgtatttttcccgctactttaaattcataatagatattgattcaactttcaggctgtttggttttaatggtgggagactacggatggatgagagaattgatttgagcatgagcgatcctgatttagtccctctgattatccaggtaggggacactgatggtgcaaatctgtttttgtttatttttctgtagaattcttgtgggtcctgtgtcctgagatattttctgctatgaattgtttcccgatactttttgtattaaaagtagctcatcaggcttgcaacttggtttttccttcatttttgaatgagcatcaca

SEQ ID NO: 390 - DNA, 4301 bp, Oryza sativa
  unsure (1)..(4301): unsure at all n locations
ctacaaatttatcctttctggcattccatggattctgtttttactcttcacacgtatgatgcatcgtgtatcaggttgtaaagcaaggtgattgattgttttcttctcttgttttattctgtcacaagcggcatcttaaatatctgactaactatataaatttgccaaacaaacccaagcttttttttttagtttggtaaggatttgaatattgttacatctttgggttgatatgatcttaatcttccattgtgcttataaatctgaatggatttaggccagttcatggtttcaaatagattttcatgttattatctgaataaaatgttttgtgtattagtcctaaatcgtaattccaaaccctaaggataatcagctcatcagtgaatcggctaattagtttagcacttggaagttagaacttaatcaaataacatggaattccagcatgatataccttgatacctccatctatgctcaagaagacaggcactaaatttccattaatttctttcaatggctggcaacatattaattgatggacatgtcatgcttgtttcctgatgttactatgtttgaaaatcatggttttcttaacagtgagcaaattaaacaagccttacttttcttaacttgcctgaatcagtcaataagccaaggaaaatcaccattggtttttgaactttgttttagcaacattgaataaaaacccatgccttttcaagatgttgtggtccacatgagtacaatctgatctttaagatgattttcgatggtttatcatgagataatccaatcttatattgttgagaactgcagggagtcattgaggctggattacctcactcttctcttgagacaattgactgatccactgaagacaatgcccaaggtatatgtagatgtgatctattaattaactccttgttttgttctatggcattatacttgaatgtttcatgatgaggataatgacctggacactggcattttagaaatttatcttgatacctctaaatgcattagtgtactagccatcttctggagtattctgaagtaaggagtctctttaatttcatttgctgaaaaaaaaaatctgcaggagagcgtccataccttgacttgtgtacacggctcatcaattctgagttttaacatactgttatcttgcctttatgtaatagtattaccagtcttcttacaataattccctgttaagaatctttacctgagctatctgctggttatcttatatttgtaaaatcacaggatgaagctgtgcaaaaagtggtggagtttatggatacctactctttaagccaggaagactttgacacaattgttgaattatcaaaatttaaggttggtagttattctaatagaagccctatgtttgtgccatctattttatgttcattattaatctctttgaatggttttatacttattacaatatgtaatgtgctactgctaggtttgcccccttgtgtttgaaaatacttactctagatggtaggttctaggttgcatgcaaagttgcaaactgtatatttcactacactaatgatggcatttcaattgatttcgggaatgcaaaagctcatttgctataagttcttattgtgcaatgcaattttttgagaaccaaattgaaatttataaacatgtgatcgtgtagatatgaaatcagagaacaaacattttccaaagtactgaaagggagtgtttgcctgtgaatctttagtgccacaatggttgcatctcttgactgtttgtctatactcaactccctgcttgatatattttttctagaagcattaatgcatgaatcttttagctgagtaaacttgctgacttggttgtcatgattagtaatgccttgtcattatacttccaatggtgtttctgaatacatattttgttctgtagggtcatccaaatcctatggatggtattcaaccagctgttaaaagtgccttaacaaaagcatacaaacaaggaagtagttctcgtgttgttcgagcagcagatctagtaaatatcccaggcatgaaaaagccattaaagaaacgagtggcagcaatccttgagccagtgggagagagtttgcctgaagaaaatggagtagcgtcatctgaaggcgatgaagaggattcctctgatgctgaaaataatggtaagtttttctttttcagcaaatgaaatgactatcacataggaggctatagctgtgttttgcaaaaattgaaataatggagtactttctccgttttacaatgtaagtcattccagcattttccacattcatatcgatgttaatgaatctagacatatgtatctatctagattcattaacatcaacatgaatatgggaaatgctagaatgacttacattgtgaaacggagggaatacatcggatgaggacatgcgtgaaacgaagggaaacagaagttgataagtgagcatttgtaaatctggactagttttgtttcatactgggaaaactgtggtacagtaacatgtcatactgccatatcatcttcatatacatttgtgcttttattctcaatctttagttatgcaacttaggcctatgtttgtcagctgttgtgctagtagtgtttggcataacaatgccatgtcatgtcaattatattagcttcagcccaattttcattaggacatttaaatcgataatttgtattcagtgtatgttttgtttgaccaacctgctttgtttatttctttcagatgaactggtgcctggtgacacaaaaccaaaactggacctgcagagtgataagaagaaaggttctcgtactttgactagttggattctccaccagtcttaccttctgctatttacggtcgggcctgactctttggtaattttggttttatatccagggatccaagtgcagctcgacctgaagagcaatggcaatggcttgaactcgaagaagatgccggctggtagatcaaaagcttctggctctgctgggaaggctgctggaggctcaggtgggaagaggaagaggtaaacgtccgccggccgccgtcatttagtcggtggtgaatctacatgaacatcctctgatattctggggcagaatgcggttcanattttcttgcttgtacataagtcccaatcatctttgtaggcagtagtaggcaattggtatctgctccagatattttgtttcctcccacttgtatgagcttcatttcgctctactggcatttggccagttttcagctttgcaagacaacgtccattattgttgacttccgttcaatgaaattgtgtcatgtttgttgtccttttgatatcttgttgcattcatctcccaaatctgccgtagggtgacacattaaaactgcatgattctataaacctgtaattccatcttttcgttaatactagtaaactaggtgttacttttcttttttttagaaaataatgggcttacggaaaaatattatactcttgtcttaaaatataaggacttagtactagatgtaacattaacttagcactatgaatttggataacctgcctatctaatttgtactagaaatgtcgtattcaatcatacgttcttatattttgggatgaagggagtagtattttcaacacaacataaatatattattaaaatatattcaatgctaggtttaataaaattaatttaatattttagatgttgctaaatttttatataaactagaaaaatgttgcgttgcaacaggtgaatgctattttaatattattattgttatatggtttagttatggtaaatttattgtgggaatttgcttggatttttcttttggaaaattagcgagtccgacattcattcaagttagcatgcggagtttgttaaaagagatttcttatatgaattcttttgtgtttacaaaagcaaatgagcttaaaatccaactcaaacacaaatatgtattttcaaaaacgaatatccttaaaaaccgactcaaacacggatgacgtatcaaaatattggtaaaaatatctttaatttttataataagtagagatttgatcaaactcggaaaaaaaatcaaatgacttatatgatataaaacagataaaatatttattagtcccacgaaccgaacgaattcgatgccaggcaacaaagagttcctggccggcctacataaactctgtattaggtctttccgagctgataagtgatttttttataaaaagatatataggaaaattactttaaaaaacagtattcattctactttttaagtttatttaagctaatagtta

SEQ ID NO: 391 - DNA, 710 bp, Oryza sativa
tatttcaccaaagagtaataaaggaagtgcctccattgacaaccaaaaggtcaacattgttgaccgtggttctttgcaatggactgaaaagtatcggcccaaagttccaaatgacatagttgggaaccaatcaatggttagtgcttctgctttcggttaagctggtcacatacatctatgcacaattacttagtatgaacttatacatgcaggttaaacagcttcatgattggttgagaagttgggaggaccaattccttcattctggccagaagggtaagggaaagaagcaggctgatagtggagctaaaaaggctgtgttgttgagtggacctccaggtattggtaagaccacaactgctaaagttgtcagtcagatgcttggattgcaggctattgaggtaattctgctgttttgcatactttgcaaccttccaggcaactctttgtttcttactcaactattgaggcataaatgcaatgactaatgttcataacaggttaatgcaagtgatagccgtggtaaggcagactctaagattgagaaaggtgttgggggcagtacatcaaattctatcaaagagcttattagtaatgcaactctgaattatagtaacaaccggtcagtattacatgaagtttcatcaacctttttggacctttggttttatcttgtatataaatttggcaagaattttgacagattaaaa

SEQ ID NO: 392 - DNA, 1657 bp, Oryza sativa
ccatgcatggtgtctttgcaatcagtcaatcgtgggatcacattattcatcaaattgctggttcttatttgttacgtttagttcttgtttgttatgcatgaatttggtcggagaaaggatgcgatttataggacaccattccataatgaacaatgaggcaatctgcaaaatggtcatctagaatctatgtgaaactcagtttcagttttagaccttctcaagtattataagttacagatttgcagcattttcctttgatcagcagtagaagtttcatttacatgttctttactctcttgcttcttttctagcttgcttctgaaatctcaactttatttaggcaagaaggggacttggcctcacagcagatattattgatcattgcaagctagtccttagatttcctaaaggaaccaacagcacttgggtaagtattccctgtcatgttcacatgcagttacttctgttaacggatttgtgtccttcaacaaaggtccactcaagatatcacttctcttgacttatgcagtacaacactcagttcaaatattttgaaccactagaatacaactatgatgtctgtgaaactatccttctgtgggaacaggttagtacatggtttatgaattatgaaatagcgtgtttattagaatatatacttatgtgttaatgctaatatgatgccagtaccgtaacatgacgactgtgttgacaagggagtacttagatgtgcgacctgatgggtggttggattatgcagccaaaaggattgcacagctgtaagtttgatacttgttgcacatttgcactattcttcgtaacgaagtgatattaatccgcatactggttaatgtgctttaaaaaatatgcagcggtgctgacaaatgctacaatcgtactttgtgcgaagagcttcttagtgttttactccctgctaagcctccttttcatcctcgccagtttgcaacatgtgctgttgttggtaactcaggggatctcttgaaaacagagtttggacaagagattgatgcacatgatgctgtgttccgagataatgaagcacctgttaataaggtaatctcattgagttcttcatatgtatctaagctaacacttcatatgtatctaagctaacttatgtgaatggcctattttagtgtgttcttgttgaccccgtaggcagctaagctcctcctgttaagttattactccattctctcttcttaatgcctaccctgaaccccttgccatcttattagcttcttgttattttaggtgtcttctatcctaactccggacatctaaaaattatattttcttctaaagttggcacagattgacactcgtttactaattttgctcttattttatctttggcctgcagaagtatgcaaaatatgttgggttgaaaagggactttcgactggttgtcaggggtgctgctcgaaacatggcgccaatactaaagggctcctgtaatgctgtaatcctggtttcttccagataacttcaatcctgatagtgttttaatttactttttcataaatgagagaaaatataatattcgtattggtgttctctattatcctcgaactattagaaagcacatggcaatgtcgttcatttctggttttcgcaacttggaagatgccttgtt

SEQ ID NO: 393 - DNA, 1084 bp, Oryza sativa
ttccaggtccatgcctcctccttacgagccactcggtccgcgagctgaaaaagctccgcggtagtctggggctctttggaggcgatcttttcgagcatgcggttgtgccgcacaccccccctgaacgcgtagatcaccgcgtgtgcagggatgcatggtatggtgttgcggacttgacagaaccgctgaatgtatgagcgaagtgactcgtcatcccttcgctgtactgcgtgcaggtccgcttcttcacctgggcgcggatatgtgccttgaaagttcatggtgaactgttggcacaaatcctcccaggagtggaccgacgcgggtggcaagttcattagccaaccccgcgcctgtcccttcacggccatgggaaagaaattcgccatgaccctgtcgtcacccccggcggcctcgatcccggtcgtgtagacctggagaaactcggcggggttgacgctcccgtcatatttttcggcgatggtgggccggaaccttgggggccaacggacgttccgaaggctcgccacaaaggctctacagccgacaccaccaaccgggggcacggagggctgatccccgcgtccgtgttgatgagacactccggacgaggaggcgccctccgttgcgtgggcagcacgtcggccattacgccggcgctcgatatcgatgcaggcatccggccccccacgcagatcttcctgggtcggaggcgctgacgaaggagtggcggccgaatggcgagcaacagccgccgctcgccgcgccctccgccttgacgacacggagccggtggtagcagcgccagaggtcttggtggcggaggaccgcccaccagcacctaggcgctgccgtgccgtcatgaccaagttggccacgtcgtccagccaacgttgggctggagactccgggtcagggacaatgggcgggtgacgtaggagcgcgcccgcagcttggagcgcgccctggggcgtgctgccgtcgccgtagacgaggaggcgacgctccccatctcggcgcccttctccatcacccgtggatgtcgaagtcgcggatccttcgaccctctcgagcacctcctccc

SEQ ID NO: 394 - DNA, 610 bp, Oryza sativa
taacgttgtcaaaatatagtgatgacggatctatttttgtaaagctttttttttaaagcattatggtggaaacgggtcaaaaatattatatatgatgcgagagatacgattgtttaaagattagaatttcaaataatccacttgggtttagtttgctattatgtatcttttgtggtggtcactttcctccacgcccacctctttcgtattctcatctcggaggaattgcacagtaacaagacaaccatactgttctaacatatgattacttggtcgtagaacaacattcgtagtctgtagaagtatcgttactactacatacatgttccgtgttactacaatatctattatattattaaaacagccttgaaagaaagcaccacgttcactgtgggggctagaaattcccacattaatcagagaaaaagaaaaggagagtccaagtagaaatacaattcaaaaatagctgaaattctgaattaaaaataagaaatattgagagaagagttaatataagaactcaatacgattttagttaaatattccggagacaaattaaaattagaatttaaaataactaattttgagagaagagtcaatataagaaccc

SEQ ID NO: 395 - DNA, 527 bp, Oryza sativa
aaaatcattaagttaaggtagatacacatcttgtcatatgatcaaatggtttcgccaaaaatcaataatcagacaacaaaatgtgcgaactcgatattttacacgactctctttaccaattctgccccgaattacacttaaaacgactcaacagcttaacgttggcttgccacgccttacttgactgtaaaactctcactcttaccgaacttggccgtaacctgccaaccaaagcgagaacaaaacataacatcaaacgaatcgaccgattgttaggtaatcgtcacctccacaaagagcgactcgctgtataccgttggcatgctagctttatctgttcgggcaatacgatgcccattgtacttgttgactggtctgatattcgtgagcaaaaacggcttatggtattgcgagcttcagtcgcactacacggtcgttctgttactctttatgagaaagcgttcccgctttcagagcaatgttcaaagaaagctcatgaccaatttctagccgaccttgcgagcatt

SEQ ID NO: 396 - DNA, 1273 bp, Oryza sativa
tgtgccctttgagttcttcctgctgtacatgtcccttttgttgaggaatttctatgtaatctgttgtatggtgaattggcttagcagatcaattattgctaacaatagacaattttatgtaacctgggagtttcttgtggccaatagtctcaccatatgatgatgatatcatgtgcctgttcatactcctcctgctgattaaatctgggcattattttgtgcaaatgtttgatgatatccctggcatttacaaactacaaagaatgtacaatggtggatttagtttttggcgtagaatatgtaggcgataaaagtgatgaattatcttcagtatgtcatgttccattgcgcatcatgaatctaatacaataacgtgtaacagggtactctgctctgatcctaggtttattgtactgctgcattagcctctgttagtttggctacaaacttactgcagtctgcaaattatacactgcttccattaccttaattgtttgatacatcatggtttcctgctgttgagtaatttaattactggatcatccaggcggcttgtgatcaagattgttcagctagaaggaagactagcaagtactttgcatccaaaacagaaaaggaggaagacaccagtgcaggaaaaggtaccgggagaggtttgcctaaaagaaaacttcagaaagtcagtgatgagcttgaggatgacatgaagcctttgccagcaaaggaagtccataaagaagaagaagatgatgatgacgacgactttgtggcaccttcaaaaaggaaaactccggtgaagccaccaccatcaaagaagttgaagggtgcatctactgctgaagctcatggaaagactggtcttgatgatgataacgaggacaagatggatgaagacgctaagaccccttccaaggcatctggaagtggaaggggaaggggaagggggagagggaggggaggaagaggagcaggagcagcccatggaaagacaattggtcttgatgacgacggtgaggaggataagatggatgaagatgccaagaccccttccaaagcagctggaaggggaaggggaggagcctctgggggaagagggagaggagggggtgggagaggcttcatgaactttggtgaaaggaaggatcctcctcacaaaggggagaaggtagcttattccttcttgttataatttgccagaaaactcaatcctaaacttgttattcgtgttctgtaggaagtcccggagggtgcccctgactgtttaactggtttg

SEQ ID NO: 397 - DNA, 2565 bp, Oryza sativa
agacttgtatggttgcagtccgaatgaccttctgacggggccgcccatacctacctccacttcccccgaaagcaggcgcaacgtgggaacatggctgtctgctgacgacatgaccagtgtcagtccggtcacaaatcggtcattcttgtccgccccgcgtcagtttatcaatctgcatgttcgcccttcttcatacaatatcttgcctgtaatggttaggatgaagcctggcatatatctgaccggaaccaacgtgccatctccaggagctaacacgccggttccggctagggacgagtgcttggaggctctcgtcctgacgggatggggcgaggcgtgcgtcagaccgcctgtcgccacctaacccacgatctgaccggtctgtgaccggtcacagaccggataaacgagcgcgctgcactgcgttacatgcggcgtgacgcgctcgtccaaaccgcaataaatgtggttaggtgagccccgctatgctcacctaccccatatacgcggcgcaaaacccacaaggggtcggggcgcctcggccctcggggccgaggcggtagcggtccgacccctcggggagacaaagagaagggcggccatatcaccctcgggcccgacccccccgagggggttaggccacgtgggtgatcgtgtctgcctcaagtctctaagtcatgatactcccggtcccatgtcaccgacagtagctattacatatatggtcttattgtattttttttacagggatgccatattaaaaaaaccattatcactagtgatatgctcgtactaatgctactacgctatttagtaatgtaaaacaaacaaccaaatgtgacgatatatgttttaagaagcttctcacaaaaacttaaaaattgttactcactccatattcaaacaagaccgtatcaatcaaaaaaggcacatcataaagaaaaagaaaattaaataatctatgctacgagcctttaccattgatatcgcccctaagaactaaattacctacatactatctattgcattgcgctgatggatcatgcatgtcttccatattggaaaaacaaacattatgttctacagcagcatggattggttgttgggattccaaattgttatgctcctgaagctccctgttggtaacggtaggcacaaactggcacaaagtaaatcatgatcaattaaacaaaactcactaaaaacagtggtactagttcaaggaaattaaatggcatcataatttaaaagtatgctcaaggaaaattaaacaaccatgttatcaactattacaattcggactcatatttcattgtgaacttaataaccataccatgcttataagtcatagtagggtaataccatagccaaacttaacgcgtgacactgacctgaaggaggctaatacaggaaagaaaggcatccaaacaccataaaaattaaaaaagaattaacacaactactaaatggatatatatggtcaaaagttcatacacgagtacttatcccttataagagaaaccacaacttaaaataagagtttatccgactaacaaaagagaacaaaggattaaacttctagcctccttctataattccaaccatacttagaaaaaggaactctggaactctcttctcccttatacttcttcacctcgattgccttatcttcttaagtaccaaagactaaagtcatacccggtatgttactttagatataacctgcattaaaaaccacatcatttctatttaactgtatcgtcgaaaataacactgtaatattaacaaagattcggtttatgggcttaggatgaacacctttagccaactaccaaaaggttataaacattagtgggggtttcaatgccaaaagtaaagaaaattgctacatgtaaacattagttttattgaaaagttgattgcacatattttttaaggtttctatagtatttcttttactctttacaacaaaaggttaacattgttcttaaatttgctacttgcacgagcattacgtttgaagtctaaaccacattttttcttatcttacatcgaaaactcatttcagcatccaattaactccaaatacaaatacagccgttcaaattaacatttcaattcaatgattttgcccatatatagtatatccaaactctgttaccctcatccaaattttcttttatccctatacgatatgactttctttcatagacacatcaatcacacacgttgagagaacctaactcccttcgtcacataaaaagatgaatctaggataagatgtaatacatttttagtactatgaaactaaacagatgatatatgtttagattcatggtagtaagatttgtcacattcgatatatgtatagatttatcgtactataatatgtcaaatttaattctagatttatttttttaatagaatgaagggagtatgttggatttttacttgagagagagagaggacattgctacgagcaagagcaccaagccacaaaccccatcaaagcgaaaccaatgaatgtttgtgtcacgcacgctccaccgatccatccatccagcc

SEQ ID NO: 398 - DNA, 588 bp, Oryza sativa
agccatgttcccacgtctcgcctgcttccggcggaagtggaggtgggtgtgggcggtcccgtcagaaggtcattcggacggcaaccatacaagtctccgtctgtttatgaataaaataggataagtccccacaaaaaagagagagatggtgcatgtggtatccccttgaggtataaaaggaggaccttgcccacttagaaaggggattgaaggggggaaaaacaatcccagaacgatcgggggctggctcgcgctttgtagcttcttcatacacagatccaccaaaacacaggagtagggtattatgcttctcagcggcccgaacctgtatacatcgaccgtgtcttgtgtgatttcactctcgcgaactttccacaaaccaagagcttagaacctcacccagggcccccggccgaaccggcaaaggggggcctgcgcggtctcccggtgaggagccccacgctccgtcagctacccttctcttcttcttgtagctgtcccatctcctttctccttctagtgccggcttgacaccaatactacccccaatctttcgctcaccgtttcaggcgtgaacttccagtgagg

SEQ ID NO: 399 - DNA, 1147 bp, Oryza sativa
cctcgccggcgccatcaatggcggccggatcttccgcgctcgtttccccctcgtccggccgccctctctcactcccaaccctatataaaccctccccgagctccccacctccgtttccgccactcgtcgccctctctccccgtcggaatcgagctcgcgccgtcgttctctctctccgccgtcgccgccgagctccggtccgccgccgtcgtcgccccggaccatctcccgcctcggcgccgcctccttcggctccgccgcatcctcgccgacctcgtccacccctccgtttcgctcgccgaccgccggaacgccgtcgaccccgtcgacccgagccgcgccgctgccttcctccgctccggccgcctttttcgtcgtcgccgtcgacctagggtgagccgtggaccgtcgcctcgtttcctcctttccctcccttctctcggccgccgctccgccgtgcctatggccgccgccggcgaccataggggcgcgggcgcgccgcctgtcacgtcctgataaattcatcccgaaataaaattcattttctaaaaggaataatagaattaattaaaattcgaaaagaaattggcaaacactaaaatacgtacaagaaaaattcgaatgtggcccggagaatttttgttaaattctccttggtctaaacggagccctcaaattttacttgaattttcagagcactggaaataattattaagcaacaaaaacaattatcggagtttattaaaaagaaaaactaaaaataatcccccttcctcctttgggccgagtttggcccaaagtctttccctcatccctcctttttccccttctctctcgggcctcctctcccctcggcccagctccctccccctcccttcctttctcaggccgcccctccctcctctccttcccggcccactccctcctctcccctcccacctgggccgtgtcccggcccagccgagcctccccaggccgcgccgcacgcgcccgtcacgcgcgcgcccacgcgcgctgaccacgcgccccgcgtgggtcccaccgcccggtcgtcgtcctcctcccgcccagcttctctctctctctcccgtgaaccctagtttcttcctccctcaaatccacgcgaatcaatgccattctttccaaa

SEQ ID NO: 400 - DNA, 21103 bp, Oryza sativa
gtcaccgagtaagtataggatggaatacaggctagatctgttggaaagggtaactcaaagatcataactgaataccttttaagttaacctcgaggccaatgcactatttctaattgtagtgtacctccaataattctccatatttaagtatattcatgctaaatttcttttgaaaattaccgaactacgcttccatatcattacaaccttacaaaagcattgcaaaccgatccagctcgatcttctgtgtggacttaaatatgttttaagtagtataagcaatatgttcatacggccgtaagtgaatcatttcttaattcatatgtgactaatatatatttagcatgttacttcgcatcaagtcgatgaatcataaaaggtgaagaaaataacacatataagcacaatatacttctatttcatatgacataaatattttttatattatatatactccattagtttaggtcgatgttactatgtatcaatagtagatctggtcaagaatttattttaaattaaacataccgtataggcaatcctttagttcttttattttgttttttttagtttagtctggaaggaagattctaaagttacaacttgcaacttattacttcctaatttttgaatatcaaactaaaaactatcaaattgagagtaaaatagaagaacaaacatgaagtgattaatttcagaaatattaaatcatgtaaaattttataattgttactccaataacagtacaaatcgatacttactaattatgaattttagaattacaaaataatgaaaatccataaatgagaatccaaaccaattacaattcaatagttattaaatatgattttagcattattaaatcatgaaaaagctaacattaagacccccaaagccttttctctgagaaaaacatcaagaccccaaacggagtacaaccgatattttttaatcatgaatcgtgaatcattttagacttcaaaaaatatacaattatatactaactaattatgcatatcaaattattatgtcatgaaaagttataatggaggggaaatatcctgtgtacacaagcttttttttttttacacatcgtgcacactaacaaattttatcgaaaaatctaaaaaaagcgtaattaatcatgcgccagtgatccatcacttttatgagctgcgaacagccgcatagatatctgtgataatccaggatatgcccaatcactagttatctgttgcggccaatcttttggtggctagatgttcatgttcaaaggaagaggtatcttacatctagccaaattctaactactctgcattagtgtgcagcacatgtggattcatttgcgcatcttattataccaagtgggacagcagagactgaaaacaggcaccagccaaccaattgcctcttgtcctttgaaatgagtatttttgggccctgattggaattttagcttctaaaatcctaatgattagatcaataatagaagcaatattgaatgggaggaggaagaggagggacttacatgttggtcccacagctcagtctcagtgacacgttggtcccacattcacccgactcgactgtatcaatgtttcgctgttgtgtttagttcacactgaagtttgtaagtttggttgaaattggtacgatgtgacagaaaagttgtgtgtgtatgaaaggtttgatgtgatgaaaagttagaagtttagaaaaaaaaaaactttggaactaaacaggaccatactactgcatagcctgtacaaatcaatgctagcaactaaacacgataataaaattgcctcatccatttttattttacctgttactttgaccacttttcaaggttttacaatactacctccgtcccaaaataagtgtagctgtggatagtcgtgaccaacgtttgaccgtccgtcttatttgaaaaatttgtgaaaaaattaaaaatatttagtcacacataaagtactgttcatattttatcatctaataacaataaaaatactaatcataaaaaaatttcaaataagacgaaaggtcaaatgttaaacgtaaatagtgcaaaactgtacttattttagaacggagggagtactaatcaatacattctttccaaggtggtgatttccctttttgtcctttgtaggccaaaaagtgatatttaaaatactagtcaatacatgcttttcaaggatgatatttagttgacatatgtatttagaaggtttagatcatacatcccactcaactagggtctttttcatcattttaccttaaacaagttgattgcattggtatgtgtacatgttcaaaagtgacaaataaataaaaatggaggtagtacaactaatatgtttattgttagagacacatgatatactcgttataacgatcacaaagtacaaagttgcatactacaagtgaaaaaacataatcttggatacgtttatagacataattacaacagcataacaatcagtttttgctctcagatgtccaaattacaagtgagacatacttcagtgccatgcataatccaacaagggaagggtaggaaatgaacactccagggatgagctccaaaatctgacaaggggttcaaggatgttatctattccctacaagagggtttgttttatggcattcaattccttaataatatctccagttgacattctattcgacggtatttcctgagagcaatacaatccaagcctaagcaatgaaaccaggcaatcaatcatgactttgtattcatccgtggtacgaagttcattctcaaggtgcaaagatagctgagtgtcgacaacatccatcattttaccatgtagacccagctcaacatactcacggaggctcaatccttgtatgaatttcttatctgtgggcctcttcccagttaccgtttctagcacaagaataccatagctgtaaatatctccttgagtcgataccgtatttccagcaccatactctgttcaatcaaaagtttgccaaaaagttaagatttttgtaatccaaaatttaacatagatttataatattattggcaagaaccataagttgcttccctaaaaacaaattttcttttgcatcttccttaaaagtttgtttagctgcacacgtcattaataaaagcactagagtactagacaacattaaggaagcaaatgagagaacagtaaacaatatttttaaaaaaaaaaaaatgttacagtaaacacatcaggctaacctgggggagcataaccgattgtccctctaagtcccatcgagcttgtagactgttggagcaatgagttgccttcaaaaagaatcttagcaagtccaaagtctccaacatgtgctaccatctcagcatctaaaagcacattgctcggtttgagatcacaatgtacaacaggtgttggtccatggcaatgtagataatccagcgcattagccacatcaagtagtatgccaactctctgaagaagatttaagtactttgggttgtttgtggcaggatgcaaccagccttctaaattaccactaggcatgaagtcaaacacaattgctttgaagtcattgccgctgttatcaatgcttgagcaagctgtaattatcttgacaagattccggtgtcgtagatttcgcagtgcttcacattcagctgtgaaactcttgagcgctccaggagtttggagttttagcactttgacagcaataatatctttactttgaccagattgtttatctaattctcctttatacacagaaccaaatgatcctgatcccaacaaattggtcgctgagaaactgtctgttgcccttgccagctgagagtaagagatcaaaggatggccttccatgcatgtggttgatggtatctttgattttattttcttgtaccgagccagaagcttgtagaataataaaagcaggagtaatgttgccacaagagacacaacaataggaattaccagaaatttctgccttctgtgcggtgcttgtgatgtacatctaggcaaatgtagatcaggcacgccaccacaaagtttgccattcccttgaattgaaattgcagaagcattcaaaaagacaccaagtgtaggtacttctccaacaaaatcattgaatgaaaggttgagataaccgagcatggtaaggtttgataggaatgtgggtatttgaccagacaaattgttactcgaaagatcaagagtttgtaggcctttcaattgactcaggagtgatggaagactaccagttaacatgttattttggagatagatattctggagaagttggcattcaccaagggtagtagggatttcacctgataatttatttgatctggcatctaagtttacaagatttttcagattcccgatttgttgtggtattgatccctccaagttgttattcgacaggttcaaaccttcagagagactgacaatgctgactacctctgttgggatttgaccagtaaagttattgctgtctaggcttagtcctaataagtttgtaaggtttctaaaaatgcttggtatgctaccgctaaaagcatttgatctgagttgtaaaatatatagttctgttaggtttcctaatgtcaatggaattggcccaccaattttgttgttccctatggagagaagatgcagattttgaagcctaccaatggaggagggaagatgccctgtgaaattgttgttatcgagattaaatgcttgcagattgatgaggttatcaatatcttcaggtatgcttcccgaaattttgtttgtgtcaaggaaaagatttgtcagagaggacaaattggaaagtgaatcaggaagaactcctccaaagctgcaactagccaagtacaacacgctaaactgggaacaatttgttaatgcggttatgaatttccaatcgttggggcttctagcttcaagaaatgtttctgaaagctgtagaattttgagatttcttaagcctccaatctctggaggaacgataccgcttaagaagttagcaccaagctgaaccaaccacagatgggaagcattggcaatcgacgtagggatactaccatgaaacttgttgtggtccattcctataagctggagactgggaaaattactgaatgcatttggaggaatggttccacttaacgaattttgctggacagtgaacgccattagtgctgacatgttgttccaaatagaactgggtatcagcccagttaaattgttagagcttaatgtgagcctagataaaccagacatcttgcctaaggatgaagggatgcaccagatagcctgttgtaatcgagaccaagaatccagaggttggtgagattgcccaaagcgggtggtatctcaccagagaatctattgactctaagattcagctcttcgagcaaaggcaaatcggccaatgaccgagggatctcaccagagaaaccatttttctcgacgttcaaaagcacaagatttttcagactggctcctatctcggtagggaactcgccttgaaattggttatcgcttaggtggagcaaggagagattggtacatcctaccagagcaacaggaatgttaccttggagagaatttgtgctcaggttaagcagccgcagcctgctgaggcgaccaagctctggaggtatcgacccaactaggcggtttcatgaagatcaagaatcttgagaaaggacaggttgcccaagaatggtgagaggagcccagagagtctagaagatcccaatctcagtgagataaccctctcagggtgccgacggctgcaaacgactcctggccagctgcagtagtggattgacttgttccatgatgccaacgagccatcggatgcgaacatcgacttgaaggagaggagagcgagctcgtcggcagtggcattgctgctgctccctggagacaccagagcatcagaacagaagagaaacaatgagaagaaaaacaatatgattgttcttgccatgaccatgaggaagtgactataagcacaggcctatgttctctaaatgacttacatttttcatatcgttgcatatgtgtatatttatgtctgaaactctgacaaattaggaagctgtcgctttgtcagtcattggttttatttttctagacaacaagtcactggttgtctcgcaccagtctttggtcaatgttcttttcatgaagatgcatccaagaactacactcttaacattcatgggaaaccttccaagataaattgtcaagtgggaaggcgatacagacactgaaaagcagccaataattcggcgctgcatcacttcagcagtactcttttgaatgataggattcatcctttcgctttccaactgcacaagcacagatctgcaagttgcatatatcatatgccgatcaacaaggaaaatttcgacagcaactagctgcgctcttcaccaatttcacacgactgtccccaaattatttcatatccaatcaatcaactaatcaagaacacctcattatacccagtattcattactcaatatgactccccctttatcctcaagttcttagcagcccaaactttatctgggttgcaaaagttgcaaaaacatttttttaaaataaaaaggttctttttcaggaaaattttgagccaattttttttctcccccctttgcttttggtctacgcccatggtatcaagaaaagcgggagttttttcattgcagcagtgaccaaatagtctacagtaaagttgcggaaagcgaagcgaagaagactaaccctcgatgccatctgatcttcctccggtggtttgcccgtcgccaagaaccacgaaacccgtcggctctttgccgcctgctcgctcaagccgggctccagggcatcgcctgcattcctatcgccggagagggcctccacctccgccgcctcctacgggtccgccgcatcggcgtccgagaggaagtattcggattggtttttcggactagccggagggggaatacggtggacggaccgaggaagaaggaacttaggccctattaagttcccaaaataaaaaatttcatgatacacgtgcatacattatttaaacataggaaaaacaattacacacgtaacatctaaactagtatggtggcccgcgtaaattgcgcggctagtatcattatattttctctcatgtaatagcatatatgttttctcaatgtattattcaaatatattaaaatggcaatataattttaaattttgtactaactttacgaaactaatatgtaatatttatattgtattatatatacgtgctagttattaattatttttaatatcaaattttagttatttgtaaattatattcctatatttactctagactcgtctttcaatatttcctttttttaatttcaaatttccgttatatgtaaattgtatttctatatagactctaggctcttcttccatttgtaaattatatttttatacggactctaaactctactttaattttattatgtttattctaaattttaggttaattttaaatttttatatagactctatactctacttctaatatttcttattttttaattccgaatttttaatttttcttaattgtatttctatatggactctatactttacttctaatattccttatttttaattgtatttttctaatcatctggcctcacaacaaaaacaggaagttctttactagatcaatgtataggatcttgtcttttgggagggtcagggatactgatatgtgggaaatctggaagtgcaatctgcctcttaaaatcaaacattttctttacctagtatgtagagggagactgccttgtgctgatcagcttgttaaaagaaagtggaggggtactaagttctgtaaactgtgtcttaatactgaaacaactaatcatatttttgtgtggttgtcccttggctgtttttgtttggtgtgtaattagagaggccctgcacctctcctctcatccagccaatttctgggactgtttgaggctttgggtgaacaaaaaagattcgaggctttgggttttctttgtgggctgtgtttgttggtccttgtggattattaggaatggttgggtttttgagaacgttttattgtcctcacctccacaggcagtttataaaactttatcttttgtatagaaatggtctattctgctaggagaagaggaacgagccacgctgagaagctggtgtgagaagatcttggaaaagctgaatcatctgagacctcgtgctttacctgtgtccctgagtctgtagtgtaaggaagtgtgggggttctggttgtattttgttggatggatgctataggctccttaagtgtttgctcttgtaagctggcggtcccagcaaactttatcttttacagttttccctttatgtaaaaactcagttatgtttgggctttcttcaaaagccgggtcataatgatctggtatcaaaaaaaatactctacttctaatattccttatttttaattccaaatttctattattttctaattgtatttctatatggactctacactctacttctaatattccttatttttaattccaaatttctattatttcctaattgtatttctatttggactctacactctacatgtaatattccttatttttaattccgaatttcagttatttcctaattgtatttctatatggactctatactctacctctaatattccttatttttaattccgaatttcagttatttcctaattgtatttctatatggactctagtctcctcttctaatatttcttatttttaatttctaaatttcaactatttctaaattgtatttctatatgtactctagtctcctcttctaatatttcttatttttttaattccgaatttcagctatttctaaattgtatttctatatggactctgctttttctttttctccgattaatgtgagaatttctaggccgtgagagcgaacgtggaggctcctttttctattcctttaataatataatagattgcaagacgaatctgttaaacctaattacgccatgatttgacaatgtggtactacagtaaacatttgttaatgatggattaattaggcttaataaattcgtctcgcagtttcctagcggaatctgtaatttattttgttattagactatgtttaacattttaaatgtgtgtccgtatatctgatgtgacaatcaaacccaaaatttttttcccaactaacgaggccttagtacacgttaaatttcgatgcctgcaatacgacatccattaaaaatgagatataactgctgatagtttcaaaattttaacccatcaaagatgactatgctacgtatattccccaacattgtagtgaaatacatgcgcctttacctctacctctactttcacctcagacacgagaaaacaacattagcacaagaggtggacggtggcaacctcctccatcccccttaaccgtggtatcttatagcccttgcgcggtggctagacaccttcaaatttgtacgtgccagcctagtgcgatgatgaaacaatgtgccagcaaggcgcagtgaccagtgagagaggcaagacgaggagcaaatggtagcgacttccccaaagtagacgaccttctccaacttttgccgctgtcatgtccttgatccctggtgtggtggcagaggtgggaggctaggacgataggaagggcaccgaaattgtcacgccccgaactagtcccgaccggaactagcccgtgacgctccaaattaacctgttaatcgataccagtcccaggaaacagtgctggtatcacagggagacagaatatcacagcaacagaggtctctttattatagagtagatgtacagtcatgttgggctgcggacagatcccgagctcacaactgcaatacaaaagggaaacggaagccaggatttggaccaaacatcacaggcgcgacttgggaactaggccgaaaccctaaaactcttcatagccggcttgctcctggaagaactcctcatcagcaggatccgcttcatcttcttcagcaactgggggcaattatttatatagagcaagagtgagtacggggagtactcagcaagccatgggaaataagtgtttaatgcgggcttcaaggaaaggctgatgtttttgcaattaattttatttgaactattttctgaaacgactaagtgagtgcttctcaaacgacacggatgagacagtgcatctcgtccggtcggagtatgtgcaatgtatcagtctttagaatttaaacaaggttggcacccggccaacagctttttcaacggccacccgggccaacaacttttcaaacggccacccgggcccagctgatcccatcagctgcagatttttcaaacgccgaaccccttttcacacagcaatttcacaagcagtagtcaaaccaaactacgctaggaatcacctcacatccgcccatgaccgtggacacggctgttcgaacagtttgttaacctctgcagagggggtacactttacccacacgacattactaacccgggtcacctagcccgtggggatcagccacgtcgggagacctccaagctttcatgacaaggcatttctaaagccgacacaggtttaccatatgccgacgagaggggtcccagaccaacaacaggttaggtcccagaccatactgtgccaggaagcccaggggtcctccccgacaccaccccggtgaatccacatgtctctcggcatcaaggttcccctgataagctagttactcagccaggggtgtcccattccacccatgtggtcgtacttgtcttatgtttggatgaaattccaaggaatcggtccttaagtgcgagagcgggaaaccgtacacccggtacatttcccggtccgcggtttttggaaattcatttagttcgcaagcaccgacccaggtgtcgggttttccaagtctttttaaaactccagttttacccaagttgttactcagattttaagtttgaaggcggccgtcgatattggcacagggtgcacgaatatcgaggcgcaactagatggttacaaggggacatggtatagaaattatcaatggaaggatcaatgcaacaagttaggtaggcctgccaatctgtcttgcagacggaacaacagattaagtgcgatcctatcaatgcataatatttttcaagcaacataattagatttcaaatataggctcaagatgttcaaaggtggcttgccttgctcgagatctggagcttgatcctcgaaatcctcgcactgtgggtcttcgggctccgaaactatacgcgaaacgggacaactcaacaaagggcgaaaataaagccctattaatgacctctaagcgtgccattaaatagatctcgagatttgagaaattttggaagttgaacggagtcaaacggatttacggttgggatgatattgaatttctaagattattggatttttggtctaaaggaaaaggatttaattaaatcccccttttttttggaaaagaaaagaaaagaaaaaggaagagggagggaatatagacttttcctcgggcggctaaggcgcggcccaagggaattggagcggctcggccgagcttaacgggccggccggcctaagaaggcggcccagagcggcccaagacgcgcgcgcgcggagggaggagagagagagccggtggaccaggctcaccacgcgcggtcccgggtgggacccgcttgtcagcggctcggctcaccatgcggagggagtacgtggctcatgcgcgcgggcgggggagggacgcggcgcacgcgcgcggttcgcggtggacgcgggtgcggcgggcccacgcgcagcctcacggctcgcggtggaacgcgcgcacggggagggactgaccggggtcggctcggcccggtctaggctgagctggcaccgacgtggcgcctacgtggctgccacgcgggccggcgggaggtagacgacgacccggccgcgaatggacggcgggcggcggcggcgagcggcggagcgaaccacggcgatacgggcaaaagcgagcacaccgggcggttgctcgagacgaggggagacgagccaacggctcggattcgccagagggagttcgacggcggcgaatcacggcggcgacaaccggcggggagggaagagggaaacgccgacgaggtcacgagggaccgattcccggcggtgagagcatctacgcggcttcgggaactcgatgccagcgtcggattggacggagctacgccgagcgaggctggcgacgtgcgggtgctacagagctcgagcagcgacggcggcgaggacacggcgagcgacggcaacggtcggggcggcgccggctaactacggggagtctactcgggctaccaccgaaagctagggggaggagatggagcgaggaggaagaacggagggaggcatcaccgagaagaggaggggcgctgtgacgagaggccgacggcgcgggagtaatctctccggcctcgggccagggaagaggaagaagtggcgcggccgaagtccccttccgcgtcctcgaacgcaccgggtctcccggcgctcggcgaaggacggcggaggcgagacagagcacgggggcggcggcaatggcgcggagacgaatggatggggggggaaagggggaggctggggtttaaagggggcggcaatgtcggtttgggaaccgacttgcgcggtcaagggcgcgagctggcgctcggcggtcgcggccaaagcggcgacagggaggatgacggcggcgaggaggaaaaggggaaaaggagggggagaaagggggcttgtccccttgccgattcgggaaaaaggaggaggggagcgggggcgacgcggcagagggaggaggggcgctgcctccgtcccttggcggcttgcacgcggagtggcgggggccgggcggtgacgacggcgatgacggcgggcggtgtggagcggagcggcgacacggacgacaggcgcggcaggcgctgacgacggcggcgaccagacggtcggccacgcgcgcgcggctcgcaacgggaggcgcggctgggcagcggggccgggcggcaaccacgcgggcgcgcgcacgcgaacacggcgcgcgggggccggctttgcgagcggggagctcgccagggatggggagaaggagagcgaggggagggggcgctcggcgcgggcgactcccgcgcacgcgcgcgggcggaccggaggaggaggagcacttggcgcggctcttcgcgcatgcgcgcgcggcgcgcgggcgaggcggagcggagctgagcgggggagaggaacggagcgcgccggggaggagagagggcgagagagagagagagagggagtgcccgggagagggagagagagagggccgggggagagggggagatgggccgggaggaaatcggcccatcgaccccgggaggcaaatagacttttgcggaggaatttgatttggaagaatttggattcggaattggactcgacgatagatcggggattgagatcttgagatggcacggacactagacgacaagcaaagaaacaaatttcgcaattagggtttttaagagataattttcccgctaggcgccacgacggaacgggcgctacagaaatcctctcttttggtgttgtgggcttactgagctccttcccgatgctcgtcgccattggaatcctcccaagggataccgccgttcagagagaaagagagagggatttggcaagcttgagctcaaacaaccaatgtgtgctcgccgctgcccccttctcctcgagtcgatatattggtgggtgacaaaggacaacgccgatattgttgggtagaggatgcattcatgcacctccttccctatggcactacatacactggtgcacagcgcagctccttcccaccatgcgttggtgtgctttagacatagcgaaaattttaagggggtgtaagttagatagttagacttatctttttctttgagtaaagtgcacgaacggtacttaaacttgtaatgatgtgccatctacgtccctaaaatctcagaatgcatatctaaatcttagaacttatagagatgtgtcatctaggtctctaaaatcttagaatgcatatccaaatcttagagcttgtcatagtgtgtcatctaggtcccaaatcaccacagcctcttcagaatcctacgtggtgctgatttggcgtgccacactgacatttaaaagtttcccttttcttttttcttttttttgttctccttcttctcttttttttccctttcttctcctttttccgtgacccgagcaaaagaaaggaaaaaagaagaaaataaagaaaaagaaaagaaggaaaaaaaagaagaaaatggcacatcacgtccacgtggcatgccacatcagcaccacgtatgatactaaagaggttgtgtcgacttgagacctaaatgatactaatgatactgttagacaagttctatgacttataatccattttaagagtttgacgacttagacaacacaaccctataaatttaatgagtgtctatgtactttacttttttattttttttcttctatcacaaatttaccgagccaagccgagtcaaacttgtccgttccaatgtcactaaaatgtggaccaacgtgtaagttccttcttcctccccacatccccggctacggccggaaaaaaaaaaccaaccaaaatactcacggacgccggcggccggcgtgccgactagtagggggcggcggatgtggagcccctccggcgaccggaaacgaaggcgacgtcttggcgccgtccggctagagctctcaggccgcagcgggcgggctggcctctctgccgccgccgcctcccagccagcgctgatgagtggcctggtttcgtgcaattaattattggcgacgtacggacaggaccaagaaatctcgcatcgagagtgacaagtgagaacatcacttgacccctagtctacttcatttcaaatcccgcaacttgatgctctagactactggtcactaccgcatcgaagacctagatgggcatcgatttcaagtcaatgtcgtcccatgtgcacaaatcagcttctggtggtggtagcattctagctggaaagaagatggattctttttccctagtggatgcatgcattcataccataggtcagctgagcatatccaattgacagtggccttcttcacacgttttctttttagatatttattcgggcttttgcttggatagaaactatagccaaaccaattatgtagatatgcctagtatacatatgcattctaaccttacttcctggagagacattgcgagaaggatagtcttcctcatggcaggagcaagagcaacagcattgtcctgcttctcactgttgttgttctgttcctatgccctggtctctccagggagcagcgatgccactgttgtcgatgagctcgcgctcctctccttcaagtccatgctgtcaggcccatccgatggtttgctcgcgtcatggaacacctcaatccactactgcgattggacaggggttgtctgcagtggccgtcggcaacctgaaagggttgtcgcgctgctgatgaactcctccagcctttcgggccgcatctcgccgttcttgggtaacctgtcctttctcaacaggttggaccttcacggcaacggatttattgggcagataccatcggagctcggccatctcagcaggcttcgggtgctgaatctgagcacaaattctctggatggaagcattcctgtggctctgggaaggtgcaccaatctcacggtgcttgacctcagcagtaacaaactccgagataagataccgactgaggtaggagccttggaaaatcttgttgatctgagacttcacaagaatggtttgtcaggagagatccctttgcacatatcaaatttgctatcggtggagtacctgtatttgagagataactggttctctggtgagataccacctgctctgggcaatctcaccaagctgcggtatcttgaccttgcgagcaacaagctatcaggatctattccttcatctctgggtcagttgtctagcttatctttgttcaacttaggccataacaacttaagtggattgatccccaattctatttggaacatctcctctctgacagtgctctctgtccaagtaaatatgctgagtggaacaataccgccaaatgcgttcgatagtctgcctcgtctccagagcatttcaatggataccaacaagtttgaaggctatatccctgcatcacttgctaatgcttccaatctgtcctttgttcaactcagtggtaactctttacgcggtattgttcctcccaagattggaaggttaagcaatatcaattggctgcagctttcgaacaatttgcttcaagctaaggagacgaaagattggaacttcatatcggcattgacaaattgctcccagttagaaatgttggacttgggtgctaacaagtttagtggagttcttcctgattcactctccaaccattccagttcactatggtttctctccctttcagtcaatgagattacagggagcatacccaaagatataggtaacctcatcagtttacaacagattgatctcagtaataactatttcataggaactcttccatcttccttgagtaggctcaacaaattgcaagctctctctgtttatagcaacaatatcagtggattagtcccatcaaccattggaaatcttacagaaatgaattatttggacctcgactccaatgcttttagtggcagtataccaagcacactcggaaacatgacaaacttgttggcactaggcctttccgacaataacttcataggccgaattccaatttgaatacttagcatccctacgctctccgatattttggagctatccagtaataacttggagggaccaataccacaagaaattgggaatcttaaaaatcttgtggagttccatgcatattccaacagattatcaggtgaaatccctagcacccttggtgaatgcaaacttctccggaatctctatctccaaaacaatgatttaactggtagcattccctgactcctgagtcaattgaaaggtctagaaaatcttgacctctcaagcaacaatttatccggtcaggttcccaagttctttggaaacattaccattctctattatctaaatctttcattcaatagctttgttggagatattccaaactttggtgtttttgcaaatgctactgccatatcaatccaaggcaatgacaaactttgtggtggcatacctgatctacatttgcctccatgttcttcagaatcgggaaagagaagacataaatttccactgatccctgttgttgtttctctcgctgcaacgattttcatcctttcattgatctctgcatttctgttctggcgcaaacctatgagcaaacttccttcagcaacatctatgcaaggttacccattgatctcttaccaacaaatagtgagagcaacagatgatttctcgacaaccaatttgttgggttctggaacatttgggactgtgttcaaaggaaatataagtgctcaagatggtgaaaatacaagtcttgttgctataaaggtcctaaaacttcaaactcctggggcactcaagagtttctcagccgaatgcgaagcactgcgagacttacggcaccgaaatctcgtgaagataattacagtctgctcaagtattgataacagagggaatgacttcaaagcaattgtacttgatttcatgtctaatggtagtttagaaggctggctgcatcctgacaaaaatgaccaaacagaccagaggtacttaagtctccttgagagagtttgtgtactgcttgatgtggcttatgggttggattaccttcactgccatggcccaacacctgttgtgcattgtgatcttaagtcaagtaatgtgctcttggatgctgatatggtagctcatgttggagactttggcctcgcaaaaattcttgttgagggaagctcaatgttccaacagtcaacaagctcaatgggatttagagggacaattggttatgctgccccaggttagtgttatatgtttccttacctgtttgcaccccaatcaccttttcaaaattcagaagaaaatgtttaatttgatgcaaccttttgttttccgatttctagcttatcctacatttctgttctgtatttccaaatgtttgattcaacagagtatggtgctggaaatatggtatcaacaaatggagatatctacagctatggaattctagtgttggaaacagttaccgggaagaagcctgctggtagtgaattcagacaaggattaagccttcgcgaatacgtgaagtctggtctagaagacgaagtgatggaaattgttgacatgcgtctatgtatggaccttacgaacggcattccaactgggaatgatgccacatacaaaagaaaggttgaatgcatcgttttacttcttaaacttggaatgtcctgctctcaggaattaccctcaagcagatcgtcaaccggagatattgtgaaggagcttctggccatcaaagaatctctctcaggcgacgagcacaagatgtgatgatggaagatatatatgccaaatgtcatgctgcgatgattcatgtatcgatgatatatatgctgttggatgacattaggctcctttctcaagtgttccatgaaatgttttgaacatcgaatgatcactgaaattgtatctttctgctaatctgtgaacctgagagaattatttcctgtattttagtcagagctcaatactagttcataagcctccactgcatgctgaacctctgtagtatatcaagtatgcagtagcagtctattagcttcagctataatcctgtgccgtattatcgtttaccagtaacgcgtctagcattgtcgtttcttcagtttcgtcagagtctgtttcggcgtctgtttctctgtttcttttttcctataagccgagtcttccgggtcgtgcgtcgtgtgtgagtcatccgggtttcagcgtcgtggtcaagtcgtcgtggatgatggcgtaatggtgtcagtttgagtttgtacatattggctatatatatgagcatcagaaaacgtcgcatgttggttcgtggcaccaaaatcctgttcgtgttcatcgttaccattctcagagaatttgcgtgagagagagagatagtgaggatccacaatcttgggctcgggcgctcggctatcatttcgtatcatagccatgtccgctcccaccagcggcgcgccacgcactcccggcgaactggccgccggctctcgccgtctccgccacggccgcgcgggcgacagttcgttgttgctatttcttaatgatattactagaaatataattcccaacaatagcgcagaaatacttctagtatattatggttacagagttcatccgcaagtgtatggatataccattgtagcatttcactcgagagtattccaagggtatcgtatttgtttaatcccataaaaagattataatagagagaatcatactaataatttatatatgacttgtaataatccaaagtctaagcatgggttaatataattcagagggtagagtgacactaagcagaagcatttatactctcattcataattatctaaactaagtggaaagaacatagaaagatactattcctatacttctagtatacatacatattatacatacatcctaggcatattattacttagctaatatcctctttccgataccctcttggtgcttcgagaagtcacccctgattgccgagtttcttacgacaatccgtcatgactgtccaaccgggctaaatacggagtaccctccccaggaaattaacttaggactatatacacgtgcggaggaatacccgtactgagctgtcaccatcagcggcccacctcgcttccgcagcatataaccccaaataatgatatccagtaatctaaacaccacgcttaaattaccaaatactactctaatatcatcgtcatgacatagagtcatcgtataaacgatcattatacccacaccattgcatctcccagataagctagcatcataataaatgtaacttggacatataataaaattggtattcatatactcggaaagtaatacaataccaaagtagtataaagaagaatattctaaataaagtacaagtcttacaaaagaaagaaaagctactagagccacacccgaattcttccgaagactttgaggactgaagattatattctatttctattccactatactctagagactatactaaacttgagagatgaaacgagcttcttgcttaagatgtgtggagaaagtgagaaggtgaagcccttttatagcctcccaatgatggttgtaacagttggaatgatcggaaataccctccaaccgtcattaggatgcaatcccagacgtccacgccgaaccttggtttcaacagtggagatgggggttcggctgaaccatgggctggtccaatctagcccattttcggctggcggcctcctggacttcttctcttcgcggacttgtgaatcttggcccaattgatcgtgtcatttctgagttcttggcccattcgttgataagtttaattctcgacattgtccgattgattgatcgcctgttttgatgtcgattcttctccatcttatatttattctctgcgagaggttagtaatcctagtgctagtgaaatatttattatcaaacataaatatgcattgcaagcatgactagttctcctttattttggtactattgacaatcgaaactgatcgttaacgaccgtcaacaaaatcccccaagcttgaacctttgctcgtcccgagtaaaggacgaaaggaaacaaagtcctgattgttgatcaggagttgctactatgatgtatatctcaaatgtacaggtgcaacgtatgtgtactctttctcaaatcaaataatttttggcacggtgttttacccttacccctgattttgtcacgaccggaaataaccc

SEQ ID NO: 401 - DNA, 5573 bp, Oryza sativa
atgtaattacactgtaacttgcatgtaactacggtgtaacttgtataagtttcacgtaattttgaattgttaaatctattataagttttgttttggtgaggaagaaagaaaatcacagcgcacacatatgtgtaaggatttgttcccacgacctctattttaccaaaataacatattacagagagatttttgaaagttacatacaagttacactatagttacagtgtaattacactacgattgtactgtaattacatctatcaaatttttgggagaaaatttgtcgacaaatatatagcaaaatcgatatcaacatatttagaaatacggtaattaccatattataagaaacgataatttctataagaatacggtaaatatggaaatgatcggtataacagcaaaactatttccgtttccatttccatattttttaccatttacttacaaaaatcttccagaaaaaaatcttatcttaataaccatcgttatctaaaagtaacatgttagttacgttagatatactcgtcttaaaaaaaaccacggaaaaaaatccgccagcataagcgatagagaaaaacaacggaaaaaatggaaatccagaaaaaaaaatctaccgtggtggaaaaaagcaacggaataacaatggaaaaaaaaaaaagaaacccaccctcgggctgcgtgcgtgccggtaagcacacacgtcaactaggaagcccctgaaacaatatactcatcactatcttctgtataccaaacaaacagaggcagggttgaggtgtggcgattcagagtaaaatacaggtataaaacacagaacatgcatgatcagatatgctggatcaggaaatagccacgatgactttagtgatcgtgtggtagataccactgaagaagtctgatcggaagagcattccaatctgaagactagtggcaataaaacattacaagacataacatcagaattcgaggctcgcaccttcacacactggaaacaatccggagagattctgtttgatggcattcagttcgtcgatgatatctccggttggcgttctactcaatggcaaaacctgagagcaagacaacccaagtctaagcagcgaaacaatgcattcagtgattcttctacatggagaattatttgtactgttcagccagttctcagaatccaaaatgagcttcgtgtcaacaacatccgtcactctgccatgtaggcccagttcaacgtactgacggaggcccaaatcgggtctgaatgtactgtcagttggccgcttcccggttactatttccagcactagaattccatagctgtaaatatctccatgtgttgatgcaatgtgcccgacgccatactctgtttgagtaggaaatacgatttcaaatttccagtgttaaataaaaaagaacttggatgtataattatgtaaaattacgtgttaaatatcacaaataacaaggatggctggacaaatggtagatgtaaaggttggattaatttttattatataaagaaacataaataccaatgaaatttcatatttaactttaagaatctaatttacaaatacatatctaaagaaatttggtatgattgtgctatacagttaccccaagcaatcagttgctataatggctaattacttttgtacgaatcctgtttgtgttcattgtgattatagtatatcacacaacataggatatttcgtttttgtatctatattattttcaccacctccatgtgggaattagaagtagtaccaagtatttttcatggtcaatgcaagttcttgaaataaaaaattgtaataactagtacatacaaaaaaaaagtgtttcttaaatgtagaattgacaaatttactcaaatttgatccttctgataatcatttcatattgcagtgtagagcagaaaacacccataatttgatttgagtgtgtagtagctctagagtcctatataaaaaaaaatctgtacctctatgaactagctatatttagcatctgaatagatatggcaaataatcttatttttgtgcaatttaattagttcaattaattacttatattctccatcagtttcactagaggtaaaaactatttcatatagcactagagatcagaaaatgcaaaatactggaaggacttgctgacctggtgctgcatagccaattgtccctctaaatcccatcgagcttgttgactgttgtatcaatgaggtcccatcaacaagtattcttgcaagcccaaaatctccaacatgcgctaccatatcagaatctaacagcacattgcttgatttaacatcacagtgtacaacaggttcagggccatggcgggaagatagtccaatgcacaggcaacatcaagtagtatggtcactcttcgatgcagattcaagtgcctctggtctgctggatcatttgtttcagggtgtatccaatctttcagactgccgctgggcatgaagtcatacacaattgctttgaaatcgttccctctgttatcaatgctcgagcaaattgtaactatcttgacaagatttcgatgtcgcatatttcgtagtgcttcacattcggcagtgaaactcttgagtgccttaggattttcaagctttataccttcactgcaacatgatcttggatattaagctttcctttgtatactgagccaaatgatccagaacccacaaaattagtcggcgcgaaaccatctgttgcttttaccaactgcgaataagagaccaatgggtggcctttcatggaagttcttgaaggggctccctttttagttctcttgtgccaggttataagcaagtagagtgatgagaggatggccagtgctgcgaccagagaaacagaaataggtagaactgggaaatgttttctattctctagtaatggacaacatcgaggcagatgtagatcaggtattccaccacagagtttggcattgccttggattgagatcccggatgcatctgcgaaagcaccaatggttggcacttcccccataaagctgttgaaagaaaggttcaaggaatgaagcatagtaatatctgctaaggatgtgggtatctggcctgacaaattgttgcttgagagatcaagagtttcgagacctttcagctgacccaaggctgatgggatgctaccagataacaaattattttgcagataaagataccgtaagagctggcaatcaccaagcgtgttagggattttacctgataatctattcgattctgcatgaaattctactagatttttgagatgccctatttcttgtggtattgatccctccaagttattttttgatacattgatcattattgatagtgtttgaatattgaataattcactgggtattggaccactaaggttattagttgaaaggcctaatgacaacaagtttgtgaggtttgagagtgtgtatggtatccaaccactgaatttgttggtgccgagcagtaagatattaagttcagtaagatttcctatggccaatgggatcgaaccgctcaagttgttttcgtaggcgactagaatgcctaagtttctaagcctgcccaacgatgatggaagagaccctctgaaattgttgttgcagagatagagatgttgtaagccaataagattgccaatatcctttggaatgcttcctgtgatcttattcaaatcaagtgcaagaaaactaagcgaagtggaaagattggaaaacgaattaggaagaactccccccaggttattttctcccaagtccaatgtttgtaatttggagcaatttgttaggtcagaaatgaacccccaatcttcttgttctctagtttgaaacaaatttctccagagatacagtgttgtgagatttcttaaccttccaaaccccgaggtgataattccactgaacaagttgccatcaatctgaagctgtgtcagatgagaagcattagcaactgaggcagggattttgccatagaaacggttagtgcccatatctatcacctcgaggaggtgaagggttttgaatgcatttgtagggatcataccacctagcttgttttcgctgacactaaacgctcttagagacgaaaggttccagatagaattggggatcatcccacttagattgttctgtcgcaaattcatagtcaatagactgctgctgagctgccctagcgatgaaggtatagctcctgataatctgttgcagctcaaatcaaaatactgaaggctagtgagattgcccaaagcagatggaatctctcctgataaaccattggtgtgaaggtacaaattcgagagatgtttcaagctggcaccaatctcacgtgggatcatacctcgcagttggttgtggctgaggtctagcgatgtcaacttggtgcatgctccaatggccgcggggatgctcccttggatggagttaccgctcagctccagcagctgaagcctgctgagacggctgagctccggtggtatctcgccggagaggtagttgtcgctgaggtccagctccctgaggaaggacaggttgcccagcgacggcgagatgatcccggacaggttggacgagcgcagcagcagcttcaccaccctgtgtgggtgccggcggcggcggcggccgcacacaacacccacccatgtgcagtgctggccgtggccggacgtgttccaagatgccagcgacaagcccccctggtgtagcagggatgacttgaaagagagcagcgcgagttcgtcgccggcgacgccgcctgtactggtacgagcagcagcagcagcagcagcatcgtcactgctcgctgggccgatcaacagcagcagcagcaaagaagagatcatgaccgacgttggtgatctcgccatgcatgcggaggaggagtgcgctacaatgagctgagctgatcaatgcagtgtttggattcaagcactggtcctataacagtaaagggatcccaagtcccaacaaatggctcctgtcaaaaaaaataaaaagaagtcccagcaaaaggaaaagaatgaaacattactggctactccaagaaaaacggatcaagctcttctggtcaaagtcttcaatgaaaataaaagatactccagttggtgtaccttatcaaattttcaaagtttcagtcatgctgcgttctttaccgcctcttcctaactttctaattaagggagtgtctagatcacaccctaaaattttgcaccatgtcacatcgaacgtttgaacacctgtacgaagtcttaaatataatctaaaaataactaattgcacagattatgactaatttgcgagacgaatcttttaaacctaattgctccatgatttgacaatgtggtgttacggtaaacatttgttaatgatagattaattaggcttaataaatttgtctcgcggtttactaacggattctgtaattatttttttattagtgcccgaacacctaatacgacactctacgttatcgagatgacatgccaaaactttacacctatggatgtaaacaccccctaattttatatgcatatgcgtgatgaaaaatactcagtgacactacctatagctat

SEQ ID NO: 402 - DNA, 550 bp, Oryza sativa
ctcggtacccagatgctgagatggtagcacatcttggagactttggacttgcgaagattcttgttgagggcaactcattgctccaacagtctacaagctcaatgggatttagagggacaatcggctatgctcctccaggttagccttttatttttcctgtcctcctttcttatttagtcctgcctagtgcttttattaataaaatgtacagctagacaaactttttgggaagttgcaaaagaagtttgatttatgtgaagcagctatagttattatgaatctgttacattttggattacaagcgctataaaaatcgtaactttttttttggcaaactttgattaaacagagtatggtgctggaaatacggtatcaactttaggagatatttacagctatggaattcttgtgttagaaatggtaactgggaagaggcccatcgataacaaatccatacaaggattgagcctccgtgagtatgttgagctgggtctacatggtaaaatgatggatgttgttgacacccagctgttcttgggccttgagaatg

SEQ ID NO: 403 - DNA, 1604 bp, Oryza sativa
acatggtagcccatgttggagactttggacttgcaagaattctagttaaggaaagctcattgatgcaacagtcaacaagctcgatgggattcagagggacaattggttacgcagcaccaggttaagcctaaactgttttttttttttttttgcctttctactctctagtgctgtatgaaataatgtttgatcctagagatattaatggagaattgaagtaattagttggaataaattgcacataagttaatgtaattttccatattatctatcaagttactaaatcaatttcgtagctacagacttttctagagttacacactcaaaccaacttgtggatttttttctaccccactaatggaggattttgaatcgtttagtttgagaaaaattttacaatattccctccttccacaaaagttacacctattacttttatcactaagacgaaggagaaattaactcatcattcatgtaacaaagatcaaggagtgtatgcacccatgcaaccaatgagtattaagataactccccggattctaatcaaatatttaatttacctctctattttagttttggatgcataaagaatacagataggaataacgcatttgaaaaaactaaaatatgtaataggtataactctcttggatggagaagtactacgctaacttttcataacatcaaagaactatatatttatgaattatttctttacggagaagttcatatccctcaaagaactatatattcaagaattatttcattgcttggtttaacctatagttcaattatagaaactttatttgaatatataattctacaaattagattattaaatatttaatttctttgttatttccaatatctcacatgtaatttaatgcagattattatatcagtttcagcgatgcaaccctatattatatcgttatactccctccattccaaaatataaggcacagctactcttaacccaaagactaagaaataattattatcatcttgtagtttaaatcatcctaataaatataatacatgcattcaataggattagataacataagagtggaagatttaaaaaagtaataatttaatggagaagatgtcatatttaattgcatgcttgcatgtatgccttgtattatggaacatctaagaaaagtggttgtgccttatattatagaatggagggagtagtaattaaatttcaaattgtacatgtttaaaagatacagtttttttcctactggaacagagtatggtgtcgggaacattgcgtccacacatggagatatttatagttacggaattctagtgttggaaacagtaagcggaaagcgaccaaccgatactacattcggacctggattgagcctccgtcagtatgttgaaccgggtctacatggtagactgatggatgttgttgacaggaagctcgttttggattctaagagttgggttcagactccagatatttctccatgcaaagaaatcaatgagtgccttgtttcactgcttagacttgggttgtcttgctctcaggaattgccatcgagtagaatgcataccggagatgtcatcagtgaactgcatgacatcaa

SEQ ID NO: 404 - DNA, 614 bp, Oryza sativa
ctatagggcgaattcgagctcggtaccccgcatatttcgtagtgcttcacattcggcagtgaaactcttgagtgccttaggattttcaagctttagtaccttcactgcaacatgatcttggatattaagctttcctttgtatactgagccaaatgatccagaacccaacaaattagtcggcgcgaaaccatctgttgcttttaccaactgcgaataagagaccaatgggtggcctttcatggaagttcttgaaggggctccctttttagttctcttgtgccaggttataagcaagtagagtgatgagaggatggccagtgctgcgaccagagaaacagaaataggtagaactgggaaatgttttctattctctagtaatggacaacatcgaggcagatgtagatcaggtattccaccacagagtttggcattgccttggattgagatcccggatgcatctgcgaaagcaccaatggttggcacttcccccataaagctgttgaaagaaaggttcaaggaatgaagcatagtaatatctgctaaggatgtgggtatctggcctgacaaattgttgcttgagagatcaagagtttcgagacctttcagctgaccca

SEQ ID NO: 405 - DNA, 8214 bp, Oryza sativa
aacaacaccgctaaaagaattaacaccaaaggtaagcatggagatgttggaagcattagctactgatgcagggatatgcccatgaaactggttgttatccatgtatacctcttggagatggggaagtgtactgaatgcatttgcaggaagcataccactcagcatgttgtactgacaccgaacacggtgagagaggagatgttccaaataggatccgggatcagtccacttaaattgttagagcttaagtgaagggaagacaatctagacaatcgacccagagatgaagggattgctccagacagcgtgttgtcagacagagcaagctccaagaggctgttgagattgcccaagcacgaagggattgttccagacagtgtattcttgttcagatagagagaggagaggctggtgagattgcacagagacgaagggatacctccagagagtgaattttctgacagtgaaagaaacgagaggccagtgagattgcccagagcaggtggaatctcacctgatagcccgttgctacctagtgacagttcttggatcgatggcagctctgccaacgatcgagggatctgtcccgacaggcgatttccttcgagatacaggtaggcaagatttttcatggaggcgccaatctggaggggaattttaccttcgagctggttgatggtgaggtccatctcgatgagacgaaagcagcctccaatggcggcggggatgctcccttggagggagttgccactcatgttcaaccgccggagcctgcttaggcggccgagctccggcggtatctcgccggagaggtggttgccgccgaggtgcagcttagcgaggaaggagaggttgcccagcgacggcgagatggtcccggacaggttgaacgatcgcagccgcagctcgaccaccctgtcccgccggccgccgcacgcgacacccgcccatgtgcagtgctggccgtggccggacgtagtgttccatgatgccagcgacgagcccccctgggacacaagagacgacctgaaggagagcagcgcgagctcgtcggcggcggcgccgcccgtgggaacggcggcagcagcggcgtcgtcgtcgctgctcgccggagggagcagcagcgaggaattgaacaggagcatgagcaacgcgagtgatctcgccatgcgtgcgtgtcgatctctgcaagagtagctatcgatgatcagcgcttacctcgttgtccgtggattgaaagcacttttcaccggtcaaagtcttgaacttttttttctaatatatttttttcttgtccattttagaaataattaacagtggtggagtgagcataaaccaattggtgaattttctggtggtggaacctgtctactcgggttaaagttctagacttagcatggatactgctttacgatggctaattattctttcagtggaacatatacccatcggcgacgagatatctgtggtgactttatgaatcaaaagatatatactggtccagtctttagaggtacttataaagaaagatagagtgtgcaagcgcctgcgtttgtcctttgtttttgcaaaaagagaaaaatgattaagaaagcatttgactttggacaaccaatgtactaatagtgatgaagaaaaccacgtatggtgtactggttaattttggaggagactgaaaatttttagagacacgcagagccaaacttcagtcgcagtcaggccgacgtggagaactcagctcgatattcatttgttggtcaccatgtgtttacttctgcaacttgtgcaatttgcaaagcgaaaggaaccctatcattcaaaagaatactgcagctgaatgctgattgctgagccgaataaatgtccttatccatgtggttgtctgttttctgggcgtctgccttccggacgcggatcgtctgactcacggtgtgactttcaagccatatccaccgtccgactcatccgacggaggatatttcctgcgtgtggttcctgactcattattatttacttgcggattctaattaaggattaatgaatctaattaaacactattacgagattagtccggtaaccaaaaatgacatgccactatgcgagttaagctatttttattttggtgattaaagaaaacaaataatcttctcatggcattagcattcagatggcattaatggcaggaagcagcgcgcggccgcgggagagacgtcggatgagtcggacagtggatatggcttgaaagtcacaccgtgactttacttggtaaaatcggacgatccgtgtccaactcagggcattagcagtgcgtcaccacatggtatcagacttggtgtgccacctagactctcaggaacatctagaaataatgttagccacaaatcccacaatgctatgtaatctcaagtggggtccacaacaataaaagaatctccttttctcagtttttcccctccctctctcctcaaccaccgacgccttttcccctcctctatcgtgcaatggcggcggtttagggtgacgacggcaggcggcccaagcggctacggcgatgtcagcgagctcgcccgatctgatgcctggtggcggtggcggcggggccaggcggagctgcgtcaccgacgccggggcccgggcagcagggctgccagatccagccttaggtgacgacggagacgggcggagcttcggcgccgacgccggggcggccaagcggctgcacggccagatccggctcggtggtggcggccctcgcctcctccctcggccggtgcctctcctcccctcccagtccatggagtgacctcgtcagcgacgacctcaagttggctgtggcgcttcgacctgccgggacggcgacgagccctgcgatgaccggtggtggcggcggcgacgagccccacgacggcgcctctcctctctccctgcttcccccggtttctccctcgacgtgggcgctcgttcctctcccacgctctgacgtatttctgacgaggaactcatgcccagttttggctccctgttcttcacttggtcacgggagtagcacatatggcatggaatctttgacgtggagggttgagaatgaatgacatatatgtgcattgtgaatggccttacatgttacaccaggcaagttgtgaaaagcaacagcgaacttaccaccagccccgcacacaatttgaacaaggctgctactgcctaagaacagacttgcctcagaccggacaccacccacgtcttccacttgttcgtgatcgacttcgcacctgctcccatataggtactcaacctggtaaacttacaacttctgttgcgaggaattcagaataactgaaattcagaattaaaaacaaggactattgaaagaagagtacttataagaacccaatacgagactaattaatattatattattaaaacaattttgaaagtaggcaccacgctcactgtggggctagaaactcccacattaatcggagaaaaagaaaagaagagtccaactagaaatacaattgaaaaataattgaaattcgaaattaaaaacaagcactattgacagaagggtgaacccaatacgagactaattaatattccaaataaaaaataaaataaaattcgaaattagaaaaaaataaaaagaagagttcgagtagaaatataatttaaaattaactaaaattcggaattaaaattaagcaatattgaaaaagattccatataaaaacccaatacgagattattaaaattcggaataaaaataaaaataattcgagaatagaaaaagaaaagaaaactaaaattcagaattaaatataagcaatattgaaataagaaataagagtacatataagaatccaatacgagattaattaaaatttgaaataaaaaaaataaaatctaaaattatacaaattaaaaagagagttcaaataggaatacaattttgaaacaacttaaattgaaaataaaaaataaaaatattaaaagaacataatatgatattagttaaaattcaaaacaaaaaataaaataaattctgaaattaggaaaagaaaaataagatttcatctagaaatacaatttgtaaataaccaattaaattggtgataaaaaaataaagactattgaaaaaaatactatgtaaaacacatggcgagattaattaagtaacagacctataaataagtagagtgctagcagttgatgggatatctaaaaactattaataaaacaccaaatagagtcttaatgatgattaaaagaaaggacgacgggtaggttgtgaagcaattggttaaggcggttggtgggacttgtagaaagtaaaaaaaaaataaaccccaataataatcatatttgatttttaaagtctcaatgacaataaaaattagaggcagtgggcgggtcgtacaggagtataatggcagagcctctgatagttggtgagacttctagaaagtaaaaaatgaattccaatgatagttatgttcgattttcacagtcccaatgacaataatgaataggcggtggacgggtcgtagagtagtacagtggcaacgtttgatgggaattctcaaaattatataaaatgaaacccaacgagacaataaactcaataaattataaggtccaatttttaaaggttcgggcttctaaaaagtaagaaaataaaccccaatgataatcatgtttgattttaaaatctcaatgacaataaagaagggagctaacaggcgagctgtagaggagtacagtgacaaagttgctgacgttttggcgaaacttcaagaaagtaaaaaaaaatgacctaaacaattattatgttcgatttttaaaataccaatgacaataaagagaagaggtagtggacaaccgtagaggagtataatggcagcggttgacgggacttctagaaattataaaaactaaacccaacaagacaatgaactctaaaaactataagatccaatttttaaaggttccaatgacataaggggtagcaattggtgtgacttttaaaaactagaaaattagaaataggaggatgataaggtttggtctttcaaaatattaacacaacgagataaccatttaataaattttaagtaaaataatattaaaatatatataattttgtatgggtgctagccgcgcaattgcgcgggccacctagctagttacatatgatttgtgatttgtttagaatatatcagtagtacataacttccatccgtgatggcctctaacaagcctagaattagcgggccgtcacaaggaagttatctcaatcgcccgattgagatatggtcacacagacatgttagataggcataaaactcaggctcgtcacggataacacctataagtgacggtctgtagtttaggcccgatttagataacattccatatctcaatcgggcacgggcccgccacggatgacacctatccgtgatggccggatgcccgattgagatatttgcttagtgacgggggctctacccgaaagaaacaaggctttaagcccgttagagataaccgatcccgttttagtgtatacagaagttcaacgccgattatagttgaacactgccaatctatggagatcaatggtcggatgagtcgtttcacaagattttgtcacacgtacgtttagcagccataaagttttgccggtaaaggcttgccgtaacctatacatctatgcgaatgcggatgaggcggcaaggggacaaccgatatcagcgtcttcctcctcacgtcgatctcgaccgtccaattcttgccgtcctcgtcgtcatcgcatgcgacgaaccagacgacgtcggggttctccgagctcacgaacgggcacaccacgtacacgcgacgcgggaggccgtcgcatggcgccagcatcgcccagagctcctcgcagtccagcacggcttccttcacccacgccatcggctcgccgccgccgtcgccgtcgccggcgttccgcagggcaagcctccagatggtcaccatgaacgccgagctggagcggtcgcacaggctgcgtatcaccggcgcgccgcagcagcagcggttgtcgatgctgacgaaccgcattgtgtcgtcgccgtcggcggcgacgatgttgcggaaatactcccatggaatcagctcgtcgtggtggtggtcgtcgtcgaagtcgctctccttgggtggaactggcttcaccggcagcggcacgtacaggagcttggggttgtcgagatccgccgccgccatgtcgcagatgaggaaggtggcgaggtcgtagttggcccagcacatgaagcggtcgccgacggggacggccacgttggtctcctgccacatctccatgccatggcggcgttcgccgccgccgtcatggtggacgatgggcaccgccgtcttgagctcccactcgcggtggccgtggccggggcggagcacgaagagctcggccgtttcgaacggcggctcgtgcgcgatctggagctgcgccactagaggcggcggcgcctcctcgccgccgtcgccgccgcggaggcgcaggatgccggtgtcctgctggtcgaacacccggcccgtggtgcggaagctgtccttgaaacggtgcttgctgacccagcagcgctcgttcatggggatgtcgcagacggggagcagcgtcagcgacggcggcttgccggcggcggccatgtagacgaagtagtcgttccaactcatccggaagaggacagagtcgccgtgagccgcgatgacgtagccatcatccccgcgatcgaagcagatgaaggagatcgctggcggcgacgcgcgggcgagggcgacgcggaggggttggccgcgggaggtgcgggactccgcggcggtgttgtcgtcggcgactacgttcgccggcgtggagcccctgaggcagccccaacgttccagcatcaccgaggccgggtcagcagtcgcggccgccgccgtcgaaccagcggattccgtcggcggcgggtgggtcacggtggttgccatgtggcggcggcggcgacctgggaagacgagatcgatggaggaggagaagcatcggaacggatgttcttctcggttgagcaacctcaggccaccgagaggccgcagcagcttgttcattggtgatggtggcgatcggaggatcggagctcagcaaggtgcgtttgccctagctaggttgatcacgacgatggcgtacgcgctaacaggtgatgtccgatcgatgggatataccatgtatatacatatacatatacatatatatatacatatacatatacatatatatacatatacatatacatatacatatatatacatatacatatatatatatatacatatatatatatatacatatataagccttgttaatagcagtctcttagcgaatattcgttgatatgagagagagaaagattagagataaaatattatatattattgctatgggtagggaagaaaacggtcggaaacgatcggaaaacagcctcaaccatttccataatcatatttttctcggaaatgaaatcgaaaacgataaactcggaaacgaaaacgatatcagaaatatcgaaaaaccggaaacggaataatactgaaggaaacatgtcggtatagatcgaaaactggtaacaaatacagaaacattaaactatagaaaacatatatttaactttacataagtatgttatatgtacaaataaattcaagctatactatataaattagaaatcaactccattttagccatgcaatcaagttagggatttgattaaatagtcaatcaatctctaaactgtaagtcaagtagagacataccctataaatatcaacgggaccatctatatatttgtcgacaaattttctcctaaaaatttgacagatgtaattatagtacaatcatagtgtaattacactgtaacttatatgtaattacactgtaacttgcatgtaactacggtgtaacttgtataagtttcacgtaattttgaattgttaaatctattataagttttgttttggtgaggaagaaagaaaatcacagcgcacacatatgtgtaaggatttgttcccacgacctctattttaccaaaataacatattacagagagatttttgaaagttacatacaagttacactatagttacagtgtaattacactacgattgtactgtaattacatctatcaaatttttggg

SEQ ID NO: 406 - DNA, 1694 bp, Oryza sativa
aaggcaaaaaaaaaaaaaaaacagtttaggcttaacctggtgctgcgtaaccaattgtccctctgaatcccatcgagcttgttgactgttgcatcaatgagctttccttaactagaattcttgcaagtccaaagtctccaacatgggctaccatgtcagcatctaacaacacattacttgatttaatatcacaatgtacaacagattcaggtccaaggcagtgaagatagtccaatgcacaggcgacatcaagtagtatgttcactctttgatgcaaatttaagtgcctctgctctgcttgatcacaatttgtttcagggtgtagccaatcttctagactgccgttgggcatgaagtcatacacaattgctttgaaatcattccctttgttatcaatgcttgagcaaatagtaactatcttgacaagattccgatgacgcatatttcgtagtgcttcacattcggcagtgaaactcttgactgccttaggagtttcaagctttagtaccttgactgcaacagaacttgtactttcaccatgttggctatcaagttctcctttgtaaacagagccaaaggatccagaacccaacaaattggctggtgaaaaaccatctgttgcttttaccagctgcttgtaagtgatcattgggtggccttggatggatgtcatagcagggacttctttctttcttctcttatgacaggttagaagcatgtagagtaatgaaaagatcgcaagtgtcgaaacgagacagacagtaagagctatcagtagaatttgatgtttctttttctttgttgattttaaggaacactgcggaagacgtagttcaggtatgccaccgcaaatattggcattgccttggatataaatttcagaagcatttgcaaaaacaccattggttggcacttctccttgaaagctgttgaatgaaaggttcagcgagtggagcagaggcatgtcccctaaggacttgggtatctgacctgacaaattgttccctgagagatcaagtgtgtcaagacctgccaactgagtcagagcaattgggatgttgccatttaagaaattgttttgcagggagagatgctgtagaagttggcatccactaatggtgctggggatttcacccgataatttgttcgaatccgcatggaattcaacaatatttttaagttctcctatttcttttggtattgatccctccaatttattatgggacacatccaaagtttcagagagtgtgggaatgctaaatatttcagtgggaattgctcctataaagttattgtgggcaagatttagttcaaacaatctggtcatgtttccaagtgtgcttggtattgtgccactgaaggcattaccatagagctccaagttagttatttgtgtaagattaccgatggtcaattgcagataaccacttaatttgttgttgaatagaatgagacgatgcaaatttttaagcttgctgaaggaagatggaagagatcctgtcaaggagttgttaaagagaacaagggattctagattaatgagattaccaatatctctaggcaagcttcctgaaattttattggctccaatagagagatatactagtgatgaggaaagattggaaacagagtcaggaagaacaccaccaacttgcaggcacccatttctacgtgttggagattggagcaattcg

SEQ ID NO: 407 - DNA, 914 bp, Oryza sativa
atgtaaatcatttgtagcattttccaccatcatattgatattaatgaatctagacatatatatctatttagattcattaccatcgtcacacaaggacagatcgttctatctgtgacgggctctaatatgcttagaaataccgggccgtcacaagaaagtcatctcaattgggccgaaaagtgcccaattgagatatggtcgcacagacatgttagatgggtataaaacttaagcccgtcccgaatgacacctatcagtgacgggccacaactttaggcccgattgagataagatcatatatctcaaacgggcctcaagttgtggcccgtcacagatgaccatcatctgtgatgggccacaactttaggcccgtttgagataacattccatatctcaaacgggcatgaccatcatctgtgacgtgcacctcatctgtgacgtgcaccaacttgaggcccgtttgagataacaactagacccgtcacagatgactcatcagtgacgggctatatacttaatctctatcgggcattaactaaagcctgtcaccgatgactatttttccatttttcatatgaaatgtttatatttgtaagttgactatagcaaaataattttacgggtagaaatgatttcaaatggaaaaaatgtcaacaacaaagttgtataacttatcaatatttacaacttttagtttggtcatttttcaatataacattttttttgaacagtttgaatttgaatttaaaaatatgaaaacttcaaataacattttcaaatactaaatgatttcaattgaaaaagtcatcaacaacaaagttgaataactcatcaagatctaaaacttttatttttgttatttcttcatctgacgaaatgttagtaatattattcacaaattttacatatatgtg

SEQ ID NO: 408 - DNA, 4692 bp, Oryza sativa
ctctatttctgctatatattccattaatggtgggagcacgatgtgggacgtggggtgggatcgaaagggaagttgtttttattatcgaagtaaatcgtttactccgataacggtaggagtgggatgacggaaagtgcggatcgtaaccagagaagttgattttatcgaagtaaattgttactccgataacggtgggagtgggagtgggatgatcgaacatggggtgaggtgggcctggctgatacacgtttggcgcttggaatataggagcgcgcagcgctcccaataatagttctatgaaattctttaaaattcctatgtttcctccaaatcaaagggtagtaagtaaaagagactcggtaaaagtagagtaaaaggaaagagttttcacagggctctacgagggttcgcaaagtctccctcgtcgttccagtcctccagtcctcctgccagcgtgaggatagtgcgttgaaatactctggttatagggtaaaaatggaaaggatgcatgttttacatgcatatgcaaatatctttcatacaattttggtaagtaaatatccccttcgttctaaaaaatatatttagtattattgtttctacatggtctttaacattatattttgattgttgttttctttcataatattatcaagaacaaagaattaaatccacatcataagaaaatattttaaaatctaatataataatactacatgcatgcataacactaagcacggatatttttagttcatttattggtcaagttttcaagtgttgattttcgtgaaagcaagaacacattattactttatcatataataatttactcccgtctgtcattggtggtttatattgtttggcttttttccggattaaacttttaattaaagttcagttctatctgccaagaaaaacttgataattgggcacctatgcccgacacataaaacacacttctcagacaggtattaatagagtcgtgcaagacgcgacttatgtacggctagtattgattgatgtcgccaggcgttagctagatggctaagctgctttgctatatcccggcgcctggcctattctcaatctaccgacaagctaattctctaatgaaagaagcaaattcagattttatggacgatggttgtaatatttgttaatttaatttcgaattaataattgtaaaattatgtttaccttgagtaggtaatttagaaaataaccaacatatttagcctacaattaaatatttactatatatataaaagaatatgcccccatataaaagcccgtgcaatgcacgggctgatgactagtattactaattggtgaaatcccatattgataacatatattcacaacgatgattcagcattgtgggttgtggtctgaagaaaaaacagtcagtttccattaattaatgggcgccatagctgtgtaccattgtataaatagagaactctaaacaaggaaaaagaatgtagggagggtattcgcagccatacttgtgaagtcctccggttagacagagcctaattaaggaggtcacttgttatactaatatatatagatatataaataccatgcagagatatcgtggcgtagaggaaaacagcttgattctaattaacgaccatggcttcattcacgcctaattgctctacgttgttctttttccttgtcttccttgctgcagtattcgtctctgctgcggcagcctccgagcacggccgggtgttggaggaggatcagaacattcggtaccgtgtggaggactcggaacttccggacctctactacgaaatctgcatgtatgcgagggagcacaggccatgtaggagggtgatggccaccatcccggatctaaaattcaagctctccggccaggttgatttagccttgctgctctctcacgtcatagccaaccggagcgccgaggccaaggccctggccgatccgttgctcgccgccgccgccgcaaagaagggcggtgatgagctccccaagtgtctcgcatcctgcgccgccagcctcgacgacgtgtccaaggccatgtccgggctccccgcggatatcgatgtcgagaggtacccgaaagtccagagcttcctccgcaacaagttcgaatcgggcgccgctcccccactatgcaagagcggctgccccgacaagacttccaccgccgatgaggccgccatcgccgacaagtttcatgccatctgggcgctcatggattgcgcagagacactcgcccaatactacgtcctccctccgcctccgccgccaaaacgctaattaattaattgacctactactacgtacgacagggaacatggtcgtcatcactcatcatattgcagacaaatactgcatgcgtccattccaagttttttttttgataatcgattaagttctcaaatcaattatatgtactcctatacttggagactgattacagtacatttatatcgcagttcgttcattcacatgtactcgcaagtgctatatatattatattttgatatgagataacattcacgagagtcttccggccattcatccctgtgcgcttgatcaaaccgaatattcctacagttaagccgccttgaatataatgcattctttcatttttttaaccataagctagccggcagttgctgcctctcttcctcctcgtccgagcggccttggtcttctccgctagctgcaggctccgagcctacgacggagatgggttttaattactcgggtggatattcaccaatttattgcatgttaactaaataatcataaaaaatctcaaaaaagttgacaagaaatattgatatataatatacaaatgcaagttcaaattcaacttttataagttagaacaaaaataataaatttaactatgaatatgcatacattaatcagagattgatttgttacaacttgtagaaatcttgcatgtttgtggggtgacatattacatatgaatctatcttgtcaatttttttttgaaattttcttatactcattttgttgatatgcaacaaataggtggatattgtcacgcccagtaattcactagtaattttcgaactaatttgtgcataaaatcctcattcagaaatcaaccgaggtatacacctgacaatttaatatacagattcatcaaaataactaaagcgataaatacttacataagagacaattagtcctcaccacaaagaaaactgcagcggaaaaataaatctagcgaagcttcagatccactcccacgggcagctcaactgggatataagccaaacgtcttatccttcgcaacgttttttcaactgaggtttgattgattattgcaaggtgagtacatgaatactccgcaagccacaaaacaaatatgcaaaagcacggggatacaaaagaatagcataatagagctcatatgcaaaagcagcatttagcgaaacatttaagaactataaaaccatagagtaattaattatcaatattaatcaacagtaaacaacactccaatgctccccaggctcaaccaaacctgaacagccaaccccggtcatacagatcaaacctctaaactaggaattaatcattccaaaccaggagttaaattaactatcattaattatcacattattattattaatgagtagtgttgaactaatcacgaaaaacattgttagacccacccataaccgcgggcacggctattcgaatagttttactgtggccagaggtgcacaaatttacccacaagacacaactccataatatgtcaccatgtcatcatgtgcccatactgaacatgtcaccatttgtgtagttgtgacaagacccctcacataactcaactcagagcagtgcaccgttcctggttcttccgcgaacggcatggttatgaaaataataaagtcatgctctcttaagcatgagcatgatgttgaaaaaaagaaaagaagagaataatgtatagccatgccttctccttaattataaaagaaggattttggagaaggaagaaagcacaaaagagaagcattttctttattttccacatttcatttccaccatatatcacacacacactttgcacgatcttgatcttgagtatgtttagtcatctattttagtttaagtttttgacttagtaataaatgtgaatgcaagtatgccatatttgatccctaccaaactccacatatcaaccttagaataggaataaaaaggcaaactggtgaggaattcttattaatacacttggagagatcaagtgaatcatttgaggaacttggatttcttttgcaaaatcatttgaaaacctccggaataaaagttgaataaagattgggtgattagtgttctaattgttgttctgtctctcaaccgctcaagacaaggagaggcactgtctcatgggaatctgtcgcgtcccaaaacgactctaaaatacatcctctaaattatgcctagaataattaaaatccatgtgaaagccttcaaaaattaaaatgtgcaaagttaaaaatcaaatagggcttggaggatttttgtatatttcctaaaagcctaaaatgcgtaaataaattttagtggaatttttagagcacaaataataattaagaagaaataaacaaagttaaaaaggttttataaaaagaaaaaccctaaaagttccctttccctccccct

SEQ ID NO: 409 - DNA, 750 bp, Oryza sativa
tgcagggccgtgtatttggccacctttccggccagagccaactcggcctgctgtttgttgccccagaggaggacaacatggagacgatcgtcgcgcaggatgcgcttgtaatcacgtggaactcgtcgccagacaccgcagatcttgcccgtggcattctgatagacactgagagtgcccgccaaggtggtctccagttgatgctcctccaggattacacccgcatcatcaacgaattgaatggcacgcggacgaccgattcgcgatgaggtgtagaaggagtagtatagattcttcttgtggaacaggaaacgggcggtggccaccacattctgcggattgtaggtggtgtacatggacttcatttcctcacccttgaggaaataggaggtgcggcccgttagcaacgcagcgtaatctataaatagggatcaaatgaaaggtggagataatccaggtgttagataaatacaatagttctcttgttaattaaatgtaggagctggtgaatgggattacaatttcccgcaggatttggcggattctattgggatctgggtgggtgtccggtacttttgtacttacgtttcatgttgcgctcttcctcttcattgggcacgggcacatccaaggctacatccgtatctgaaagatggagggaatacaaatagagaataagatgatgctgggcgataaggtacgaccttaaatggaatttagatagcaacaaatgcttcaaagcaaccgaac

SEQ ID NO: 410 - DNA, 744 bp, Oryza sativa
aacttgagcaaatactctgtttaataatttagtgaatagtttaaaaagaacatgacctctgcattttgggaattttttcaggcaagaaattaactgtaactggaagaaaagaagaatacccaatctgcagggaatggtcaccctgatctgggtgagggtggagaagaccctgatggtgatgaggctgatcagcaagaacagtgctagaaccgctgtgcccaccaccatcttgccaggacatatggagcacattctctgcactggtttcctgtaactgcacgaacaaacaaacgcttcagcggtatgagaagctgattaacttttaagccgtaccggggaaaaaggtttattccgtgcaaatactgtaactttcgtgaaacattttagcagccatgaaaagatcatggttgggactttagcaaggaaaaagatgtatgttgtccgaatactgatgcacgcaatgactttcagggtgatcgatggctgtgttacctttttcctcaagtctttgttgagatcttgcagctgttgctcctgcagaatcaattttagtgtttgtcatatgtgcacagatttaatttaggtgcagaggaaaaaagaaaagaaccagaatttattcagtaccttgctcttcagatcaaacagctgatcaagcagtgcttggttctgcagaaatattgagcctgtgttaaaagccatgcacataaacaaatccatacagttgaggggtaataagtaccgaat

SEQ ID NO: 411 - DNA, 744 bp, Oryza sativa
  unsure (1)..(744): unsure at all n locations
ccctatcaatggcaatgccagctaattaaaatacatcacaatgtattttgaggataacttaaggggccgtnanncgacaannaatttttggtacctcaatnnccagagaatggcananngcagtgtcttctttggactggatagaangatctgcatatnngttccagctcgtcagtattcaccagctatcagggcagacatcacatcatgaaaaacttgctgagactgtatattccccatgaaattttctcatcaatcaagaaattccagaccggtagctgttggtgtcaggccatggttagccaaatattggtcattgaagaacttacttagatgcctcatcccactgtcacagagaattgtcacaattgtatgtcctggacctaaatcttgagcaactcttacagcaccaacacaattcatggctgaagaactcccaacgaacagcccatcatttttcaacaagaacctaagttaatatttacaagtagattgaggttagataattgaaatacatttttagcttttcttgaattatcttaagataagagaataaacaactatgagcttcctgctaactatgacacagaagactgattcttttcatcctttttgcttcagtacttgtttattacaagcgaaatgtgcagaactttgattaatgcttatgatgatttgtactaaacaataacagttcttgcatggaaatttcagattgtaactcctaagagtcagcgaaagcac

SEQ ID NO: 412 - DNA, 788 bp, Oryza sativa
agactgtgaaaagagttttagtaaaactaaacatacaggagcataagcaattacaggctttctgatgttgaaatactgtttgtactttggaacaatcttaacagaagcatctagcatagtttagttcagctagccatgaaaaaaatggataactcaagtagcaatcacagatactacaccatggagtatgttataagaattatgaacagtatgtgacttactaccttctcaatggcagcatcatcaggaataacaacatgacatttgcagccataagcaggagcaacaatggccaagctaatagctgtgcttccagcactcccctctgttactgtaccaccacagagaagatcaccagattccagagcctggtaatgacaagagttccaggatcaaatataaaggatatgatatacggttgttagtatataacaacatcataggaaccgaaattaccaaacaacatgacacggagcaaactatctcatgaatccatgattcatctggtgaaatttgaaacaaaagaatttagataaaatcctattacctgtttgtttcaatccaataatactagaaataaaaccgcataatgtttttcccatgagtgctttttttcagaactgcaattctaaaattgttgggtcactgacaacatagttttacaggttccaaaagatgatggaaaaatcttgataccaccctgttatcgacttccaccttacaattgctttttgaaggatagacaactacaggctagagttaatacaagtaagcatttatcaccacat

SEQ ID NO: 413 - DNA, 549 bp, Oryza sativa
tcagtaaatctgtcaaagataagatcccaaagtacagcacaacaggtatccattgggcttctttagtacctccgacaatagttggcagtaaaacaacctgaaaagtactgatggccaatccctggacagatgtaattttcttatactgatggacacttgataaataaaaatggattattagttggttttaaatatgaatcatggtgcccttactgcagcatcgacaggaaccagttgaccagctaggagtttagtaaggagtggtgtcatcactatagcaccaatagtcgaacaactgaaatgtaaagataatcacaattagtcagagtagaattgggagcatgacactcaggaagaaaacagagtatctagggtgtgttctatactgcactttcccaacttctactccctctttttccgcgctcacgcttcctgaattgctaaacggggcgtatttcgcaaaaaaattctatagaaaagttgctttaaaaaatcatatcaatgccatttttcaaggttttgcttaagctaatacttaattagggtgtg

SEQ ID NO: 414 - DNA, 1473 bp, Oryza sativa
ttatagaaaaattcagcaccatttaaaatatcaaattagtttcattaaatctaggattgaatatatttagataatatgtttgttttgtgttgaaaatactattatatttttctataaacttggtcaaacttaaagaagtttgattagaaaaaaagttaaccgacttataatatgaaatggagggagtattttttatctgactctggcgtgtgtcttctacttaatgtaataatctactactcatacaagtatagtgctttttgatgctgttggttgtgaaagcaggtcactgatctaattgctatcttgttaaatgtacatagacgtcgaatttatcatttatcttttcttcttcctatttctgtagatcaagatattgatccatgccgcaaagggaaaaaactgcttgtcttagacattgattatactctattcgaccataggtccgctgctgagaaccctatcgaattgatgcgtccatgtaagggcatctcccatcaccactattatgttttccaatgagctgtcatgaggattgatgccatattcctcttcacagatctacacgagttcctctctgctgcatattcagaatatgatatcatgatatggtcagcaactaggtaagcgttttgtgatcctgatctatcagttaactggttatggttgtgctgtgaaacaagtaaagaaaaatacaattggcctttgaatgcagcatgaaatgggtggggatgaagatggaccaacttggagttcttggcaaccccaactacaaaattactgctcttatggatcacttggcgatgataactgtgcaatctgaaaacctgtcagaaaagaaaacttttgattgcaagcctcttggtgtcatttgggctcagttccccgaggttagtagtggcgtggtactgtgaatttgtgactgattctcattgaattatttgctcattgcttctgtttctttcatatgcagtacaatgaaacaaacacaatcatgtttgatgacctcagaaggaactttgtcatgaatccacagaatggtcttgtgatcaaaccatacaagaggacccattcaaacagaggcactgatcaagagctggtgaagcttacacaatacctgcttaccattgcagagctagaagatttgagcaagcttgaccatagtgcatgggaatccttcacagaagaaaatgccaagagacgcagacacaggtagttttttctcagtgtattgatcagcaggaaagaaaagttcgccctcctttttgatcactgctattaactgcatagactagaatatcttggattgaccatgacaaccacaatgctacttagaatactctacatatatccctgcgttcgatctgcacaaaaacatttccaaactgcaacagttattttttaaccttcctgtgtgcatttcaacgttaaacctagaagctttgcactatgctcatttttcatttacatatg

SEQ ID NO: 415 - DNA, 721 bp, Oryza sativa
ccttcacaaaaggggcatactatattgggaagatggtgtggagtaaaggatacagggaacgtcttgacctgctgtccaaatatcagagcaagttggtgggtttggaagtagatttatatggtagcggagaagattccgacgaagttcgaaaatctgcagaacttctgagtttggccgtgaaggttcacccaggacgtgatcatgcagatcccctgttccatgagtgagttctcttattgttcaaaaacttccttccgtcttcttaattatttgaatgaacatgagcgtacaactagacaagtttaaccagctacttttttcattgttgttcaaaaatgagtttgagggttactatcattataattcattgcaacaatgcaaggttactgaactaaacaaaacgttgaacacaggctacataatgaggtaagacaagaaactgagagtgctaaatcacctaggaatgcaatataactcataatatattttgtcatctatattacattcagcatatggcaatggtttgtgtggatactgaaacacttcaatttcccaacagctataaagtattcatcaaccctagcacaacagatgtggtctgtacaacaactgccgaggcccttgcaatgggaaagattgtcatatgtgccaatcacccttcaaacgagttcttcaagcagttccctaattgccgcacctatgacagtggcgaggaatttgt

SEQ ID NO: 416 - DNA, 1332 bp, Oryza sativa
aattgtggcaatagatacatattgccacaattttaaaatcgttgctagccgtggtaataaatagtgtagtaataggttattgcaataatttttatttagtggtaataaatttagatgttgccacggaatggatgtggcaaaaaatcatattgcaacacttcatatcgttgtaataaaaattattgccaccactccatatgtggcattagttctacgtaccaaattaaaagttcaaatattaatctatcatcctatctattaatttctttatacagtgtcttggctaggattcgaacccatgtatattgttccatttgagcctacctaactaagatttgaatatctaaaagatttcatatgaacaagttatcaactataaaattatagatctcgtcgagagctataatttccatataaaatttgtctcaatccgtatccatatgaaaaaaattaagttaaattatgagacgacaatttttttattgcaacgaatttgctgattgtggcaacaaaaagtagtgaaaagtaccattattatgtaaattgccacaaaaattaaaattgtggcgatagaacatattttttttgcaacagtaagattttttgtggcgatatctcattttctattgcaacaaaagtactaaataaaacaacaattgtagatcattgcaataaaatatatttttttaccacagaaaaattatcattgcaatagtacaatatattgctacaaattattttttgttgtaataatttggtggcaatagctcaattatcttgtaatgccggagggagtagcatttatacttagtgtttatatcgaagaaattaaacataattgtatccaattgtttataaaatatatgtaacacgtacgtattgatgtaataatttgtcgtaaatattgaaaaataatctttgactagttatttataaaaaataatgatgattacgttctataacacaaacaaaaggtagttcaaatatcaggaataatgtatgaaaatattaggattgttggtgtgaacaggaaacaccaaaactctttttttttactttcattttgttgaaacaaattaaccatcataactgctttagatattgtaaataaatatctagcataggctgcaggcatcagatataagatgcacacaggcattaatagttatatatgggtaactatgatataagtgttttttttcttgtgtttataaaattatttgggaatcaagatgaacgtactgcccagctcattgaattaaataaagatgtattttgtcaaaaaaaataaagatgtgtattggtcatgtgttttcaaaggaaaatgtgttt

SEQ ID NO: 417 - DNA, 2737 bp, Oryza sativa
ttagagggtggctcgcacgcacatataggtgctcggtaggggaggtttcatggcatgcacgaccatcggggctaggccgcacttgtgcaaaaagcgctcctaagccaggcctgcgagttgcgagcttcatttgttccatctccacatgcatgttgttgtcgtctctccattggtcgttcagatctagcttggatccgatcgacttgggttttcttcatcgactggatttggccggcagcaaccgtcatcgctttcgcctccaccttttcgccgacggccacccccaactagatctgccatcctcgtccttctttgctagatgccacgcccctagccatctccaccatcatcgctggctacacctacaaatccgacgatggagaacccccaaccagcggattggttctatgatggtggtgagcaattgggcagtgagtgggtctggctcagcggcggcgagcccacgaagttgccccttgtttttcctcccccaccccctccccctagcccttttcctcttccttaatttttcttttcaccaatcaagtagtcatgtacatatgtgatgatggttttgctgttcatggatatatggatatgaattcaatttttattttaaaaaaacaatgaatttatttgacttagctgcatttatatctgaaatgtgtgtattttataataatttagagtatcttgcacttggtaatatttctatttatgggtagtagggataatcttaccatccacatagaaagatgagtatactcaaggttcatttatccaaccaaacgaataccatgcatacaagttttcacatatcgatccaaccaatgaaacaacacctcatataaaaccaggttaaactaatacatgcaaccaaacaaccactattacaccttgctaaccacaccaaggtcagcctgaatgatgcacatatgtaaggcaagctgagagtatttgagcaaccggccccggccctatgaaacgcaagatagaaaaaacacaagaaaaggaaaaaaatgcagaaattgtgtagttgcatgtttctttaatcgtacaaaaaaagcgcaggaaagatgaaaaggagctcttcgctagcattgtaggaactaacaaaggaaagcaaagtttccaagagatttgacctcttgcttatttttcccctataaaattgaaccatagcagtgcaatcctttatgaaaaatttcctatccttcctatgaatcaaagggctctataggaaaatttttccttaattaggaaattgaatcctccaaattacttatggcaaacattcatttcaaagtggtatggtgctatcttcagtaaaatatctcctttatctgaaaaataaatttacagataattgtatttcacatatatagagatagatctgcactgactactgattgcgtgtttatatatgtgaaaacctgcaaacatgcgtattttacatatgataattaattatatcagttgtcaactatagtagaaacttgaacacatgacatatactttgcacacgatttataagatgacaaatatatatatatatatatatagcatacgtacgtatatcgtacggtagcagcagctgggtcttatagggggtacatactccatgcaacaacaaattaacaagatcaaacataattaactaataaacacaaaacgagcacagatatatgctaaaggggaacgatgagcatgcatgcatgagctgagctgacgacggtgataataagggggatctgaaatttggtactctccccagtggccggcctgcaggctagctagcttcatacgagcttcaccgccgatatagatcgccgccggctccggccgccgccgccgccctagccgctgcgctccatctgcttgaagatgtcgaagctctcgaccacctgctcgttggccctctcctgatataacatcaataatatagcacataattaaagaacaattccacggtgagatcatatcacacaagaactatctaaaatcataatcgttttgtggtggccatgcatcaaataaatcaaatcatatagagaaactgccttaattatactctcattttgtgtgtatgtatatatgatcggtgtctctgttgctatggcaagttaattatcgtcaatatgatcatcacctgatgaggaatgggagcagctactactctgggctcggggttgctgttggaggtggaaaccgtcgatgagcagcgggggtcgcacttcgcccactgcataaatgcagagctgatcatcagacacttgcatctccatcggtgcaagtaattaatattattgtactagtaattgatgtgtaagcaaggtgcgagagatctagagaccgatggatcggttgattatagctaataactgtcacaattatcacatgcaaattgggggccgggagatattggggatgagtagagcttacgttcttggcagccatgctgaaggcctccctgtgagggatatctggcttggcagctttgatacgctgtatttcctccctgcatcatcatatattaattataattaattgatccgctaaaatatccatgtgcagatttatttctgagaagagagtgtagtacgtacgtaggtacatgcaatgcatatatgcatatggttgtgtcgattagatataaactggcattgtctacatatatatcccagtttagttgtcccatgcatattttattccctttggttaattacttcatcgatga

SEQ ID NO: 418 - DNA, 4358 bp, Oryza sativa
tgatcgtagcaggactgcttctcgcgatgatctcgaggacaagatcgtcgggaagaatttggtgcggttcgatctccatatccatatccatatcgagtacgtgacgcaccacgatcgagcgagatagactcgatcttgtaccgatgtagtacgtggatatatatacacacattcggtttgtttacggttcctgtgaacaataggattcggatgcatgtacatccgtacaggtaacgtgtgagcagttatgttaagttattactactactatatatgcactacggacgatttggtatgggaagctccatacggtcaggtatttcagtcgtatagacatctacaatgtggtataaaaataatccataaacaatgaatattccattcagccatctattactattatgcaattagttcatataaaaaaatagcaaaagatacccatatgcatatgggctacccatatggaataaattatattatctatctctactcctctctcttctactaataataccttgtatatatatgcattgcggagattaccatagggataaactatttatgtgagtcccatctatatggaccactttaccatatacattggtgatgccctaatggaactatggaagtatgctgttatacctgctctagcaacaccagtgctgcgggacaaggtgtacctagatgccacggtagcatgcgactcaaatagttataaaaaaattgaaaaaagttaataacatcgattgtgatgatatacgactatacacaaacatacgcgactaaatttgatctataactagagaaaaaaaaaataaaatcagacagtgaatagtacccgtacatcacagataaaatttgttaattttgtttctttatagtcgatcaaatttagacttgcatgtttgtatagggtcttatatcatcatagtctatcttattaaattttatgaattttttatataattgtttaaattttatgaattttttatataattgtttaaattacatgtatatatctaggtgccaattaaaatttatgaattttttatataattgtttaaattatatgcatatagctacgtgccaatattttccccgtatgattcttttccccgtccctgtcgctcccgtcgctggggcaacacgaacaccctcgaggcctcgaccgcccaccgacgccaccccctccatccttccctccggctcgccgccgcccccgcccgagcggtcgccggaaagccgggcgcggctgcaaggacggcagcggcgggtctctctcgccctccctgcgcggggttttagcagttgattctgcttaccggtaggccggccgggcgctggtcaatgatttggggccatatggcagcctcattgtgctgatttggtgggctttaacgctcaacgtaggtcatatgtactctagcagaaacaagcccacaggccacaactaattgttcaacacaacgaagtcacgatctctctgcacctgagtagccatgctggaataaccatttacattgatgagaaatattacgtacatatacatacatccacgtcgatgcttagaagttacagcatgaaccagggtttttattgaacatgtcgaaagcgtttataaaacataaacacacatttaattacgggacattcccaccggccgcctatatattgatcgcgccggtcaagtattttttttcccaccttttagcggacgccgggtcgattagatggggatcgcgcttgtgatccgcgggtagacgacgttggccgggtgccccatgatgcggcgacccttgcggtggcggaacaggtacacgaacgcgccgagcggccacttcacgacgccggccaccacgaacgccacgaaacccagcgtcgggccgagcaccttgcacctgcacgggttgctgtgcgttccgcactgcacgcacaccggcacgtaagccatctcctcgctcgcgcccgcgcacgaaaccgaagtcctccgcctcgccgcttgcttgccgatcgacgagctctactagcgcctctgcttggaatgcctgtgttgatggatcgaatgagcaagggattgcggatacacgcctccacggagtacgggcttaaataagcaggggctatgaaagcttcgcatcagccatcagggacgcgtggcggggtggaagggggctacgtacgtggggcgctgctagtgtctgtcttggtgagtttggtgtaaagggaggcgatgagtcgtccgtagaagattgccacgtttgcttggggaaggcagagcccaaatcttgagtcgacacgtgcactgttcgtaccggagctttctggaacacagattctcgtttcagagcaagagaaacggtatcgtagtattttttaaagcattgcttttcgttgcctattggagcaagtacaaagcaggagctataaatatattttaaaaagataaaaaagagagagaagagtagtgtgctatagatctgtagcacgatctttaagatgtaacgtgtgtatgataggtgagaccgggtattattaatagtatagtactccctccatttcaaaatataaggcacaaccacccttaacccaaataccaagaaataattaatatttcatggttatcatgaatcacctcaatcaatacaatacatgcaaccaatagaattaaaaatcttgtgagtataggatttaaaataataataatttagaggagagaatgtgctaattaattatatgcatgcatgcatgccttatattatgaaaccactttaaaaagtagatgtatcctatattttggaatggagagagtaaacaactattgtatgaattggctattatattggctataaatgatttggagctagtagttggctatactattaaggccgagtttagttccaaactttttcttcaaactttctaatttttcatcacatcaaaactttcctacatacacaaactttcaacttttccgttacatcgttccaatttcaactaaatttttaattttagcgtgaactaaacacaccctaaacttaactcttatgggtgtgtttagttcacgctaaaattgaaagtttggttgaaattggaacgatgtgatggaaaagttggaagtttatgtgtgtaggaaaagtttagatgtaatgaaaaagttaaaagtttgaagaaaaagtttagaactaaacaagtccaatatcgaacgatacaaggcctttggccaaaggtgggctccatcttgtctccgtacccaactctcaggccctcacttgcgtcatcgcaagttcagacttctgttagaaacgtcgtcttgactaattattgttcgaaagattatccctttctctttcaatttctttcgaatggcttacaaacataaagtgattgtaattcggctctcgttgaataatcgagaatcgcttgaaattatggttttcacttgagatatgaaaatttgataggattttcacaaaaaaaacagttcagttccttcaaactgactagaccctggaaaaagtacaccgaaggtccctcaacttgtcatcgggttacaaatcatccttcaaccacaaaaccagatacaacgcatcccccaacttacaaaaccagtgcacattgaggcagggcccgcttatattgctccaggccaagcacgcttaaccctggagttctttgaaaatcggcttccggaaaagaagttgcaacgtgtccagtgcaccactcccggtccacaccagccatgcgctatgtaacgtcttgcctctcccaagtcaggcccgcttacatctggtagcttttataggtaatagactgccctcacaggccaacacatgccttttctgcacactttgtcctcactcgtgtacacccggaaagaattcctcggtcggtcactcatcccaaattgctccaggccaagcacgcttaaccctagagttcttttgaaatcggcttccagaaaagaagttgcaacttgttgacatgagtattttattaatactattaagccctgggccgggatgtcacactaggtcccctagcggttttgactctggttttctccgacccggttttctccgacatgacagctaactcagcgtgggacccacacgtcagcctcttcttctcctctcctatccacctttcttcctctttcccctcctctctcaccccctctcttctctgtattatccgcgtcacgaagccggcgggatggagcggggcggcgatgggcggagtggggcgaccggcgacggcgaggcggagtggcggatgcgcaacgccgagagacccgcaggggtggccaacgggcgccatggccacaggcgccggcgcgagggacacccgccgctgggggc

SEQ ID NO: 419 - DNA, 3309 bp, Oryza sativa
cgctggaaggaggggatagagagaagagagataagagagctgacatgtgagccaagggcattacatttcacgtgatttttctctcatcttcaaccggaaattattattttaatcggcgcggtgtccactggcaaattaccacgtttgtggagtgttttcccccaaaagtgagtttggacagtgttttagggctaaagccacatattagcagtctccagtagcaaaatttgtcttttttttctattagttttggtcaaatctaatgaactttgattaagaaaaagtcaatatgaacggggagagtagtattttttaaagaggaattattagcgttcgtagatcaaagcaaaattacagtacttcatccttgttcctggtgcaaggctcctaaattccaaactatagttccgtgcttccgtttcctagtggttttgtccacaagtggaactatgcagaagtgtgaagaaaacaagcagtcaggtagcagtgtagcacttgtcttctacggcactaccacaatccatcaccagcgccaccttcccagctcccaagtcccaagtagccgcaataatggtaatcacggctctgcagcttctccctccaatccttggccttccggcgacggcgagaaatggctacgccgtcagaaggccacggatgatgactgtgacttgctgcaggcacaaccaggtaccgagtatcttggctttgccggatctctgaaattccctttccagtttccactgtttcgtttgggatgaactgcttccgttttccggaataacatcgtgggatgctgggatccaatatgcatgagctgaaccacgaaatgttctttttattagctagaggcctagaacgagtaggataggttgatagattggggaaacaggggactggaggtcatctctcatgaggatggaaagatagatctcccctgtatgcgatggggcctggatgagcagctgctactttcagaagtactttgtattaaggcaacttgcaagaatcaactgtaggttttatatgcacaagaatgtcagatatgatgaacacgcttcacttcggaaatagtactaatcagaagtagagccgggtggttcagtgatgttatattgaaaaatgctatgcctgctatgtttcatcaccaattgatgaccagtttctcttgtcatttcttggatttttaagcagtactttggtgcctacattcctacaaatatgtcaaaagctgttaatttttttctagaaaaatatgtcaaagctataggtgcatacaatatgttttattagattgattcagaacactcaggtattgaatggattattaggtgcaaaatcctgctgtatttttatgctgacaggtttaacattttttttatgtatgtattgcactgcatctatgcatattcagttattctactatatatgtccatccccttggtggtgaaaattaattaatagatgaaagttggatagttcatacttggatgattagatccaagtttgataacgaaatcctccatcatagagactattcatactaacaaaacaaaccagtaattggattttgatatgtccatgcatgtcaatctttggttatataggccctatttgattaaccgtgtcagttgggtttgtcgttttttgtcgactaacactgtataatttttcctgctctactattaatatacaaggcaaagcttttgccttccttcaaaaaaaatgtaggccctatttggttaactttgtcttccatatcttcagaaacagtgaccccttgaagctatactcctctgcttcttgtaatctaaattatcgtgttatatggattcttcttcagttctggcataaaccgctcccctgttaattagcaatttgtttcctgcaggcaaccactgtacatgaatcaaggctaacaagcagtttatcccgtagagatgcactgtcatacatgtcgtctgcgttcatagcaacgcttctggtggctggtcctgcagaagcaagaacctccaggcaagagaacaagagaaaagtaagggagaagctggagaagctccgggagaaggcactaggcccagatgataaaaatggagccatccgtaagaaggaatctttggcgaacttgttgattcctcctaaattggtcgaggctaccatttgaaaagccattgtatcgatgtgaacttatattcagacgttaaggaacaataatatggaagtctgaatatatggtgctcctctgaactgttgttgccaactcgccatcactcgtgtatgaaatatgatactagttgggatctcaatccaaattaaattatgccttttctatatcttgactcgtccccgtgtcttatgtgacgtagtagagcacccaattcgttcacatcttaaaacataggtactgcattacaccagatagcgatcaaacacatggaaaacaacacttacaagtgtgttttcactgaaaagagtacagcactgagaaaagatcagcaaccggcatttgaatagatagaattcgaaaccgtcccatacatgaatgaatttaaaagtaaaaaaccagaatcagaaagttttcattacgaacagcatgtaggagatcagatctaactcgtacgggcaaggcaacttgcacgagtcgtcccagctaaccgtctcgagcttattcaacaccctgcgttgtaggtcgagcagcagaggactgtcgccctcatccccctccaaaacgagggcgccactcccctcgcagaaccgcacgagccaccttcctctcaaccatccgtcgcgaaaatccaggccgcctgatgctattctcgcggataacgtgacgcagctcccagcggcgtgacctccctcgcgcggtggtgcggagtctgcggacccacacgagaatgcggtcgcttccgtggacgaccacgctcagcaatgctgcgttgctcgtgccgtcgtccgccgccgcggccggcgatagcgcgaggcacatgttgtgcatcccggatttgcacgactccgggaggttcactagtgaagccttcggctccccgccgtcgcctcgtcgctttaggctgaggatgctgtaacccgagtattcgcagcacaaccagtagacggcgccgcgcaagacgacaacattggagtcgccgtcgaataagcaaatcctgtagatggggcaggcaacgggagtgccccactcgcgctcgtcgaaggagaagacttgaaagatgagcgtcctggcagggctcactaacagctgcgcggcgagcaacttgaacgagtgggttccaatcgcctggtcgttgtggttga

SEQ ID NO: 420 - DNA, 1833 bp, Oryza sativa
gtcatcccacgatcaccgattcactctcctagtcctagagtcctggtccatctttcttggcttcttgatatggcagaccgaccacccgccgcgcgcgcagccttacccggtccgccccggccgctgcgcggccaagcgcacacggacctcccgctccgccggcgcatccagcatcacgcgtacgactccgcgaggctcgtcggtttcctcgccctggctgtcaccctcgcggcgctccttgtcctcgcgggcgtcacgctcaccgtcgccttcgtcgcgcttgtcgtcctcagcccgctcttgctcctcaccagccctctctgggtgccgatggccgccgcggtcttcgtctccggggccgcctcgatcatcggctggtgcctccccgtgggcgcggtggcggccggcacgtgggcgtaccggtacttcacggggcggcatcgtcgacccgtgggcgcacaccgggtggactacgacgtcggcgcgggcaccgcgagcggctggatgggctactacgcgcgggagtacggcgcgcgcccccgcgtccacgtgaaggacgccgctcccggggcgtaggcggcacgcggctctccttgccgcgtgtggcgtctcgactctcgcggacgtactctcggtgtcgccgtgcgtgtctccatgccatatgttttgtagtgtcacgccttgagcgctatatatattgcaagtttgcaactataatgtggcgtgatgtggctggttagattggcgcggtctcgatcggttggggatgatccttttgacctgttcgggtctggttaattaccagcatatataattggtgtcccgtggcggctggtgaccgacacagtgctgccaacctgcattgccagactcgatgggttaactacatgctgggaaagcagcgagagtaacctgtgctcggtcgtcgcatctgtgtcctgtacactcgatcgatggacggtgctatttgttatgggcacctctgaatcgcaaacaagactgaaaaaacggagaaatagggaaaatatatgattctgataaaaatataagtataaaatagatgattgttaaatatataaaaaacataggaatgatagtttgattgagccatagaaaaaatacagaaatttgagtagagataaagactcaaataattctttctataaggttctaccttatgttaaattttctctaaaatttacgtggaaaagatattccataggaatttcgtacgattcatttcttcgattcagagggtaatatagaaaaatttttatagaaataacatcctttaaaattcgaacttcctttcaatcaaatggcctaacacttgacagcacgcagctgctgcctgctattttaaagcctggtgcagtttcggcccattaaggccagtgggctgtttttcggcctaagtttggaatatagacatggataagcctacctaagatatttactactctattttttttctcttagttaaacttttaaagtttaatcgagtttgtaaaataatatactaatatttttaataataaataaatatattattaaaatatattttatactaaatttaatgagactaatttggtgtcgtggatgttgctaatttttctaggtaaattttgctagaggacactgctaatatgtgattttagccttaacacactgcccaaacttacatttgcgggaaaacactccataaacatggtaatttaccaatggacaccgcgccgatcaaaataataatttccgattgaagaggagagagaaatcacgtgaaatgtcaagggaatgccctagggcccacatgtcagctctcttatctctctt

SEQ ID NO: 421 - DNA, 5580 bp, Oryza sativa
gcctgcaggtcgactctagaggatccccatagaatgtattttacaatttttttggcatgatttttttctttgatcttctgaatgttctcattttgtttttgaaacttttcatgcatggccatattcaccatatttgggattagaatacatatcccaactttaggtacatccctatataacattttcaaaatggtatacaaataatcctgaaataattctggccaacatcctaccgggtgactcgtgacctcatcagcgtcatgttagaactgaagttcaacagtgccacaaccaaacagtacggcgacctgtgacggtacacaacgaacttgtagtcttgtacacatggtagtgatgggcaccgcgttaggacaacatggcgtgcaacaatggtaaaagtactatatgaacccgcgaattgcagtgagagattcttgctaacagctgtattgaacttgataaagcaactgtgctaaaagtactggataaattttgaaattgaataatcaaggaccttgattgctacatatcactaaacaggtagcgtaaatttagagacttcactaccatacacaactaattttctgctatttgatactcctaattgataccgagacctaaagagttaaacagcttcatgctcactattatcagactgggaaatagacaagattaatgagttaattcatgcatatgttgatacattggtatcactagttacatgatctaatcagtgactaagtctcctatgctcggctaagaataaagtatagggtgacagtgaaatccatcgactaaaatcaggagctgaagtcaaatatatcttagctcctcgaaaaaatcaggggagagatttcaacacaacatggatcccaacaaggagccgagaaaaactgtggctacttaaatatctaattcatttatctgcccttcttaagtttagactatatctacgtgctgctatatggattgatcacctgtacagtaagagatacttatgttttcaattgagcaatcttatgcggcaccccatcagctgcttcattcatatattctgacatagattcttcctgcatacatcagggaaaaaagctgaagttagaacatttgttaccgcatcaggggagaaattaagaaattaacacgagttataaatatgaaactccgaaggatttgaaagtgctgatggatgatggataaaagtgagtttatgacaattattcgagggcagaaatgaatgaattaaaaattaaaaggttgataagttgattttagaaaggtctcttaagaaatgttgataaagaaagtttttgcaaacatcatactgtttaggagtttgggaagccatgataatccggtggccataatcataaaagacacctaaacattcagtgaatctagaagcatttttctgaaagttaggagccactaggccattgggatggtaaattggctccactgaacaaacaatttgttctaagcaaggcagccaacaaaaactgtgcaaattcatgaaggaaagttttgatgtaatgagcatgggattctgtaagttttaacagagtcggctataaagttctacatgggtatctgcttttataaccttcaactgcacttcagacaggcacattccttttataaccttgtgatttaaaaagtggtacataatcaaaccttttgacttagtaactgacaatgtacataattatgcttacgattatttgctgcatgaaatcacttacatctttttctcgcttttcttttatgacaacacactgggaagcaccgatgctttcgctcttcaggaagttacgagcacttaagagtggcttgttcagtccatctgtcactgatgagtgccccggttgctcacctacatgcaactttatgcagtaatctgcagttggatcaggttcatcaccattcctaacaactctttccctgaaacgatatgtgaaacaaattagatcaagagaaaaaagactgaaagatggaaaaggccgggaatgtaaaccattttcactatctataaaaattgtattattgaaggcagtgaattttagttgatgtctcaacaagggaagcactcttaatactcccctttgttgccatagtgcttaatgacattaatatataacgtcaaaagtgtttgtgtttgatccacctcataggcatgcagactacgtcttgttcatatagaaaagtataaaccaatgaactgtggaatttcactttagtgaaatggggcacgataggttttttctacttcagaaaagaaaattgtcttcagtagaaatatgagacagaactattgccttggtaaagaaacatgctgccttagctgcgggctagtcttgtcaccctgagcaacaccttcttctagatgagcaaattgcctcttaaaacgatccaccccactgtcaacagcatagccatcagtttatttgcaacatgtccacaatcaatagtgtgtgtgaatgaaaaaatgaagtatgataagtcacgattgattgcagtgtgtatcactatgattaaaatgaataaatgaactgcatacagtttacaaagatagtggaaactgttggtaacattatatagtgcatccgacctggggtacaaaaagtttgactgatccccaccacgaagatatttctgcatcatctgaggatggtactctaatatctaaagatagagagagagagagacaccatgcataagaaaagactattaccaaaatcctcatggtagaaaagattagcagtacctctctgtaaattaattcccggacatcatcttttgctagcttccttctctcaaactcaaactcgagttttgagatgggttgtgctatgggttcacgttccgaatttgccaatccagtaaagtatggatctgttaaggccttgacacataactataatatcagtataatggataacgaatattagaataacatttttgagcaattgctctatgctggctagtagctacattcctacctctgcagcagttggccgatccttgggatcaaaagcaagtaaccgttcaagcaaatggagagccattgggtctgcaccaggaaatttctgagaaaaaggcactcgaggcttttttctcatgttgcccaaatatcgtcgagctttctcattccgaatctacaaatagtatcaaaatttgaagtataatttctaaaggtacttcttcaattgtaaaactgattgttggaagaaaacagtggacacataatgtgttctattgactttattcggtcaatgttttagaactttgaccatcaacagctctcaaaatatttagtttgaaaacataaaaatcatatgggtagatttttctttataagtacgtttaacaatattataattttgttagatattatcattacattctaatagagaaatagtggtcaaaggacctatagagggagcttttagcaaccgcagtttctccaagaattaagagctccctaaacagtctagattgccactcagattctaagaatctgtagttgtagaattcaaaaaatgaattagaagccttaagctgggtttagcagcttccccagattctcagaagctggctaccaaccagtaaattcttagaatcttaagctcccccaaacatggccttttgaacaccaaataccgaataaagtcaacaatgtcatatatttaaatatagaggttgtatccccatcatcgaactcatcctacaattaattgatagactgattaatattaaaaatcaaggctaatgtattcaaaatgtaaatgcaatataaatttcggatttgttcttccaagcttcatcttcaccatttgtgttcttgaaaatagatatgtagttttggagagcttaacatcaaccctgagccagttttctagtataatctccaaataaactgaagcagtggaaaaaggcttataagctaaagcctcaaatgaacttaagtattggagaagccaaccatggacaaacatgccttaaaatattgaagataattcattataaactaagtaaacgcttcacatcgaatttacagtggttggtttacatttatactttatataaaggtagatgtttcaccttatgagtatttcaatattgataggggtgcagatagtttgtgtataataacaccagtacaagaaaactccatcactacattatcctagagacaagagccaagccattctcagcatttttgaaactacttatgcagcctgagtataactaagttatttccaataaatatgtgatgagtgaactgtttgatgtgtctcacgaacctcatgtgttccatacagcgcgagtagaaagtttctaggaccacagacagattcacctatgaactaattggctaaaacattgttcagaattctctacacagcttgcattgaagtaatcatcttttaggctgtcatgatagaaagtaattttgctgatatttatataaattgtaggtttaaatataacagaaatgcccgcagcccgctaatttgaacctcctaaaaatgtccgggtataagaaatgataatgaccatcagtaggaaaaaggttaaatgaaattgcatagaagacaggctccaactaattgcagatttgcagggagactgggaaagtgaaccccaccctggaaatagtttctcctgaaggagagccaagtaagtcggtcatgagatccaattgatgtaccacattctttccaggaaaaagtggctttcccataagcatttcagcaaatatacaaccgacgctccaaatatcaattgcaggagtgtactgcaaaaaacacatttgagtttagtatggtgcaagtgcatttgaaattatccaaattggtatgctaagcatatgtatcgatagttcaagagcatggcattattttgtaacataaaggatttaatgtacggcattaactcaataatctcggatggggataaagtagctctgaaacgaaatgaccaggttgtgtaaaattgagcagaaaattcaggctttagcatgacgaaaatttgcagacctttgaaaagaaagagccgcacaactctggagcgcgataccatcttgttgccacgtaatcctacgacaaaaggaccacaaaacgaattaaaattcaaactatgatgggtgcttaagggctaacacaattctcaacatatctgactgtactagtactaggattgttcttttaccgtccagaatatcgcggacggagtgtcgtcgaaggacactcgagcaaggccgaagtcacaaatcttgaccttgcaatcagcattggcaagaatgttcttgggcttgaggtcccggtggaagacgctggcggcatgaatgtacttcatcccacgaagcagctggtagaggaagaactggtggtgctcgggggtgaggtcgtcgttggccttgatgacctggtggagatcggactccatgagttcgaagataatgtaaatgtcgcgaaactcgcggcgggagggtgggagcatgatgtgcttaatctccacgatgtccgggtggcgcaggaggcggagtagcttgatctcgcgaaggatgcgggtggcgtc

SEQ ID NO: 422 - DNA, 4492 bp, Oryza sativa
tgcctgcaggtcgactctagaggatcccctactcctacatgagaaatcattgcctcctcacgcaacaaaacatacggactaggagtatacacgttaatcattgcaggaggcccaagcccatgcatagcatagagtacaccatttgcgggtccctgtaaattgcagctgtacgtgtgcaagaactcgtcgattctgtggaccaaatccacatccggagaaccatcaattatattactccatccgttgtttaaatacataatactattgatttttaaatacatatttgatcatttgtcttatttaaaaattttatataaatatataagatcagtggagccaaaaaaattttatgagccaggacaagtctattgatggatggattctctaaatttcaacaagagctagtttgctacaaataagcaaggggatccaaatccaatgcaaatcacttcattcagattatttcttacgttctgcttgtctgagtactctactcctgctagcatatcattttgcttctgcctgcataattaagtagccaagcacccaatgaagctaagctactgctgcactctgcctactgccgcgtgcgtcctgctaagcgcttgctaattaagctcattacacaaccatgtcccctgccacaagtggatgagcccgggcagttgcctagggtagccgggctgtaaatccgccccttataaaatataaatcatgcttaaagtaatatgagtgataaaaaaactcacaacaaaataaattataattacgtaaattttgttaatagtacgaatggtcaaatatatgattaaaaagtcaacgatatcatctattttaaaatagaggtaatatctttttgaaaaataaccatcaattagattgatctaaaccaacaattacagagatactccataggtttactgcagtccactatttctggccttcagccaaacgaaccttgtttcccttttaatcgtctaccgtctagctcattgcaaagccattttctctcagcaaacaaaattaaactgagaaataatgcatggtgataaaccatgctgggtatatagcagaaaaattaccgtacgtgagtaccttcgattattgatttgtaggaagaaatatgtacttctacacagttggcctcaaccctggccagcgaacactgaagtggatgaatgggtgatggcctctcgaggcttggagtgtaaaagaaactcgacacttcacgcgtgcgtgtgttctactgttctgcagagacctcaaagccgctttggtttgttttttcgtttcgtaatacatgtcccgtgccgtcttgctagtgggcatgcagctagtgcagatttcccgtttggtcaaaaaggatatgcgtgcatgtacacacgagcttacatgtaatccatgcaaaccttgatggtcgaggatcggccatgcatctacatggctcgttatgattcctgaccgtaccgcatcgatcgagtgcatgtgctcttaacactatgatgatcatgatcctttctttgcccgcattgcaagcatgcatgtgtgcttcgtggctcgtgcttgtaactacgcgttgcacgtgaacagtgccatcatctcgatccaccataggattttggtgaaattcaattcaggagccgaaactgttatgtttgtttattttctaattaggtacctctactttggtggtgtgcgttcgtttttactaaaggtgataaagttaggaaaaaaactcattagcacatgattaattaagttttaattattacaaattgaaatatggatttatttaatattttttaagcaacttatgtatagaaagttttcgcacaaaatataccattcactaatacagaaaagatttttctgtacaagagcccctgtagcttgcaagtggaccgtaagtctgtaactagtcacgcctacaaaaattggccagcattttcgtatacggctccttaaaaaacccgcatgtaccttaatcagaaaaatatgtatcttaatcactactacaaatatgtatcttaatcagaaaaaagggaccctccttgtttcggatagtattaccacggtgatatctattgctagtatttaactatcaatattattactagtatggtcattaatttataagttctacttccagtagatacatatatgcatatttgatttattgtattatcaggtatacattatgaacaatatgatccatgcattggagaaaaatatggaaggcctaaattcattttgggaattgctaaaagattgttgcaagatttttgaataaaaaacttttagatgtatctatagtatgttatagtgtaactagagcgtaattatattgtaactagtataattatagtgcaaatcgtaccataaacattgtaacttctatacaagttatatataaggtttcacataattttttaattcttatatacacgttgtataaaagttataacgtacttatagtataattacagtgtaattatatttgtcatggttattgtcacgcccagaaattcacgaaccagaatttctaagctgaatgtgtattaaacccctgtccaggaccagccagggtacacaaacgacaattgttgacatacagatccacgtcttacaaaaatataaaagattacaaatgcagcggaaaaggtaaagcgagctaagcctgaagacttgactcctgcagcgggcgattccattccacaggcaacccttgacggcagcgacgaaaccaacctcttcaagacatctccaactgagaagaacttcaactctggtgagggggaaaagagagcaagactgagtactacccactgtactcagcaagtcataccggaaaagggggggtatgatgcagggtatatccaagggaggctaaaggttcttttgcataaagccggcatttcaaagcagtagttgaaagcagtaaaacagtagtagtaattaatccatattaaccaatcactgtccaacgttacaccacgttgcaacaggcccaaaccaccacctgaactaaccagttccaaaagctaactagggtgaaactaatcacggtgaatctggtcgaccgcccataaccgcgggcacggctattcgaatagttttactctgatcagaggtgtacaactgtacccacaagacacatccccacgacacgttcccgtgcgccgacatgccaccacgacataccggaaagaggccgtgacaggacccttcgcataaccccctctaaccgatcgcaccacaccttagggttcgcccccgtccccagcaggcaacgggcagcccccctttcgtgccgcggtgaatccggaagccgatcaaccggacaccccggccgacccaactccatcacgcccaccctcgcctgggtacgtcggctagagaaaagctacactacaagcccagccgttgcccacgctggcttgtggtaagtacgataagttcttccagggcatcccgcgaaccggtccttagtcgccatgggcacgactagcaaaaccatgcacccacagcccaccatgtagtgtattttaattaaccaacaccattgcggtggcactaatctaaagctattgccaataatcaaagtctatgctttaatgtgatccccttttgtgcactagttgaactaagcatggctaagcatctcctaaaccaacatctagtcattttaatacccaagttatcaatggcgtaagggaaacaacatatagctgggtaataggaccaatcccacatgatattgtaaaacagtgcaatatttaatagaaatgcgggacatttgtaaattgggtacaatatgatcaattgcaatgtatgacttgccttgctctcgcactgatgaggccacagcaacgtcttcgagaaaccgcgaatcgacgaaacgggcgaaatctacgcgacaaacaaagcacacaagcaaaacatgctataagactactgaaacagataacaaagccatttttaatggattctacacatttttatgaatttactgagacttgaatggatttaatcggagctcggatgaattagttatgatttttagaagattatttgtgtttttactataaaagaaaaacccttaatcaatttattgcgcaataattcatcccagggctgacgtcagcacaaggaggggtggcgccgacacgcgggacccgcgggtcagtgactcaaggagagagaggggcggctggcaagcgggccccaccgagcggcggctcatggggacgaggagatgcccggtcggctcggctcggcctcaaaccggccgaccggttatggcgagggcggtggcgcgcacgcacggtcgccggcgacggcaaccggaggcgcggaaagcggcggcggatgacggcggcgcgaaggcggcggcacacagccgcagcggcggctcggcccggcacggcgctaggagggagagaaaggggaaaagagggggaggggcgcctcaccgcgagttggccggcgtggg

SEQ ID NO: 423 - DNA, 996 bp, Oryza sativa
acccgcacccaggcgctgctgtgccgtcatgaccaagttggccacgtcttccagccatcgttgggctggagactccgggtcatggacgacaggcgggtgtcgtaggagcgcgccagcagcctgaagcgcaccctgaggtgtgctgccgtcgccgtagacgaggaggcgacgctccccatctcgccgttctcctgcatcacctgcgactggtgatgccacggatttgtcgaccctctcaagcgcctccccctgcttagggctttggcgcggaggaggtgggggagtacgagctcgacggcgcggattaggctccccgtcgtcgccgctcacactcgaagagaggtcgtgcgcttttccttgctcggccattaggctgaacaagaaaaacttggcgcacacggaagagtctgagagctcagaaaacacacgctgagccccttacctggcgcgccagatgacggagctcgtggctcctcaccgggagaccgcgcaggcccccctttgccggttcggccgggggcttagggtgaaatctcaagctctcgctctccctctgtatctggaaagatcgtctgcccgcaagacacacaagacacggcgatgtatacaggttcgggccgctgccaagcgtaataccctactcctgtgtttttgtggatttgtgtatgaatgagctacaaagtgtgagccaacttctcccccgttctaagctctaaatctggaaaagaatccaaaagaagaaccctctctctatgggcaaggtcctccttttatacttcaaggggataccacatgcaccctcccctttccaaactggacttttcttctctttatggacggagattggtatggttgctgtccgaatgacactccgatgggacagcccacacctacctccactcccggcgaagacaggcgcaacgtgggatcgtggctgcccgttgctgacgcgaccagtgccagaccggtcattcttgtccaccacgcgtcagttta

SEQ ID NO: 424 - DNA, 5516 bp, Oryza sativa
aaatgggccgccatgtcctatccatccatatccctccatccaaacacaccttaaactatttacgtcggatattgtcgaaaatgttgtctgtcgcgcgtccgatgggaggagaggaaaatcggactgtctgcgtgccactgcatgcatggagagaatcttttcccttaaactatttatctaatatacgatctgattgcaccactaaattcgttataattaaatctttacaacaagaccacacatgattatatttcgacaaaaaaatattttagttttttattaatttttttaatgttgcatatggtttgttttgatgtttaaaccagtagttttacaatgtttcagctagtgtactcatgatgtttcactatatacggatcaaatgttgcagtgaattttgatattatggaacacgccgttgcaacaaatcacccacatattttggaaaccctttattaagggaatttggtttatttttttgttccacaaaaaatgtttcatctagtgcattcataatgtttcactatgtatagatctaatgttgcagtgaactgaaatactccattgcaacaaatcacccacatattttggaaaccctctattaagggaatttggtttattttttgttccaccaaaaatgtttcacctaatgtactcacaatgtttcactatgtatagatctaatgttgtagtgaactgaaacattatttcgctatttgctgaaacattatttttatataagatgaaacaacgcccgatttaaacgattgaaggggattttctatctacttactgaaacaatttcgatatatttggtggaacatcgtgcaacattttaaaaaaaatcaataataagctaaaaaaattttcgtcggaatatatccatgtggggtcttgttttgaagatttagttgcaacaaatttaatggtacaatcggattatgatttggataaataatttaaaagaaaaaatcaatttaaaatagttttgcacgtaaatcggacgctgacgttagcgcccgatttccccatctccccttcggacaaccgacgtagtcgcgtcccggatattgtactgtggattgaatggtgcacacgattaatacacctacgtactgtgcacaatccactatatccatcacagatcacagggttggttcccatcggtaaaaatggctcccattaaaaagtgtaaatttagctcatgcgcatcgcacacttgggttatatttgccataaccgtccaaattaactattcagttaatggacactacattattgcgtatatttgataactaatcaaagctgtatttatggtgcaattgcatggatctagactataattgtttcaaagtaaatttggatttaaatataaaatataattctcttaaatccattccgagcatatatacatttagttattattgtgctccaatatatactcaatcggtctacactgcatatcctaacctaaccacagagtgtgcaaaagttcgtgtgcgtgcaggacgttttggggtaggtgggggaaggccaaagtccgccgccttgacccacaaatattttctatttcgtacctttgtattttaatattgtacatatataagtttcctatacctgtatttaatttcgaccaaatatcgtacattacaatatgggagatttacaatatatatttagttttcagtgaaaagtatatctctatatgcgtgcaactgatatagaacaagagatagaaaaatgatattaagaagttcttttagtaatagtgaaataataaagtccggacaatgataataaaaatgattataattaaactatatcttgaaccttaggtaatgagtgggaattgatattgccgtattattttgaagtgtgtattattcttacatttatcaagtacaatgagtagcagccagtttttccacaaaaggatgcatggtatataatgcggtctcttgttgtacccaacacataatcccccacccacccgaaaaaaacaaatgtaaacaaactacagtagaatatctatatattcatgtatttattggtgagtcacatggacgtcctttttaaaatattgaaaaaaaaaccgtccagaaatatactcttagtcatagtgacaaccaagctctcctgtggtatatcgaagaacagaaccaacttgtgtcctcattcctcaaaaaaaaaagaaatcaggaactagatcaccgacggacgaacacaattccatacccatcacgagctcgtgacattgacttgacaatatgaaatgaactgctacagtacattctgctttgcaattaatttcttacaagtgactgtgaatgatctaaacacaggagagagtaaagagaaacaaagcaaaaaggaaaaaaaaacttgatatattggcagaagaactatacggatcatatgaccagagtactagagagtgcagatccctggaacgccggcgtgactccgtcgcgacgtaccggagatgtccgccaccttgcaattgctgccgatcgattaccataggaaccataggctcgcgaacgcagcacacgccgtgaacagacgtacggcgcggctcccgtgcgacgacggtgcgctcgacggcatgaacccggggtcctgcgggtacagaggccctctgccggactgcgcgcccccgccgaactggacgtacgccgctggcggcggcgggcagtatgacccggggtaatacgccggaggcggagggctgtagtagtagtacggcggtggtggggggagcgccggcgggggcggcgacgggtacagcaccgggcagtcagcgccgccgcacggcgagcacccaccgcacttgacctctccctcgatcgccgcggccgccgccgtcgacgccgcgacggcaaggatcgccagcacgagcaccggcgccggacgccgcatcatgtcgccggtgatcgactcgggtagctaggctagcacgctacgttatgttacgagaaagccggtctgcctacctagctaaggtaacaagaagagaagtgccctacggtatggccgggcgtgcagcctgctgccccttttatgatgcgcccacaactcaccaagtatatcttctagagtcatagtacgcattatttggaggaatattaggtgggggttcgttacaaaaaaacagcggccagtaagcagtagaacccaaaagggatatgcataattgtagtgctggtggcagtggccatcgaggggaggagtagctgggccgggacagtgtgtggcttcctgaggccggcaccaccaccacgcacggcacgttccagcgtggctcgaaagcgacgaccatgtggcggcgcctaaatcggtgggccacatgcgcgagctatgaggctatctactacgacgactactatctattacgacgactactatagtcgtgctgcattatgggcgggcaaaccgaccgatcggagctcggtttggtgcgcgcccgggccggtgaatgcgtccgggagggagcaccgacgcggctggtgcgggccgttacatgtgcgtgtgcgtgcctgtccgggccaagttgcggtaggagtattctttattccgcgcggcagcgcgacgcgtccaggggagggagtgggcaacgtgagttcatcattggggtggaggatcgtggagctgggagtagcttcaagctgggttcacctgcgtctgcgtgtgacgaagttttattaatgaagtgggaattcagaagcttccgatctggtctccgattcgtccttttgcgtgagccatgtgactgaatgcccctgatcctgccttgggaatggattgatttttcccgtgcatttcggtgtgtgcgaggtccccacatgcaactgaataagtcctacctccatattttaatgtataacgccgttaacttttcgtctaacgtttgaccattcgtcttatttaaaatatttataaaattattatttattttattatgacttgattcgtcatcaaatgttctttaagcataacataaatattttcatatttacataaaaaatttgaataaatcgaatggttaaacggtggttgaaaagtcaacagtattatacattataatacggagagattacatccgttcttttactatacacaggttagttgcacatactcgcgtgaatcctctgcgcactgcaggtgtccgtctgtatgatcactttttttttattttgaagtggtctgtatgatcactttgattacccgcactgactactggttatgtttgggtttgttaactacacgtttaccgcttaacatggaaaaaatatttgaccactactgccaagtgaccatctttgactctttatctccaacggttctttcattctttcttgtcaccttttccgcggtgttctgtacggagatgaattctaataactcgagtgcacatccacccgtttatccatccgtttattgtatgtcaattagatggttacaaaaaattttaaaaaaaattgacaagatcgatcaatatgtatctccacaaacatacaagttcaaattcaacttctataagttgtaataaaaataacaaatttaattataaatattcatatagtaatttcagttttgtttgttatttttgttacaatttgtagaagttgaattttaacttgcatgtttggggattgatatattaatattgatctatcttattcatattttttttattttttttcataactacttgcatgacatgcaataaacgggtagacgtccactcgagctgttaaaatagtttcccggctataccctttttcttcaaccaggagtagtaacatacgtaggggcaaaactagaataggaattaccctgtgtcccatttaatatcacacacttaatactccaattacgtgtgccatgaaaaaacatgctttggtgaaaattttatggacctgtgtggctgtgtcccatgcactacggaagcgtaatgtttttaggggaaaaaaatatcgcgcttccgtagtgcaatgtggcttcgctctggcagccacagacctacataattagtaatatatcattgtcggtgatatgggaccgggaatatcatgactagaggcttgaggcagacacaatcgcccacggggcctggcaccttcggggacgtcgggcccgagggtgaggtgtccgccctcctcctgattccccccaagggggggtcgggttgcgcttgccccggccccgagggccggggcaccccgaccccctttaggaagtctgcgccacatatatgggataagtgagcacagctgtgctcacctaacagcatttaatgcagtctggtcaggcgtgtcacgctgcatgcagcgcagtacggcgcgttcctttatccggtctgtgaccagtcacagaccggtcagatcacgggttaggtggcgacaggcggtcagacgcacgcttcgccccatcctgtcaagacgagagcttctaggcactcgtccccggctggagctagcgtgttacatcccagagatgacacgctagccccgatc

SEQ ID NO: 425 - DNA, 5302 bp, Oryza sativa
  unsure (1)..(5302): unsure at all n locations
gccagccgagtcccgccgccgctttctcccgccaccgaagcagcagcaacaagcgcctccacctccctcctcttcatcctcagccgtagccagcaccgccacctcccttctctccctccccagcagccgccactgacgccctcctctctctccctccgcacggcaagatacggtgttcgtggtcaacgccggcggtcaggtggtcgtcggcaaccggggcaggcggccagcagaacgcacgggcatggcgggcggcggcggccgtggcaggcggcagcgtcctttctttctttttttttgataatttgttattcatctgagatgtataatttctttttttagaatttgcgatcaattgtatggatctgagatgtatttgatttgtgtgtaatttttttaggttttgtgatgtatttgatttgtgtgtataagtaacttaggatttgtgatgtgaataatttgggatgttactttgatttggggatttggggtttgatttgaggatatgcatggtacttgattggggagaaaatacagagctctgtcaattagcaaagaaacaatgaaaaaaaaagaaaaggggaccancggggcccgcccctaccctctctttagtcccggttggtaacactgaagattcaactttactctcggttattccactctagactaaagataggcatctttagtcccggattcgtagttccggtaaacaaagggttcccaaccgagagtaaaaacagttaccccggtagtgtttttacaaatattaattcatactaaacaatctataacgataactaatatgggggactgaggctgtaacatgtaacgtctgtacgcaacggaggcggcttgcttacttcacgttggtgcttgtacactacaaatgtgccacctctctgttggttgcagctagccttcgcggtggggccaacgttggctttttcatcagcgctgaactactggtccaggtcaaacagaggtgccattgtcgatgatacaggcatggcattttcttctagtaataatagtagtactacattaagattaaaatggtactctctccgttttagaatatttgacaccgttgattttttagcacatgtttgaccgttcgtcttattcaaaaaatttgtaaaatatgtaaaactatatgtgtacatgaaagtacatttaacaatgaatcaaatgatatgaaaagaataaataattacttaaatttttttaataagacgaatggtcaaacacgtactaaaaagtcaacggtgtcaaacattttaaaacgcagcgagtacccagctctttttcttactttcagtaccagcatgcctgtgaagaaaacagctgaacatcactagttttaggaactgtatgaccatcgctgctttacattagtgtgacgcaatcttgtgaagtcatcgatgctagctgctagtatagctggcttgggcgttcaattgtcgtgtaagctaatagcatgttctttccttcaattctagacttcaacgttagcatattttttaaaggttaattagtgcatcttttgtaaaaaaaaataatatataaacttttataaaaaatcaaataaatatatttttttaatttacaatagttaatatataattatttatgtgctaataagctttcttattttaagtatgctgaaaatgtctcccaaacctagcggaacaaacgtaaccaataccacgagcttaaaattgtttttttaataatgcatagtgcctttttgggtggcctcaattttgcatgctagctcttaataatttttgtttagttcctatatttttttttcaattcacgtggaaatcctaaatttacaccctaatatctcataagaactataaatttccttccccgccctattccccacacactctccttgtcttcggctctcccccgcatttgcgacaacgtcagcctctcctgatagtctcccctctcctttgcctatattggtgacgagcttcgctacatctatatttttacaataatttgattaaacgatatgctgttttataaaatagtaaagtccatcaccggtccctaaacttataccgttgtgtcatcccggtccataaactcgcaaatcgaccgttcaggtcctcaaacttgttcgactatgtcatcccggtccctaaacttacagaccactcgtttaggtcttctatcttgcccagttgtgtcactccggtccctaaacaggaaggcctaaaaactttatatcaaaaaataattcataactttttcatgtgaactctaatgaagacaaagtttatatcaaaattgtagccctcgacgtgacctacaactttgtagttgaaaagttttggaattaaaactgtttagggtcccaaaatattgttgcatgtttatagattttgaaattttaattttaaaattacattttgggacaaaaaatgacttagaataaaaaaaattcaactgcaaagttatagatcacgtcgagggctacaagcttgatataaagtttgtcttcattagaattcacatgaaaaagttatgaattatttttaaatataaagtctttagaccgtcttatttcacccagatgatattcaaatccaagtttagggactgaggtgacacaactgaacaagttggaggacctaaatgagtgatctacaagtttagggaccgggatgacacagtcgaacaagtttgaaaacctgaacggtcgatttgcgagtttagggaccgggatgacacagcggtacaagtttagagaccggtgatagactttactctttataaaatttactccctccatcccaaggcaaatttcagccgtctcacacatataaaataaaagtaaaaaaaaagaagacgatcatcactttacactgctagagaaaaggtttttaaccctggtttgtaacccctgtagtcccggttatacaactgggactacgaatttaggactaaatatacccatctttagtcctagttgaaataaccaggattaaaaatctatttttagtctcggttggtgttaccaatcaggactaaagatggagccaagccaggatggtaggttttttttcctttttcattgtttttaacattgaatattgatttcactatatccccaaatcgtgaaatctccaaatcgatcaacacagaacaaaaggatcatctccaaatccccaaatacatcacaaattctaataaaaaaatcacaaatacatcacatattcacatcacacacagatcaaatacatgacaaattctcaaaaacaaattcatcacaaatccttaaaaatacaaatcttcctccgatccggtcgccgccacccgtccgccgcggcctccctagaccaaccgccgaccccgcccgacggctgccgctgcatctcccgcagccaaccccgccagggagggcgcgcgcagtccgccgccgccacgcgcaggcagccacctcaccagcccggccgcgccgctgtttgccctgcaccgtgccgctgccggccttgtctcatgcgaggggagggggaggacgggtgtggtggtggagggggagaaggggatcgagctagcgctggtgggagagggaggcgaggagtcgtgggtggataagatgaggagatgataagaaggagagagagcatgaggagaggataagaaggaaagagtatgaataggaagatgaggcgcttggaggataagtcctatggataccgatgtttagtagagcatgaggagaggataagaaggagaaagcaagaataggaagatgaggcgtttgggaggataagtctggtggattatatatggtataccgatttttagttccagagttcccggccccttgacagcctctaagagtaaatgatctgggactacaccaaccaggactaaagatcatctaaggccaatagagtcttaaaccggaataaaaaagccatctttagtcccggtttctattcaaaccagaactattgtggtttttggccaactcagtaagaatgatttctccaatagtgtcatcaaatcctaatgcaattattgtatttttatttttatttacttaacttttacaaacttagatgtaataataactgaaaaataaaattattttaggataaaccggatggaggagtactgcaggaaacgcaactccactgcacctttttcttaaacctcagcatcatcgagtggcccaaggcttgcattgcacgcggacctacatggaccggccggaaagtcaggcctacggcggcgtagctgtggcactgctagtagttactgctagtgcatgcactgacctagcgcctgggcgagtggccgtggtcggctcccgccgggtgactgctggtgcgtgccccgctcccgcttgcatgtattctcgcgcgatgccgctgctgctgctgcagtacgtttgcgggtgcctttacggtttttctacgtacctggctgcccatggtggcctggccgggaagtggccactccgacccatggccatggccatggctgtttgctgcatgcatcccctcctgcgcgcgctgctgcgtgctgtgctgcagcggccttccatgctgcttgttgctttcgtcggccggccggtctgctacctgcatgaagtgctatctcactgcttgaacaataatgcacgcctgtctgcagtgcctcctcctcctgcttcagctgctgctgctgggcgagcgtacaccacagccacatccacatgcaggcatgcgcttgcctccccacttgattgaatgccccggcctgcatctgcatgcatatatcttctgatgtaaccggtcactcacgtccgtccttgtcgcccctcccgtccctcgttactctagctctctcccttcgtctttctctctctctttctatttcatcctgtccataattaataaggacttctgtcgtctatgcatgactgatgctgaacatgaccggtcttgctcttttccgttggactcttggtcaacaagcatgtttgcttgccccgcccaaaaaaaaaagaagaaaaaactaaaaaaaaactgttctttcttttttttgttcagaaaaggaagtggaagaaatgaaccatactggatggctcttttaggaaattttaacaaatgttggccaaaggaggtacatgctttgcttttttataatttatagaagatactattgatgattttggcgagatactgtacagaggacaaatcgtccgtactgtacactgtagtacagcttgttgtaaagaacagaatcagatgtacatttgcacaacggaatcaatacaaatccgatctat

SEQ ID NO: 426 - DNA, 1361 bp, Oryza sativa
gtttgatgaattctgaaacagctggaaagcaagtttgctggcaaggtagtatagggatattccacccgggctagagcatcgcattcgcatatatcggcgctagacgccttcaccatcgtagcgtgacaccagcaaattccgcagccagcagccagcagccagcagatccgcagaagtccccaatccgtccaagctccaacaacgctggggagtgtggccccgcctggcccccaccagctccaccaaccgaggcacacgctgcggctgcgcgagcagggcccaggtgacggccgcccgcacgcacacgacacgacaccaacgacgcgacgcttcccctttcccccctcatcagccgtttgcctccaccccccacccactccacagtccccgctctccccccattgccgccgccgcctgcgacgaccgcgagctcatcccgagacgacgtctctagctagcatcgagcgttctttctctcctcgggctctcgttggtaagccctcgattccggtttcctcctgcttctcctcctacctgcccctcggattagtcgccagtgttgttcgctcgtctagttgcttgcagtaattatagtgctaagctccggttgtccgtcggcaatacgccggtagtccatgcaccagtctcgttttcatgggttttgttgtttgcagcaggcatacccctgtttcgctagctcaatcaatcatttcattgctactattttttttgttttactttgtatttaacgagtattgcatctatgaaacaaacttcacacaaatttgatgctcatcaggttcttagttccaccttcttttgtgttttttttgttcagttgagataaggcaaatcaagagagcaaaattttggtggtacatgtggtgattctatgtcgacaaggcgtcatcttgcagtatttaccactgcaagcctcccatggatgacaggaacggccatcaacccgttgttccgggcggcctatcttgcaaaggatggggatagggaggtcaccttggtaatcccctggctttctctgagggaccaagaattggtttacccgaataagattgtgttcggttcgcctttggagcatgaggcctatgttcgtcgctggattgaggagaggatcagtttcagaccttccttcagcatcaaattctaccctgcgaaggtacattgatatattaacgcaaagagttcattaaccatttaaccctggaattctctattctttgtgagattttcttttaggtggttctgtcacttgatatatcaagctctctatactttggggattttcttttaagtacattgatttatcaagttctctacaatactattggcttctattttacttg

SEQ ID NO: 427 - DNA, 2110 bp, Oryza sativa
caggcgtctctgcctcaacggacaacagggtggtatgcacttttccaacccaggcgtccaaccgctcgcgcaacgccttcacctgtggaattccaagtactctaggctggacccatgacacgtgaactgtgctgtccacctcatcaattatcccctctataagatgaacctgcaaaatgggggaatcattaataattctctcatattccaatttacttttaaattgtatggcaattgatggcctcatggaaatacagcacccaggctccattagcaactaaatagaaaacatcagcatggagcttttgtaagaagctgatagcagtggcattctatcttggctacctatatattctgcctttcaggggcagcattattatatactataatgtactaactgatgtagaaaagaactgtaatggaagaaaaagatgagaacatcaactaggaatactagttgatacattgtgcaaacactgaagccgtataaggtaaaagcaatagtagcatgtaacaaggagagacacaggtttgctgtgatcaacaaacacaaatatatgaatcacatgtctagtttaactgacaacgcacacccataactcacaactaaagattcacaaaacaaaccatcagcaattaaaaaaaaagacaagttcacaaaggggaggaattgaaggcagtaattatcaaataatcactatccatatacagctgccacattaaaatgacagaagcattagaagcattctaatgtctaatcttaaaaaacaatttatgcacaacaaaactagatgtttatgaatggcattcatgcattgtctatcccaacaatgaattaacatgatattggcatattgcaaataatatcttatgaaagatcgaatgtaagaaatgcaattaccgagaggctcttcataagaagatattccacatcactgatagaaagcttagtgcgctcggctataacacttaatgggatagttctgtcttctgacgcccggctacaacatgaaaaagaacacagggcttagaaggaataaaggaaaaggggcaagacatttgtggtggcatagaaaagcaagtagcaaagttgtacctaaagattatctccatcagacatagaatgttgatcttctctagcagtttccgttcattctgcaccaaagctggctgagcactgagagcagcattgtggaccctacatagttcttggtagagagctaggttgccggtgttgaatgcttgtaacatatgatagacccactccaccttggttccaataagactgttgatctaaggatataaaaatataaacaacttcagacagagatgtaccaaatgacaaccatatatgccgatatatagatttaggggccattcaatatttcaatcccataaaggctaccttgtgtctggaatttttttgtttggtatccacaagtcaatattgatttttccatgcacaaaaaagatggtttgccattaattcatgcaaacttaagtttatgctatttcaattcaagaaaatacgaagtttacataattataatatagtggttcacaattacatcattcaacattcagcaaaaaaggatcaggcataggatatttcatcattttgatatgctttacacaatcggtagcattttattgtgtcaatgttaactgcatacattcaactcatgaaatttctgctaccgatttggcaatagatgtaagttactgtgtacaaaactccgaaacttaactaccataacatacacaggtaccttggacgccttgcagttctagcaagcatcagataaaaacaactaataaataattatcagaactggcagttgtgagtaccaagaaaagccacatgtaatgtttatataggcaagcagagttaattttaatcaagcaatcaagaaacacaaaaaagtatggataaaacaaaggtggtactactaactagtggcaacaaaagaaatcatgcgtaagcaaagtccaacttacaatcgggtgagctaacaattccccaaagttgtagatgttatcaccaagcaaggctgcaagggagagatcaaatgccaaatcctgacacaagacagcatcaaagggtaaacat

SEQ ID NO: 428 - DNA, 37710 bp, Oryza sativa
aaaattcataaatttttcaaataatacagacggttaaattttagacacacaaatataaaaattaatttattttgagacggatgtagtagaaagtaaggaacatttggtacttctagttacttttgacatgctgttatttttttattataaaaacattaactacttagtatccgtactaccgtataaataaaagtaaatttatttcaaggcaaagggagaatcttctatgggtctatgacgtgtattatttagcctcttgttttttgcttgatggcttatgaagggtagctaaaataggttatctataaattattcttttttattcattcattctattaaaacttattgggatagtagtaaaggagtatgttatttgtgcatgtggtaagtaatagatttatttgtggattgacattcaattgaaatttacataaaattttccaatattagaatttgtggtatgtttatttcaagttcgtaatatgagtaatatttggctagtgatattatggtcatttaaagagtggaatcaatatttcatctttcaaaaaaaaaggtataaatacagagatatgtaattaatgcatgtgactatgacctcatgaatgagcagaaagtaaaagagaaatagtatgcttgagatgaattttccaaatgtagtgtttagtagtttccatatgatggtgagattaataatattaatatccacaccaacaaaaatctagaacatgaggtctagtaccaaatagtcaaaagtcattatcggaatatgaaaaatgtgtaattatcatcgacttccttatccgttggaaaatgacgttgtctctcctacttgccagctttctttggatcagattatcctagaaggaaacaaaatatagaggcaatctatcatttattctgatgatgttctatgcatggaccaaacacgcatgcctaaatatttttgcaggtaataggaggaccattccacatgaggaacttgaggtaggagtgttcttttctatcaaagacgatgtggaccagtgaaagcgttgcaaactttaagctaaactagaattttctccaatgatatgttgtcaatttcacttactagtaatatcgtctctagtatctaattttgttcgctggcatcggttggatggagctttggtgaatgctgtaaacttactatttcttttctatctttgattttttttaaaaaaaaaacaaagcaaagctccttcttccatttcaaatatgtaattttgcaggtcaactcccccaagtgcttatttgcaatatatgtcaaattttctcaaatagtcttgatgatatttcacattgactattgagtactcagtcttacagatagccacaaaacgttgaatggagatgcttgcttacacaggatcctatccatttggtgtggagtacgttttggcattttcggcttcaccgcgtccctaccaaaccaaaccaaagcagctgatcatttcacagcttgaccgttgaaaactatggaaaagtttattttaagtgcgcataaaccatagtggagaaaataacctaatagaaatagacaagtagctgtacaaattagtgggtccatgaatgttaatttctacgaaattgccgtcgccttcttgttgaaggcttgatctaccgtattgtcttggtctaaaaggtttgatccaacagaaacttctacaggtatcagcttaccgtacttgatgttgcaaagctatcatccactttttccgtaatcctaaacccttaccttttctggtcatcttaagtgctaatccaaagtaatttttctggtcatctagtaatccgtaatataagctcatacaattctaacttaattaacgcatgcttcacatatcatcatctgaacatatcagcatatcattaccagttcatcaaagtcaccaccggcccatgcctgactttttgaccgggattaatttatcaccacgtttatttgtttgtgatccacagttccgaaatgctggaggtacatacttaggataagattgtttttacctgctttggataattattcatgtaaaaataaactctcagattaattaaggtccttaagctccaactaatccgtgttcattttctcaggtagtcactctctccccccagtgtaaaaggcggtttttttcttgggattcccgtgggctgaagaagccagcaaaaccatttctctgtcaatcctgcgtgcaatgctttccagcaaacttaaaaaagcttttttttaggcgattaaataagggtaaataaagtacgtgtgctgctaacaaatgtcatgcaagattggattagattaggcacgcctggaggtgtcgtttcgtgctgggccttttgactccttgccctcctatagtcctatttgcttgcagctggtagtccactagagtagtgagatatttttttcatggccaagcaagcaatgttgttgtcgtgtgatcatgttagtcaaattgcagacgtgtgcatacatgcaacatatcaccaatcattcagaaactttaagttctactctctctctattccagtttaatcatcctctaaataaataataccaaaactaaggacactaaaatgtatatcattcttaaattaatcctcatcggttaaggtgcttttactacagtactatagtattttttttcctttttcttttacttcatcaaaacatctctgttttcgccttgcagccttgagagtttttgagtccctgatttgttctgcttgttgctggtgactgctgagcaatttggtgcaatacactgaatctgatatccgacattgaatccagaaagcatgcgtgcaacttgctctggctggctaggcatgggcgtctgtgttatccgtgcccggtttgcgatctgtgtgtgtccctctgcatgcgacgaaacggcacgcatgttggtttgcatctatcagacattcagacatagaggagaatctttcgtacaagaatggtggtgcccatgcgtgcgaccgtgcggaagctgcaacagcccgtgacacacgcacacccccacgcctcgtcgacgacagcatctcagtattggaatcgtacagtaaaacaatcttaatacatacaagtggcagccaatctgataatacactaaacctttttttgatctttgttactactgtaacaaggagcagaggtcatcttctccttaccgtgccggcccataaaatttatggcctgggcctggaaagaccatggcaggtgttgggctggtgtcgcttgcaatgggcccgaaacgaacgtgagcccattgggctggcaccgatcgagagcttcgcgatccatcgactgcacagcaggccggtgtccagttcccgtgcgatctcctcaatccggcccgttcccgatgcccatggccgtctgctgcttctgcctccgtgaggcctctaatcacgaatggaagtagatcatgatcatgcataggaataagttcacttgatgaccctcaaaagtgatcggaatctaatccatgaccctaaatcgcaaaaccggatatctcgaccctcaaactattaaaaccggtgcaattttactcccttggcggttttggagtgcggtttcgctgacgtggcggtattgacctaatctgtgtgctgacgtggcgcttacatggcatttcaattaaaaagatacacgtggataggaaggatagctatactaatttggtatactcaaaatacacctttggtacaaaattgacaatctcacaaggatgaaatatcagtaattttctatttactggttgatcccatcttttacggaatcaattccttttttgaatgtacaaaaatttggggagctcagcatgtctggaagcacgggagaacgttcttttgctgatattattaccagtattcgatactgggttattcatagcattactataccttccctattcattgcgggttggttatttgtcagtacgggtttagcttatgacgtgtttggaagtcctcggccaaacgagtatttcacagaaagccgacaaggaattccgttaataaccgaccgttttgattctttagaacaactcgatgaatttagtagatccttttaggaggccctcaatgaccatagatcgaacctatcctatttttacagtgcgatggctggctgttcacggactagctgtacctactgtttttttcttgggatcaatatcagcaatgcagttcatccaacgataaaccaaattccaactatagaactatgacacaatcaaacccgaatgaacaaaatgttgaattgaatcgtaccagtctatactggggtttattactcatttttgtacttgctgttttattttccaattacttcttcaattgagagaaagaaagagagtagtaagaattctcttatccccatttggaaggataccatccttataactatccatgactgtttttgtctctagcatgaccacttgataaaatgtggaggaaagtaggggaaatggccgatactactggaagaattcctctttggctgataggtactgtaaccggtattgctgtgattggtttaataggtgttttcttttacggttcatattctggattgggttcatctctatagtaattggagggaccaggttgtaaacatgaaaaaataggaacttagcgggtccttacccccttttatctgattagagcggaaaggacccgcggaattcttactcttataacccgacttttttaatctattccataacctacaaacgggtttcctattttgatttgtaaaaataacaaagagaaagcctttgctctgatggtcagaatccctctatttattcgttttgtttgttaattttgtttgttaataatgttagtgaagtaatccatcagttgatttataaccccctcgccaatgaaattaattcacttttatgaagcgaggagaaagaaaggatcaatcgaggatccaatattttattccccggaggaagtctcttgtaaatcattgatttaatttagagtaataaactaataaaaccttaattaaaactactcaactagcctaaaaataaaaaacagccttcaatggaagagtatccgttttttttgcaaaatttctgtaagttctaaattgaacttaattgaacaagtcaagcaattctatttggtcacaaaaaatttgtcccacgccatattttctttccctctttttgtccactacatcgcctgaacctaagcaaaagaggttcaagagacagacccaaataaagaagaaatagtaatctttgccgaataggaagaaaaaagattcatatttcgatacaagaagaatcgacacaagaaaaaggcaaaaaagcctttttcttgtgcccaatagaggattaagaagaccagcaatccctcctaaaaggatttgttccttttattgttctcgcccttgccttgcattctcctcgttttgcatgagatgatagaaataaggaattgcagacaagacatctcgcaaacaaaaaatagtctaaacaaaaaaaagatttccaaaatggatcatagagaattctagcaatcgccaataaatcgcggctttttaccaacttgatggtaagaaatcccgggacctagaaattcatttcgtacaattgaaccttttcaaactgtttctttttgagaaccaaaaaaacttgtgccaaaataacggatgcgaagaagaacaaaaggccttgaacgcgtaatggatcctgaagcactatttctgcatccccctgaccaaaccctcccacattaggattacttgttaatggttgatcaagcttgatcgattccccctctgaaacaagaagttctggaccgggaggtataagatcaatcacttggcgtccatccgatgcatcgactatggatatttcatatccccccttttctttacgcagtatttttcttactacacctgttgacgttgcattatagaccgtattgttactcttgctaccatcaggatagatctgtccccttcctcggtttccccccacatatatgggatattttaagaaatgaacgtctttcttcatagcagggtcgggggaaagaatgggaaagacgatttcactatatttcttaccgggaacagggcctatcacaagaatattttttttattgggacgataactctgaaaagagagatttcctatcttttctttcaactcaggagaaatacggtcgggcggcgctaattcgaatccctcgggcaaaataagaacagcacccacattcaaccctccctttttcccattagcaagaacttgtttcagttgcatatcataaggaattcgaagaactgcttcaaatacagtatcgggaagcactgcttggggaacttcaatatccacaggcttattcgctaaatggcaattggcacatacaattcgtccagttgcttctcgtgggttttcataaccttgctgcgcaaaaatgggatatgcatttgaaatagatgtccgagttattacgtatatcatgatcgatacagaaatcgatcgagtcatctgttcctttacccaagaaaaagtatttctattttccatgtccaatcacagatcccggaatttctacaataaattagataggtagctaagctaatctagttccctatacacgaatctgttgtcattctactgcaacagttgtactggaatgatgaataccttgagcaggtagaaatagaaaaaaagaattttgctaaaatggaaaaaggctttctttctaaaggaaaaaggatgctaattttgattaatatcaggagatcaaatgagtttatgcttcactaattgaatgataaatgactacaagcgaaggagataggcggtttaaacaaaaaaagacccaaaatttcaaacatgtatctagaatcacaggaaaactacaaacaaaaatagtgaaaattagctcgttaggaacccatccaagatcgttatagacccaacgaattagtagttcccaaccgcgggtggagtgaaatccaacaaaaaaatcagtaactaaaagaataaaaaaagcttttactgagtcatttaagttatagaagaattcctgaacccaagaattcaaaataacaagttcctctttacccagaaaaaaagaaccacttagaatagccaaacagattatatttgtcgagaaatgcaaaatgatatggagatgaccctcattatctattttggccaattgtattatttccttgcgtatttgtggatcccactgacatgtgggccccacatgccatcttatccgtttcttcttcctcccctccccccttctctattctctccctctcccctacagccgttcgcggggagcgagcggaggcgggcgggggctgaagcagcggcggacggcgggagctgaagcggcggcggcggaggtaggttggagtccatgtcgtgccgctgccaccaccacccgcaccacccgacggccggcatcgagatgtcgtcggcggccgagctcccctctgcgggtgtcgcggcggctggcggagactgcggcgagcggcggcggctgcacggagtcccgagcggcggaggcgcaggtgtggagcggcggcctgcgagcggcgcgacggagacgcgggtgtggcggcggcgacctgcaggtcgagcagggcgcggccgagctcgccgtaccccgccgcgtgtgcctcccgccgccgccgctgtggtctcctccatcttcgccgtggtggagctcagcccgggcaccgccgccgcccgcaggcgatcagctacaccgtccgctccgaccgcctgacgcgctcgcgctgctcctcttctcgcagcagatataccccatggtgaacgaagacgcgcagtacggcgacgagctccgggccgtgtgcccgccggatgcggaggagacggcgtgggtgcacctggaccacggcacgccgggggagctcgacagccagtgctacgtacaggaacgtgctcgccgggaaggtgctggctattcaactcggatcactgggcactgatcagcgaagcggcgacgaggcagatggtcgaggacaacgcggtgaaccagtcagccctttgcttgttggcttgccgcttgatgttagtacacacatgcactgcctgttgctaccgcttgtgcttgctagccgcagtccagccagtcctcatctgtcgccccttgccgattgcctcggcaaccagcaggagaatgctcaacgcagatgcctcccaactcgcgtgtggttgcgtcgttgtcggctggctcagcacgccgaccgcgtccatcggcggcggcggcgcctcccccgcccgcgccgctcctcccgccttcaacgccgccgccgtcgcaagtgcaggagaagccgccgccggatgctgccatcttcgaggggatgccgacgcgagtcgcggtggcgagacgcaagcggcccttacgcgttcgtgggcgcggcgggagaacggcggaggcgggtgcgtcgtggccggcagagagggcgtggagcacagtggtggatagtgcagtcacgaggccgagggtggcgaggacacggccattctcgtggcccgttttcttccttccgacggccaaccttccacggcgggctcgatctccgccgccgccgccgctccggccctcgcccgcatgccgccgtcaccgctccagtgccactcccaggactccgccgccgctggccaccgtcccacactcgcggagagaaagagagaggggagaatatgatttatgtgagccccacatgacagtgggtcccacccatacttttggtgaatgacaaatgggtcccacgtatatatttttatttctaatgccacctaagcgccatgtcaacgccacgtggacagaagaccgagtcaatactgccacgtaagcaccacatcaacaccacgtggacagaagaccgagccaatactgccacataagcgtcacgtcagcgaaaccgccctccaaaaccaccaagggagtcaaattgcaccgtttttaagagttgggggtcgagatatccggttttgtggtttagggtcacagattagatttcgatcacttttaagggtcacaaagtaaacttattcctcatgcatatactcttcagagattttgatccaaaagaaacatatgatccatgacaccatccatccacaaacacagaagcagttttccccagtccatcgtaagcaatcctggggttttaatttacatcttcctcaaatccgagctgttctagtttctacaagagggagcttgctagtaggcatggttggagaggatggccctcccatggcggtgcgggtggtgagcgcaggcgcagtggacggaggtgaggctgaggcatccgctgatgatgagggagtgccgctccgggcacgtgtggagcgccgggaaggagtcgcacaccgcctggaccgccggcggcgtcagcgccgtgcactggctgatgttcaggctggccagcccgtcggcgccggcgccggcgttcttcctcgccgccgcgtcccagctccggcctttgctcctcacccgccggctgttcgccgccagcgagtacattgcccggtcggtgatgttctggcagtagtagagccccagcgaccgcaggtgagggcagccattggcaagagcgaccacgctctcatctgcagatcaagaaattgatcagataccattttgtcaggcttcgtacagtttagagtaaatcagcatgtcaaagcaaatgttattcaaaattcaaactgaacaattttaacattctgtgaccctaccaaaattttggtaactttaatagtaaacatgctagtttagattgaagccaaacaattagtagtgcccacgctcactttggctacattctataatcttcttcactctcatactaaattttagctttatattggtattaaaccaaacatagattagctaactttgccctaccaaaaaattgatagtgccaaaatttacctagattttggtactaccaattaattggtagtgtagagaaccaaataggccctctgatcaaggaaaaaaaaacatcggagattacctgttatcagaacacagccacacaagtccagagcccgaagttcagggcaccctgatgccaagctggtcactcccttgtcagttacactatcacaccagcctaggttcaaagactgaagctgaccacagttacaggcgatggcctgcatcaaggttataaagatcagaaagaattcgatggagagcaatggcgcaactactttggtacctgcaatgctctgtcggaaactgccctcacacacccgcacagattcaggcatttcaggttcttgcactggctactgagataggccaaagcagcatcgctgaaattggaacatccactgatgttgagccttgtaagatgggggcatccatgtgccagagcatacaacgatcggtcgctaagcctaaagcttctgctaagatccaactcgcgtaaatcatgacagttatttgctacagcctccactgcactgtcctcgagctgaggtttgatttgccgtaaagaaagaacttgcagcttcgtaaatttctgagcaagtgacatcactaagtcattcatgtgagcctggcacctgaaaacaacactctccatggttaaccaacagccttattgtccacagatgcaatcaaaattttgttcagaatgacgaggttttgcagtcactaaacaatatgtctgaataaagcatactcctaaaccatattgccaatacaaagttatctgatcatgcttcttaaactctcgtatgactgtcttagtatcaaaagtttcaatcaaacaagcatttgcaccaccttgcaaaaaactagtaacacaacaaatgatgtttatgactcaatgtgaccacaaacaatactcttctcaattggtggcgcgagcaaacagatgaggcagaaaagttgcaacagaaaggactacgttcagttttcttgaccacgctttgggagatttggacggaaagaaacaatcgcattttcagagggaaggagtctacaccatcagctcttgctggcaagatcatagatgagctttatttgtgggaaatggtaggtgccaagggagtgaagtgtattatgttaagagattaggcttttgttttttctcaggagtgcaggcaggaagagttccttcacgaatgcctctcctcttctgttctgtacagtttttgtgttctctaacttcttctataatataaaaccagttcgctgggttctttcaaaaaagatgtttatgactcaatagaaaacattggaacaagccagtcagaatatttttgtcagacatcataagtggcaaacaggcaagtttctataaacactacaaaattaaaatccggagtttctttagctataaaagcatccaatttaaaagttacataactattttgtggatattatcacataacaattcttctatgtctgtaatattcaacatgtcaatactatgtgagccatctacccataaaaggtcagatagagacgacacgaagaatctaaatgtttcgtgagaatcatattcaggaatgggaggagaaggcaaattgccaaactcaccacgaaagagaaagattcgtgactccccattctaatgtatcacgccaaccggtgcaaacaccagagcccacgattaccatcctgtcgtctccagccatcgataatatccgcaggagcagctccatgggaaggtccttccaacctaacaaggtagtccctgtgccctcatgatgtgcctgtccactctcaccctctccagaaaccatgagtgcgttgaacgaattgtccaattcaccactcatcagctgctcaccgtccattctttttttttttttggataatctgaagctccgaatacagctaacctgcaagcaacagtgaagttatcagggactctgcactgatgtcaaatcccaatctgaacttgatgctaccagaatatagcaaattaatcccagaaaaactcaacaaaacagatgggagcaatcataaagtcgttttgcaactgaacaactcaaatcttcaaaagaaccgaaatagagctaagaatggagagataattcagaaagagcaaccttactatcaacaattctacaccatctagatgagaatattatcataaaaatctcctagagaaacttatagggaacacacagaaaggtacctcaaaggagctcctaaaaaagcacgtattctctgcaagtggcaatttgagcagaaaccgaacttttttttttcccttttgtataaaaaagggagctccttgtaaaggtcagaaccgcattaaacccaaatgcagatgagacggcaagcaaggaggaggcgaggcgcaagctgcccagcctttgatttggccgaaaaattcaatcccttctgtcgctaaaacaccagaggcgtggccggcaccgcaaatcccaatcaacaagaggcaagtaggcaacaaagctaggctttcagatgattccgggccacgagaagctaatccaggaaaattcaccaagaaaaagctcaaatcatttggaggcgagatgaatgagcgaatgataacggagtcaatctccaacgcagataacatccgttcaagactgatagtgacctggtctaaatatcttcaagaaagggaggaaaaagaagaaaacaactccatcgctaaggatcgcagtagctttcgcgcacagccagccacacaaacaaaacagctcctcccgaaatgcagagtaaagctcaaagattcatacagcatccaagaaaactacatgggatccaaaccacgagagatggcgatctcctcatcagcatctaccacgaatcccagacacaaaggccaagaaatcccgcaaaagaattcacccccataagacgtgaaacttcctttcttactcacctagtcctcgctcctcctccaagaacacgcgaagaaagaagaaactctagatgaggcagtcgataacccgggggagaattttgtttttggtttttgccgcagttgtgaactggcggctgggttgggaggggaggagggctcgggttcttgtaggggaggaggacgccaccggggagggcagcgacccgaggtggcgcgtggcgggtggaaggagaggacacgtgggcggtggcgtcggggggcggggcggttagggccccgggatttttatccccgttgatttgcggatgcggggacgggaaaacgggaggagttcgctgtccggactccaggcctggaagcttttgcccccgggaaggctctggaagggccgaagggagggatcgtacgccttgctctatcaggtcacgatttatttatttattttttaccgggcttggccggtagaaggcccagcagaaattttgtgcttctgcattgttttctccatcttaaaataaacgatcggaatgggatatgatacaacaaattagaatatagggttaattggatctatggctatatccgctaatctgaatttagacataatccggatttattgtattaggcgtcccaatctagattggtttatttggaatagacgtaatgcacactcctgctgtgtaaagattaatttaggtgtgtctatattctatagcactagtacccaataaaaggaaacctgaatagcaagggctagaaattttgaaaaacggttagcatgtggatttttcctcttctgtctactagctcattttcaagcagcgaagctattcgatcaagctgtaaattttggcatgttcgacagcagtggtagcatctgcagtcgcacattatgcatgctgtttataacactattctggctggatacggcgcaaccacaaccctaacagccgaataggccttatgagaaacaactaagcatcggatcttggggcttgatcagattatagccaaaataaaccttaccaagttttggcaatgcaaaaaatttagcaatacatttttggcaagtgataggatttcttatgtattgaccagatttggtaacgaactaaacgtagacatttttttagtaactttgcgaaaaaaatagtagggttgaaaattgaatcagagtgaacatgcacttgataagctaagatatcttagcttctagctactaattcattttcaagtattaaggctatctaattgagtcggaaatattaagaaatagctggtatgtatcgaattgcttctaaattctactaattcattttctgaatcctaccgttgagttttgcatactaaaaaaatgaatatagacttttcggataggcagatattcgagcagctgtgcatttgctagaaacttttcattttacattgccagttttacagaagattagagtagattatccagccagaatgccagatggccgtccagattcaatgaactaaaccaatgaacctacagtacggcatgagaccaatcatgcctccattgattgattgatcgatcccaaaagacaggcgacacaccggcctctgatcagatcaatctttgctcccttagtgggcagtgtcactcaccactctacatgctgatttgtccttgctaatgctctactgctacccactcgcttgtcgatttgcagtcgccatgaacctagccacgaatctagcccaaattggcactcatccccggagctcccaaagcagaaagcacccgacgagcaagagacagaggcaatgtggtgataagatcaacagagatgctttggcagagatcggccacgacgtagatcgatttctagagattaatttattaatagatgggttaaccaaatcgcatggcatcttctcatgcgggttgacgcaagcatgcatggaccccgttaattggcttaatttgtggtcttaatacagaggattactcagtttcagagtttctatgtgttgctcagggcaaaggttggattggatgatccggcaagcaaagtagacgcaacctttaagctataataatggccatagttatctagcctttcagtgtgtgtgatgtttacttggatgtatccttctaaactctgactgaattaccagtttaccacgcaaaggattgttaatttcatgtagagttgagtttattaaaaagaaaaacatctgaccatctcattccatgggctccttggttctgcagaagccatcagttcacaggtctttttcccgacgttgatcagttcacagtaataatcctgtgacttatgtcatctttcagcaagaaaccgcaggcagaaaaggctaaaacctagtcaagtacagtcatcaggaagagcttctccgaatactcgcagacatttcgatatgcttttatccctgaacatattcctgcttatgtgtacagtatgtttagcatttttttttgacgcaatacgcttaacatgacacacatgattcctttcctcatttaatgtacagaactatcaattcagaatatgtgttctttgctaatcccgaacgatggagaagcttggcttttaattatagttgatgtggacgcaaaaatccttgtacctgaattccttgtttctgcagtttttgatcggttgcctacaagctggaacagcaatggcgtctgctgctcatttgcttgctgatttcaacaattggctatgctatgggatatcaagaacagctttgatcaaaacactgtgtgagtcagcatctgacgagttctgatattgatagaggtggctggggtccattagtattagattaatgatgagacctgagtgtaacacaagttccttctaatccttctcttggcagattctctttgaactgttgtatcaagtaaaggaaattggaatggttccttgtcaacattaaagctgtcacaacacgatgcatgagtggagtgctactcatctttttcttgttcagagattcctaagataaaatttgtttcattaaactgacatagtacaactttagcacggtcttctaattaacatagaaaattttgccaatgatgttgtttactcgtaacttgttgtttcattagtaggaaaagcacctttcctcctagtacacaacacctttcagtttcgtaggataacgttatagtattccaggagggaagaacagcaacttttcttgcgcacacatatatgcttttgcaggttcttggcttcttgggtaatactaacattctgccctcatttattttctgaaattgcatcctgggaataggcatccaatcaaaaggcattttattccccctacgaactcaaatcgttgaaacggttcggccgcctaatgatgacccagaatttcagacttcccattcaacagaatgctggttccattgccaacttgtagaggatggaaaaggacggcagacagcaatccacaggtcaattcattccctataagcatgaatctctttttaatcagaagtttttttttttaatttcttctgtaagttagtgattggaatggccccataaactatattctgcagaaacctgttcagctgggatcaaaagcagatgtcagcattttagatggctcatatccttatctgattagtacttattttcacctaaaaacggcaacggatggagaaactgaaggaaaacagctgcctagattgcatatctttatattagcagaaactaaactgctgagttacatatatgctaataaaatggtcacaacatagcacggctcactcttctttcgtactctacagatcacactcttcacctacacagtagccccaaaatttgatgttagtaacacaaaggacaataacatgacaagatgcttttctttcatttacaaagataagacagaactatcagaaagtgaagcgctgattcctcaaacatacagcgttgtatgcatgtgaacagataacgggagagagatggaaaaagaaatcacaacagtggcagagtattattaagggtgaactcaaagcagacgatttctctctgaatactgcttcacttggtaaagtgtgggatgaattgccgggacaaatctctgatgtgttcattttctgactcaataagacgaacaacctctcccatagaaggccgctgttctgggtttatcctgacacaaagatatgcagctcttgctagatgatacagcccatacgtatcgtatgtttctgcaatgcgctcatcaattagttcatgtagtgcaagactctcgaccaaaggttcagcctgaaaattttgaggtgtcagaaatgaatggtgcaggtctactgtaagtaggttgacaaaaacaataagaaggatctactaaagtgaatacccattgtaatatatgtgtacactgccctccacattcatcaagcaccttgcgaccagatatcagctggaaaagaacaatcccaaaggcataaacatctgttctgacagaaactatgccatattcagcatattcgggagccaagtatctgacaataatgacaagaaatactggtactgttagaccttagaaaacaggagcaaaatgttagcataaattagaagataaagttttatcggtgaaataatttgagtttattccaaccctgattgccccagaatccttgtatggatagaagcattgctagccttccattttgcaagaccaaagtccccaagctgtgatggtataacatatacaatcacagtcagattgcatgaagcatttgcatcttgaaataaacagataagcagtgactgagatctagtattctccagattaccataggaacaaagtcatgtgtcaaaagtacattgcttgggcgcaaatcccgatgaataattggaccagcacgacattcttcgtgtagaaaacgcagcccttttgctataccaagggcaatagcatgcctcttgtgccattccagtaagtttgcgtccttgtctatttcatcaagtgacgagcaaagtaaattagccacccttcatcttcacaatataaattactttctgcacatcaactaagctcttaccaaataaatgccactcaagggatttgttgcatatgtactcatacaccaaaatgttgtagctttctttgcaacaatacccaagcagcatgacaatatttcggtgccgggcaaagctgagaacttgtacttcagagaagaactcagtatagccctgtgagcttgcttccttgcgtactttagctgctatgacctggccatccttgagttggcccttgtaaacatgcccaaacccaccctcacccagcaaattctcatttgagaattcagacgttgcagcttgaatctctgagaaggggaatttcatagattcctttatgtaaagaactgactttagaccacaaccagcacacagaactggtcgctctgatgaatcatagtggtagaacatgtttccttcaacacctttacctgtaaggacaacaggagcatatgtaatgtgcgcaaataggtatggtacatgggctgtataaaatcaactattggagggtaaaattgcacaattttaactctgagaaaaggttttcaaaagctctctaattctatctgtatgaaatagcagaaatacaaccaggacacagtgtttccttttctttctttacacgtttatctagtttgaaattttgagcaaagtacactagttgctaacttacgattttgctttacaaaagaaacatgccataccgttggacaaggaatcagttccgtcaatcgttgtgagagacatggcgctcattgatggtgtcaaatatgacatgctgctcccgaccacactggatgtttcatgcatctcgtgatagcttagagaggcaaaataacttacaggtgatgacttggtcaacacactatgagtgtcagtatctaatgtctccgaacgcaggtcgagtgatactgctaggtgctgcagagcctttacttcccccatgcttttgctcggtggaattgtcctaattatcttcaatggctgcaccaccaagttatcctgaaatactgccaccttgcaggcaatgtgcttttctaagtacttgaaatctctcctgaagtgcctaaaaaattacaaaataagtacctcgtcaagtattgaaccaaacaggcttaagacttgtcacacagatcctctcctgtaatgcagagaggaactgtgtggacagtaatttgtctctgctgctagaatagaaagtctgtaacaatgttaaacaagacataatgtgcatacctatctagtacaacccaagcagctttgctggatttgacttcattgataatgacaaacttggctggtgatccaggagataccttaagggtcacattaatctgaaataaaaacaacgagcatcagagtgtaacacaatttttagtgcatgttttcaatctaatcggtgaagcacttcattatccagacagaaaaaggttggacagggattactggattagagacgaaagtacttgcagttttgtttcataaaaagaagacttatttctctatgaaatactccgtaaatgcaagcattggtaccccgactttgcttagctcctccacgtcatgacggagcttgttttggtagaattcagctttcgccttaacctgatcacttagtaatcgcaagttcgtcccggcaaaagaatcaatacatgccttggtttggtatcccactaaacaaaggaaaaataaaaagaactagtaagttttcagtaaatgcaatcattactttgctaacatataacattcgaagtagcacaaacactcaaacaggaactgaatccatatttccaaacatacctgtactaagatggataagggtgcactagctaaccattatttaaaatcgaattattacagcttcagactagatatttttaaaatggaactgttatcattgacattcaatgtgaaatttcacaaaagcaggatctaaacatatcatcgtattaatgctggactatctcttgaataaatgaataggattctgtttttgaaacaagaaaagaggaattctaacagtttccttgtgatggaattagatgttcagaaatccaactttgtcttcagtgattcgctgaataaagaatgcatggatcttctttttttcttcttttattttcttttttcctcttcgtcactctgtttcccttacatgacattataggttgtcctacccaacgagatgttgccccaatattgatgaccaacagcacagaattgcagtaggcacatctatttgacatctctttcactaacaaaacaagaatgccactataaaaattctatctaaatgtacgataaaagtgctagtgtgctacaatccattcccactctagaatttgcacatgtttaggcttccacttgtactcatgtaataccacttcaattgtggagtactatgtaaatgcaaaatgcaactagacagcatttcgggtaggttaattcgtctaagtacaatttctgagctgtaggagttaacaaaagagggagttttaattcaaggagaaagagctgggagaaggtaacccgtgggaaaagaagggggagcgtggccctcactgggattggtgatggcgtggagcacgccgagcacgaggagggagtcgccgccggcgcggaggatgtccccgcgcgtgaccaccgccctgagcgccatcctgatctcctcctcccggtggtccctcgtcgcgtcgagcgccagcaccaccatctgcggcggcggaagcagcggcggcagggccgcgggctggaccgctgccccgccgcccgcagcggcgctcccatcggcagcctccgcggccaccgacgacgccggcgtggggtggtcgtccccggccgcgatgaccgagtacatcgacatgggcgtgctgaccggggtgctggtggcgctgctccggtcgtccccacgcccccgccgccgccgccttcccccatcgtggccgcccgggagcgaggctattagtaggccgaggcggcggcgcgcggcggagtatattcgcgacagcgcggagtacatcccgccgccgccgccctgcttgctgcaggcgcggggggcatctcgaaggcgccggggcgggatatatggtggggcatctcgcgggcgatggcgacgcggggggttctaccgagggcgcccgcggcggcgacccgcagcaggttgcggttgtcgcgttcgcgcgcgcgcggacggcttcggcttcgccggcggaggcgacgagacgaggcggcggagaggagcggagacgaagaacttttcccgttgccgtcggccggacacggcccagcgactttagggcccattgcgcgaagactatccgatcgctcgcgctgagcatcgtaggccgatttagcaactaagcccatcccttcgagaaaagaaagcccatgcacgaaatataataggcaacattttggtgtcctctgttatcgattatcaacgtgggagtaaatccgacaattaagtgctctaatacctcttcatttgtagagtgtgcagcgctacccatcaaacatgggtcacccaaatcacattgagatatgctctatcgtaggtttaaccggaattaaaactttagatactggtctgcacaatctaaaaaattagtctgatgggtgagaattgtttttaccttttagtcgtgcttctccatcatcctataacggtataggactaaatccaacaatttaatggaaatggaagatccgaccaaccacgaaacaccaccgacggagaatcataccaaagcaaacgagtcagatcgtaaatcactataaattatagcagcagcacgtgtggataggtgagaaattgctgcaacacggacctgacgaccagcaatcgtggccagtttctagccatttatggcctgtgattaatacagtgtgtggccgaactgattaagaggtgcagccgcctataaattcagcctacggagtactgaaacattcacgatctcgatctacgcggcatcggagagaagctgatcgatctatcggtggggcgcgcggccgcgatcgatggcgaagctggcaggccgcggcagcaacggcgccaccgacgaggcgctgcgggagtggcggcatcacggcagcaagttctacgatacgttcaccgtctctggcctccgcgtcgacgccatccagcccggccgcgtcctctgctccttcaccgtccctcctcgcctcacggtacgctactagtagctactacgtccgtctcattttaaatacagttttggttttttcgcgtccaattttaaccgtccgttttatttaaaaaacttttaaaaaaaattaaaaacataagttaggagtaaagtactatttatgctttatcatttcataacaataaaaatactaattataaaaaaatttcaaataagtcgaatgattaaaattgggcgcggaaacttatggctccacttaaaataggacgtagtgagtagtaaacactctttctgtcgcaatatacatgcatctagaattgtatataatattgcgggcatatttagattgtagcgaaaataaaccttaccaaaatttgacaaattgccaaaattttggtaggatttcttatgcatttattaaatttgacattttttgcaactttaccaaaaaaatagtatagttgaaaatagcatcaatttgaacagtcccttcataatacaatgagtttaaatggataactgtccatagtcgttttactatgaaatatcacaatcgatcctagatacgcttataataaaatggagggagtacttcctttctccccaaacaaacaacgccattaacatttttacataaggctcgactattcatttctctactacttaaaaaataaaatgtgcttccatcgtccgtaaaaaaaaataggcgaaaaaaaacaagtttgtccgataaaaaaaaccgggcgaaaaaagtgcgaaaaaaaagaaaaaccaaatatgcccgatccagaaaaaaggggggaaaaaccggggaaaaaaaccaaaattgtccgatccaaaaaaaaaaccgggccaacaaaaacgtaaaaaaaaaagaaaaaacaaaatagcgataaaaaagtccgactcggtcccgtaaaaaaatagcgataaaaataaaaaaaagcccgactcctcgttgcgattccctctcagaaacaaaaaaaaagtccaactctagatccgagtcccactcctctcggtttgagtccgagatactaggcaccgcttctctcagtttcaatctatagcgtgatatttcatacatcttggtaaaaaaaaattgatatgccggattgaagatctgtttgcaaaaatggaacctacatgtcgagagcatttcatttttatatgattttaatttttgggtttgtacatttgcatttgagtccctgtaatttttatatttacatttgagtccctataatcttgcaataaggtgcttttggtcctttttttttgaaaaaaacaataaataaaagggatagaacaaaggcagaaaggtgcataaaaaggaaaagaaaagccacacaaaaaagaaaataaacaaaaaaacaacaacaacaaaagtctatttcccctaagtggtaaaaaaactatagatgcaaacggaaaaaaaatctaatttgtataaaaggcaaaaaaaagtggcgaaaaaaacgctatatccgattcctttaaaaacggaaaaaagtctgatccctgtaaaagcgaaaaaaatctgaaaaaaatctaaaaaagtttgtccgattccctaagaaagtggcaaaaaatagttcgtaaaaaataaaaagctggttcgtataaaataaaaaatgcacgcgagaaaaacaatgaaaagggcgaaacaaagtccaatttctaatcactataaatcgctctgaaaaaactgttagaaaaaagctaaattgatggacgcttgagtcggataggatccatcgattttttaccatctactacacggtttttatttcgtcatatattctcatgtattggaaaaaagcaaaaaataatattcagaaaaaacaggcaaaaaaaccacgcgataaagtaattgttagaaaaaataggcaaaaaacacgcgagaaaagcaaaacaaaaaaggggagaaaaatatggttttcgtcatcagtaaaaaaaaggaaaaaacatgctaggaaaaaattgttagaaataaatgcgctatttctgaaaaatagtttgagaaaatcgagcaagaaaaaacaccgtttataaaaaaaacaagccgctcattaaaatacaaacattgtcattgacatgattatggatgaaaaacttatattatcattagaattttttcacccgttgtaacgcacggacattttgctagttatttaaaagttacaaaaatattattttttgtcgtaacttgttgtttatcataaaagaaactatagttttaacttatattttcatatatttatactaattttttaatagtacgaatgattacacgttatatatataaaaaaaaatcatccgctcggatattttgggacggagtagcacacatctacgcttacatgtgtatacgtatgcttacgactcgaaaaatgagtgaagaatgcaaggagcaaacgcatgcatgggggcgcggtggcgtctctggtggacctggtggggtctgccgtgttcttcgccggcggctcgccgaagacgggggtcaccgtcgagatcaccgtctcctacctcgacgcagcccgtgcaaacgtaagtacagtacccgtgatcgagcttcggctgcttcgcgatggatattgatcgatcatgcatgcgtggtcgcaggaggagatcgagatggaggcgagggttctgggcatcggcgagacgaccgggtgcgtcaccgtggaggtgaggaggaagggcgccggcgaggtgctggcgcacggccggatcaccaagtatctcgctgtctcgagtaaactgtgacgatatataataccatcctgctagctaagcttgcagcaggcaggcatgtgcgtagtgcatacatacatttgtacaattaaatagctgatgatttttccatgaaatttgatgttttactagtagtagatttaaaagttggcaatatatatccgtcccactctgctgaagggagtagacgggcgaacaggggaggctgcgagaaccgagaggtgcacgagcacgagtcgggatttttcggccgcggttgggcctaaaccacggtagcctggctggatgacggcccatcaaccttctggcccaagagagttcgggcccatgttacgatgccacgacggaactgtggatgaataagtctattctgtcttcctcatgtcttgccaccggttgaatcgtgcccctaaatcgcaaaggaaaaagtacaccgaaggtccctcaacttgtcatcgagttacaaaatcgtcccccaactgcaaaaccagatatataacatccttcaacttacaaaaccgtttactttaggtctcttggtggttttgacccgattttgtctgacgtgacggctgaatcagcatggatccatgtgagccccacatggcaggattccacatcatcatcctatctctttcctctcctctcccttcctccactctctctctctctcacttttctcctcttgggcaggccggccggtgggtggggaggaggtcgccgacagcgggatgcagtggctgcggcgcgtacctagccgtgccgccgggggcgcggtcggtgcgatgcgcgctctgccacgccgtgacgcgcgtccctcggccgcgccaaccacagcgagcttagcgcccggagccacgagaagtagtcgctaatgacgagaagcgcccgcgctgcctgcctcgtggtcaggatccggtgcatctgctggagcgtctgctacctcagcagatcagcctacacaaaaaaaaatcatcgcatcacgccatggtaataagcaatttagttcgccattgatgtttgaccgaagcttgaggaagttctccagcgtggtgagcatggccatggcgatggctatctgtcccatgtagttggtgacgttgtcggcgcctatgccgccgacgaccacggtggcggccgccgatgccaatgtgtctcccagcgtctgctgcagagcctccatcccctgcgacagcgcgtcctcgacctgctgcgaggactgctgtaggttgcagatgcccataaacaactgatccgtcagtggctcaagatggctctcaagaacctgcacaaacaacatcatcatcatcatcattcaacaatagcagtcaatggtagcttcagattctttgcttgttactgaattgagtgggtgatcactcgtgtcaaaccttgaggagctcagaggaacagaagccgccgagccacatgaagaagcgctcagcgtggctcatccacaagccggagaggacatggaacacgtcggactaggtggcgaagctcttgaggcggaacacctggtcgtagtgcatcatcacggcgtcgacaagcacgcggagctcgtcctcgctcatcagtgcgttcacgctgccgtcgccgttgacgatgtcatcggggtacacgcgggcggcggcgagctacccgcgcgtctgcggcgagaagcgcggtctcctcatcggcatcagctacgccatcacaaggcaccagcggcagcctcaccatctccagcagcggctgcggcgacatccagatcaataagaccatcgtcactgccgctctagctcccggcggcggttgctccgaccacacatggtccttggccggccgcgccgccgccacgttcgagcccgccccctctgcagcttggtgtgttgccgacgccctcctcctctcccgcgctcgccccgccggctgccctacccaaggaagagagagagaggaggaagggggagaagaggggaaagagaactggaggccaggggagaccggaggcgcatgcgcgaccggtggcatgcagcggagaagagcggcggcttgctcgctccgtcggaccacctcacccgcctcgcccggcgacctcctccccacccaccactaccagccagcctgcccaagaggagaaaagtgagagagacagagagagagagggggggaggaggaggaagggagaggaggggaaagagggagggtgataacgtggcatcctgacatgtggggtctacgtgggtcccacgctgatttggccaccacgtcagacaaaaccacggtgaaaaccactgagggacctaatgcaaacatttttgtaggttgagggatgtcatatatctggtttgtgattgggggacgttttgtaactcgacgacaaattgagggacgttcggtgtactttttccaatcgcaaaaccgggtgtaaccctgggggatcctaatgggcgatcgatcgcccggagacgggggtagcgatcgatcccctctcccctccctccctccacccctccacctggtttgcttttttggcaccgtattacttttctattttagtaaatttatacatctaaagtttatacacctcaagtttacacatctaaagtttagagaccaaaagtttataagtcaaaagtttatatatccaattcaaatttgaatttgaattcaaatacttttttatatatagtatttctatacatctaaagtttatacacctaaagtttatagacctaaagtttataagtcaaaagtttacatacccgtttcaaatttgaatttgaattatatccgattcaaatttgaatttgaattcaaatattttctatatatagtatttctatacatctaaagtttatacacctaaagtttatagaaccaaagtttataagtcaaaagtttacatacccgattcaaattcaaatttgaattcaaatattttctatatatatagtatttctatacatctaaaagtttatacacctaaagtttatagacccaaagtttataagtcaaaagtttacatacccgattcaaatttgaatttgaattcaaattttttatatatagtatttctatacatatttttttctaactttttggtttttttaaaaattttgtgtggtgtactgtaataggaagagaaaaaggggaggaggaaggagggagaggagggaggagtgcatcgtataggggagggggcgggcgggtgatcgctgggcggacgggggagcaatcacccgtccattagcattctcggtaacccctcccacatctttaaaaactcgtgcaaatcaaattcctactatggtttccaaagagtttccgtcctgtatggcgttcatgggacttcatgtaagcgagataaaaagttaaaaaaaaataacagctccatgtgttagtcatcctaattaacctccttttctttttcctcttcctctctctctttctttcccattctctctctcgcgcgcaccagtcgagtgccccactcacggccgcaatactaagatgtggggccgttttttaatcttttttctcaccgacatgtgagtcttatgagtctcacataggacaaaaccgtcttcgcaaccgctaaaaaagttgatttgcatcgattttcaaatatgcgagaagcgttatacctggttttacgattgaggaagatgattcaaccagggccaagacatgagggagataatggaacataagatagctcatgaatattacaataatgacatatgctagtaaaaccatatgagcctaatttttactccctccgtcccattttaagcacaacccatgagttttcgtgtccaactttaatcgtccgtcttatttattttttttaacaaaataaaatatataagtcacacataaagtattattcatgttttatcatataataataataataataataataataataataataataataataataataataataataataatataataataataataataatactaatactaatcataaaataaataaataagatgaacaatcaaatttggaaaaagaaactcatgattgcgcttaaaatgagacggatggaatagcatttaaagtagtacactccttctgtcccacaatatagccagttttagccctcggccgagtatcaaggagagagataaaaatactttatttgtctccttagggatgggtgaattgtcgactagttgggatcttgggatgatataaaaggccagtgatactctagtatgggtagtttagtgataaaaatttacccttacaagtattctgtcacccccaatccggcaccgccgtacaacggtacctaacaggggcgtgttgtcggaaaaacggtgagaaccgcttcctacgagaccgcgatctcagtaccaatcccaggacatagcgctggtacccacggtgacaaatataaatcattgcaatccttgaaataaataaatgacttatttaccttaactagggttgcagctcaggatagcccgagattacaaccgacgacacggacgaggcaacaccaacaacggcagcagcagcggaaacaacggactaacacccaacaccacaggcgacggctggaaaccaggacgaaaccctaatcttcgcttcacttaatcttctcttcaagatggaggaactatatatatatttttttatagagcaagggtgagtactttcgtactcagcaagtcacgggaatttaggtgtttaatgcaagcttggaagagaggcaaggttgttttgcaaatctattgttttgaaatcattttgaaatcactaagtggtctacttctttctaagtttgtgccgaaaagagacttgtgtctcgattcgacttttaagagatgtttttcaatagctcatttggtaatgtaccgacctcctgggtcagatcattacttctcggctcccagagccatttcacttgattaagcggctcccagagccttttcattttctcggactcccagagtccaactgcccagcagcacaacaatccgcttccactcgggaagcctagtctatgatgcccgtagacatcccgaatcacacagattcgtttcttgaccactcaggtcatccatctgccacataggctgattctggtaacgattcccacaccacaacaactttttacaaagcacaggcaaacacatctacgctataggaaacaccttacatccgcccatgaccgtgggcacggctgttcgaacagttagttaacctctgcagagggggtacactttacccacacgacattactaacccggatcatccaacccgtggagaacagctacgtctggtgaccttaaggctttcatgacaaggcatttcgaaagccgacacagggtcgccatatgccaacgagaggggtcccagaccgacaacaggttaggtcctagaccatactgtgccaggaagcctgaggattccacccgacaccaccccattgaatccacatgtctcttggcatcaaggcttccctggtttgctatttactcagccaggggcgtcccattgcacccgtgtggtcgcacttgttatatgctcggatgaatttcccacaggaatcgatccttatatgcgaatacgggacagtgccacacaggcacaacccccgcatcgtgagtttacacaatttattttattttcaaacacaccgacaccacatgtcgggttttcaaggcttttcaaacccatttcccaagttttcgacaaacaacgatgtatgtgggatatttggtatacgtgcttagatagcacgaataccgaggtaccacaaaggtggagtgacaaggagtcagggtagtacaacctacaggaattagtgcgactactagtaggtccctcggtttggcatgcaaaccgaggccaagcaagttaaacgggtgattctaataatgcaagttgcaaacaaaataataatgatttttcaattataggagcaattggtcaaagggtgacttgccttgctcaaggtcttcacgaatcttcacgtatcttcgagaaatcccacgattgacgaaaatccggtaaccgcaactatacgcaaacaatcgaaaacctaaacaaaagaccaaaagaaagatctatttagactaattaatagtgccattgaatagatctcaattttatggatttactggaagttgaacgaaatcaatcggatgagcggttgggaagatatggattttctaaggattatttgattttctgtctaaaggaaaaggaattattaattcccttggaaaagaaaaggaaggagggatcggatttagacttcctcgggcggcttaggcgcggcccgagggattcacaaggcttggccggccattgggccgagcgcggccatggggaggcggcccattagggcgcgcggggagagagggagggcggttcgggtggacgcggtccaccacgcgggtccctggtggggctcgcatgtcggcgacacggttcacgaagaggtgggcgcacgcaagggcggcgctggggttcgggagggggagcggtgcacggcgcggtgctcggaggactaggaggcgacgggcccacgcgcagcctcacggctcgcggtggaccgcgcgcgcgagcgggggacggagggagcagctgaccgggacaagcccatgtggcgccgaggtggcggccacgctggcgagcgagaggaggaagacggcctgcggcggggattaacggcggacggcggcgcgcgtcgacggagcggcgcgaggcgcgaagggagaaagggagaccaccggaggggaggaaaggaggcatggattccattcctcggctcagatgcggccggggctggacggaggcgacggattgcggcggcgcacgccggcggggagaagaaggggaaatcgcgccgggagggaatggggtcaattcgcggcgtcgggagcatctccgggaccaagggaactcgccatggtggtcggatggagcagagcagcgccgtggaggtccggcgacgagaggcggcctccgggagcggctgtcgacggcggcgagctcacagcgagcagcggcgacgcttgggcggtgactaggcacgttcgggaaggtctaggctagcaatcgcgcaagttaggagggagaggaagagcggggagggagaacggggctaccgcgtcgggaggtcgccgggaagagcgtccgacggcacagaagggattgcctcggcctcgggccggggaaggggagggagagagggcgaccggagtcctcttcggctccgcgcgcaagccagcttcccggcacacgcgacggcggaggaaggcgaggatggcggcagcaaggcggcgatggtggtttggcagcaacaatggcgctgcagcggtggagagtgaagcgggagggattgagaggaggggctcggctgtgggctttataggcgcggatggggctttgaagggaaggaaccgacattggggcggtcaaggggacgaggcagtcgcgggctcgcggttcctcggtgctaggcgccattggcggagcagggtgccggtctgggaagagaaaaaggaaaaggggagggaggaaagaggctcggtcccttgccattttggtgtgtgagagagagaggagggtggcactgcctctctgctttggaagttagcggtggagccatggatgacggcaaaaggcgagcgcccgggcggtcggccacgacgcgggagcgcgcgcgtggacgcaagggcgcggcgggaattcgaaaggcagcggcgggatttcaaaggcggtggcgaaaatcgattcgcggcgacggcgcatagcgtggcgagaggagagagagaaaggaaacagagagagcgtaggcatcgagacagagagagagaggaagagagacgacgctctcgctctgggcacgtgcgacgcacgcgagaaggggagcggcagaggggagatgggccaaggggaaggaaactggtccatccaaaacagagggaggcaaaatagacttcttcttagaatttgaattggagagaattggagcttggatttgaatctaaatttgaaacttgtacacaagggttcaaggagacgaggaaggaaacaaagcgggtgtttgatactttcgggaatgggaacaattatttggagaggattcaaaggaagggattgactttcggaatttgatttcggagactcgaatcggaattggaatcttgaggtggacgattttgatggcgacgagaaggacaaggagattaaattgagatccacggcacgacttagactcgcacacaaagaacgaaaaatttcgcatataagattttgccgaattagtttttttaacgcctcacgaaaagcggagcattacatattcgatagttatatttgaaacagcatctgaactctagaaattattatatttttgaggcagatacaatatatatctctttaagatgaccacttaacataaccagttataaatgcttcatttcttctgccactttaggcttgtttggtagagattcaacttctaaatttaactttaagagatgtatctagagtgaagttgtggagcagtctgaaaccacgctccatgtctttattttgtgagagtactccaacccactctaattccttttttggtggaacattggagctgaaaccgttgtttgtgctctagctgcaaaagaggtagagctagagttccgctaaaaggctctttatctgacttgttcagctatctgaaaagcatgtttgatttggcttaataatacgctttattttttttcgagagaatgcttcatttgttacgctaatatcacgtgaagataaaagtgccttcagcacttcagcttgcttgcgatccgtcttacaaatgtgagtaaactttcagtaaaaaattagtgaatttaccactggtctttaaatacgtgagcataatgttcgcatgatgttcatgagcatatttcctgtaattggtaaaaaagaagtcatccaaagcacacactggactactcgagtgtactagtaacacccgaaaatagcaggtaaagcacatccacaaaatccatctcactctgtccaaattttcacttccagcacacacgccgcacacgcgtacacccaagttgcctcgatgctaagcaagacgagtccggtgagccggtgaggtgaggcagccaaagtagtagtagcggccaagtccacaccgagacatcacacaaacatccccgtcgcgtggactcgcgaaccccaattcccctctcccctcccacccaacctcgccgtcgccgtcgccgtcgccgccgtctccgccgctcgatttctccccgccccccacgcagtccagagcggatcgaatgcgtggccctcgccgcccgtagcctaccccggcccggaacggcgagcgcagccagtccctcctcgccgcatccggatctccgcatgcgccacgtccgcggcgggatctagcggcgtcgcaccccccggaggttgtagaagggtttccgggatttgggggcgccggggggtatggcgactgaggcgtccacttcggcggccgccggtgccgggggcgggagctgggtggaggggatgtcggccgacaacatcaaggggctggtgctagcgctctcctccagcttcttcatcggcgccagcttcatcgtcaagaagaaggggctcaagaaggccggcgcctccggcgtccgcgcaggtgacctaatctcgtcctaacatcaccattttactcggtgccggacctgtgtgtagtttatgctcctttttttggttttctgatccgaaccacaatgtttggtcttcttttatacttctatacatgcgatctctccggggaagtactgcggatctgtattagggttaggagagtggtgagcctatgggtacaccatgatgaggcattttaggcatagcgagagtggattggatactaaattgattggcaacggcatggaattagatggtgaggagttggcatatgttggcgcaataatgatgcattactatttcttactcttgagtttatgcttcatgttctataattgaattgtagtttataataattgtccgaacatttgagcgtgtaaaatttttagatgacctagtccagctaagagtgggaatggcctaaattttcctgataagattgggaagaaaccataactctattgtttgaactttttaaggggttattgttggcttggctgcaagatgcataccttgttagtttggatgtacaatatagttataaacatatttgccttgttagtttgggtgtacaatatagttataacatatgtgccttgttagtttggatgggcaatagttctttttcgctgactatgtttacattggttgggttgcaggcgttggaggttactcctacttgtatgaaccattgtggtgggctggaatgattacaagtaagtcaaaatttctaaatataagtaattattcatgctaatacttatcagtgtgatattgacagtattcagtgctgttttccagtgattgttggagaagtagctaactttgcagcatatgcctttgctcctgctatcttagtaaccccacttggtgcgctaagcatcatcatcaggtaacagctagcacctacacttccctaatcttgagatctcctgctgtttatattttcatcagtctgttcattcttcatcttagcatatttcttctacagtgctgttcttgcagatattatgttgaaggagaagcttcacatatttggtatacttggttgtgtcctctgtgttgtgggttcaacaaccattgtgcttcatgcgccgcaggagcgtgaaattgattctgtagctgaagtgtgggctcttgctactgaaccaggtactgtgttgctgacaattgaatctcaaaaacattactggccacatttttatctcgtactaaggttttagcttttgccttgcagcctttctattttatgcagtcactgtgcttgctgcgacttttgtgctcatattccgctttatcccccaatatggtcagacacacattatggtgtatattggtgtttgttctcttgtagggtctctctcggtatgtgttccatgtgttaataactcttttcaattgatattcataaaatactgttgagtagttaagctgttctagtatcctctattcataaaattgtgtatattgctgcttttggcaggtcatgagtgtgaaagcacttggaatagccttgaaactgactttttcaggaatgaaccagctaatctatccacagacatggatgttcaccattgttgttgttgcatgtatactaactcagatgaactatctaaacaaggtaaccatgatttctggcctaaaagtgaactatcattatatcataatatgttttcatgtcatccaaggtccaaggaacatgaacgaaattggaacatgaacgaaattgtactggaatataacatgccataatggacactagctagctattaaaattagtatcacaacacctgattctgcctgtttagaactcaggcttgatatacatgcatgactgtacaatgtccatcactttacagttcaatatagcttgttaaatgccctaagcttactctgtttccttttacaggctcttgacacattcaatactgcagttgtttcgcctatatattatacaatgtttacatcactaaccattttggctagtgtgataatgttcaaggtaacatcttttggcttctatgaccttctgcattgatgtatgccaggcatttctttagcttaacttttaaaactgcaagtttggcataaatgaagcaaagcttgttttgactagaattttacattgaggtgcttatatatagctttcagatgctaatgtaatgtgttggttactcggagtattgtcagattatatttttcagcacaaaagtatatccttctctgcattttgtcaacagcaatatgcttttttttatttccatatttgtacataggaattatgataaataagggagataactgagtctcatcagaacaaatcagaaactaggaattgagctttaacaccttcatgtttctcatttattttcccttctttctccaatagtttgagcgtgtgacgtacaattgattcttgaaccgctctttacagtatcacctattgtcctgaacctcatcgccgttctatttgttcaacttttttgtgagatttctatcattagcattgtcgggacaaataccatgctgtaagattttgctgaagcatacactgctgaaatttattaccattctggccatctgcttctgtggccaccccataatacaagggcacatgtttctgtagaaactaagtggcatttcttgctagatgagtacagaaataccgatcctattcactctataccacattttcctagttaatatggagtatgtacttgtgtgcttagtactctgctaaggctgtaaaaaaaactcgagggcacttaacagtctttgcttaaggcttgtgagctactcgagctcagcttgttctgggcttggctcaagcctaaaacgaactgagatcaagcctaaggctcgtgctccgcattgagccaagctctaatgcatgcataaggattatgctcttctcatagcctgtcaatctctcatgctttacctgctctacattgaagttttcaattcctcaatgtcaagcccaaggctagtgcagtaatgctagctatctgcaatgcatcctagttgcatgccagtatgccaccatcatcttattcataccggtggcagccgcctgtctactctccttgctccttctctctatttctccttctgtgagctgctagtgtgaccagggcagcagggtactcccct

SEQ ID NO: 429 - DNA, 1207 bp, Oryza sativa
ccacaaatttgccgatgaaatgatgtattgggtgtactccctccgtcccaaaatataaacatttttagcatagtgacaaatcaaacatttttaactttgactattaataaaaaaataaaaatgatcaattatgtaaaattgatgttgctagatttattattaaaatactatcataatatgcaacttttttatttaaaacatgttacttttatagatattgttagtcaaaatagtatctcggagacctgatcagagtttaaaaatacttatattttgagacgagggagtaacttcttccaacaagaaaactgaaattaattatggtcgactccgactcgttaaccacatgttttgcacaatgtcacaagccattttggtggaccggatcgacctgactgaatccctaacacccaagcgccaagccaggcagctgagtcaaacatacgcggtcctcactataaccacgtcatcttgttataaaaccatatcaatttgcagagtatttaaattttcaggacccttctctgtgaccaagccacgcagcctcagtttattatgacaaactcccaaggactcgttcccgcccgtaatgtcaacttggattaatatatagtaactgggtgttacgtacgttacgttgcacctatcgcttctctgcaacttgacacaatacaacacctcaccagacacttgttctttacctacgccctcgcgccttccgggaaccgctactagttataaactgacgatttattatacgtgtccacacgtgatggaagcagctctcgtggagcgtataaaaggagggctggtgatcgatcagctcaagtgctcaaaccctctcaagtttcatcatcacccaacacaatcgcaaggggatcctcaacagggccaacccgacgaacgtgagatggcggcagccgtagaggaagccttcccgatcgggttcacgaaggggataccgtcctactggcgaagccgcaagtaccatagcgtggacagcagcgcggcgggccgcggcacgagcaacctggtgcggctcgggggcggaagcggcaacggcagcgacggcggggcgtgggccgtgcggctgggaggcatgttccgcacgcgcgtcaaggcggcggcgcccgcggcgacgacgaccgccgtggcgaaggtacccgcgcgcgtgctggggcgggtacgggacgcgtacgtggacgcc

SEQ ID NO: 430 - DNA, 685 bp, Oryza sativa
gtgctttggtccacttgtcttaacctacaagcaaagaataaatagctcatgtttcatcttgaacaaaaattccaaacagaataaccattcataaatacgcatgtaaaagtaccttgcatccaatgtacttagggcttgtagatgcaaaaaaacaccacttgcaaccctcttctgctcttttgcaaatggctctaaaccttttcttgtcattcttgacagtttcaaaagcatgatcattcaagatagcatgatgggtaactgctaacttgcattgatccacatctgggaacactacaccaacatcaatacaaggatcctgaacatcatatgcaaagacaggtacatcatcatccttatcaacaatttcttgatcaggatcaaactcagggtcagaacaatcagagtcggaagattcggccaaatcagaatcatagctgctatcactatgtgccacaagtgattcattgtcagagtatatgccctcatcatcaatgcctactgcatcctcatcatttgaccccttttttatggaattcttggctctcttttttttggctccctcattagtggctctctcattccttgcactcttttttttggctccctcatttgtggcaatctcacttatgcatgctctagaccttactgaaggatgaaacctacactttgtgggtgaaaattgcaa

SEQ ID NO: 431 - DNA, 1196 bp, Oryza sativa
aaaattggcacagctgagcgaaacacgatgaaagtgtccacattggcatggagtagaagttcactgttttgtgaagatggagatgtagaacatcaccgcagcaggcaagaacttccacatggtcctcaaattaaggccatcatgctcaataagctttagttgtccacataagagaactccaacaacactagtgaagtactgtaaagctgtcaatgctccagggtatggaaatttcatgactgcccatttgttgataatggagagcagggatgctgacaggcaataaccagcagccacaccatagactgaagcttgttgcagaagaatgttcaacgtgttactccatgctccagttttctggacagcacttgaatcatcagctgatgcagcttcttttgagggctctgatagattagacatctggcaatgtaaagaaaaaaattcaataaaaagttacctcacaaaaaccatactgaagctgccaaaaaacaaatggaacaaaccaaaatacttagaaactttaatcgatcttggtgtttgtaacatggtgaaatatttggcattgctggaacctatttgatctttagcccttatcttgctcttagagttaatagcaatgtgacaatataccatggtactggacaaagcagaggaacacttaaaaaatgtttactaacaataattatctaatttcttgatagaccccatgcacctgattccacccatggattttcacatcccaatcaaagcttcatactacaccatactcatcattttagctccactcacacagttatatagacttggcttattaaaaagatctctactttggactagaaatagtacaaaaattgttagcagaaagctaaaatgtacatcaacataatagtgctctgaacaccagctaaatatagctgtagacatatccaatactgagtgatcaatatgcttttttttatttccatatttgtacataggaattatgataaataagggagataattgagtctcatcagaacaaatcagaaactaggaattgagctttaacaccttcatgtttctcatttattttcccttctttctccaatagtttgagcgtgtgacgaacaattgattcttgaaccgctctttacagtatcacctattgtcttgaacctcatcgccgttctatttgttcaacttttttgtagatttct

SEQ ID NO: 432 - DNA, 714 bp, Oryza sativa
ttctctggctggctacgaaagtacgaagggaggaataaaggtagagagataaaaatacagtactactggtactgtactgcgttttttttttctttcgaagttcaaaaagataatattttctttcaggagaaaaatatgatagtcttatccttagttgcgagaaaatgtgttcttctctacctcgattaatttatgaatcgatggtaatcacattcacatatcgttctcaccatcgaaaaaaaaacagcatacaacatactaggatgaaaacaaagctgatacaaacagatgatactcctaatgtatttgttttcgttttttttggtcggacaaaaaaataaatttgaatagctcgaatacaaaaaataaatattaattacctcaaatacaaataagaaccgaatatgctaaggcacaaatacataaacaaatatttttcagagcacgaaaaccgtcttaacttttaatagaaataagtatcatcacatataattagcttggtttatattaaggctgtatttgggaggatgggttcctccttcccagcacacaaaatgatgttcgcattaacgcgtgattaattaagtattaactgttttttttcaaaaatggattaatatgatttttttaagtaactttcgtatagaaacttttacaaaagacgcaccgtttagtagtttgaaaagcgtgcgtgcggaaaacgagggtagggaa

SEQ ID NO: 433 - DNA, 700 bp, Oryza sativa
ataaggtagaaattcaatttgttttctgttgcaacgcacgggctctaggctagttatttactaactttcaccaaattttgctctcgattgctctcccgcgaatccctaaacacccataatttaatgtgaggtgttgaggttgttcggtaggttaaaactgttgtgtgcgacactatttgtgctggctacaatgcaactacaaattaagtagctgaattaccacatttctagtatttaattaattcccttcatcttaatctcttatagagtagaaaagatatactccctccatactcgtaaaggaagtcattttggacagcgacacggtctccaaaacataactttgacttcttgtttctataaaaatatttattgaaaagtgatatatgtatacttttatgaaaatatttttcaagacaaatctattcatataatttttacatttttaaactcaacaactcgagagttattcataatttatatttccaatgtttgacttaaacattgtcataaataattttttttacgagtacgaagggagtaagtgattatattttgaggcggagagtataactttagcatatatatatacacatatatccagctggggaaaaaatgaagtatatatatatgatgggacagatgaagacgaagatcgtgatccttaatttaatttcgtcctcgcaaaaacaaataaatg

SEQ ID NO: 434 - DNA, 588 bp, Oryza sativa
ctttatcagatgaataaatgatcaaaataaaagttatagatcttgatgagttattcaactttgttgttgataactttttcagttgaaatcatttagtatttgaaaatgttgtttgaagttgtcatatttttaaattcaaattcaaacggttaaaaaattgttatatagaaaaatgaccaaaataaaagatatagatcttgatgagttattcaactttgttattgatgactttttcagttgaagtcgttcactaacaaaaaaattctatctgaatttctcaaactttgaatttaaaatatcaaattgtttaaatagagttagatggagaaatgaccaaaagaaaaattttgcacctcgatgagctctacaactttggtttcggtgacttttccatctgaaatcatttattaaccctaatttttcttcgaagttgtcaaattttgaaaattcaaaatttgaattgttcaaattaacttatttgtacaaaggaccgatacaatagttgtagatctcgatgagttatacaattttattctttatgatttttgatgggtgtgtatgtgaatgaatgtatatgaatgggggatg

SEQ ID NO: 435 - DNA, 596 bp, Oryza sativa
ttttcacaatctaccatgatacctttgcttttacgacatttggggcaagaaagcccttcattgtttttcacaacatcttccatgtactcaacacgacctaaagcatctttcaatttcaacttattcaaattacatgttgagcaatccaaaacatcatgaggttgttttaactttttagcagaaatcatgttaaacatcaaactagcatgaaaagcaagttgatatttttgcaacaactttttagctaaaaataactcatccaaagtgcgtgtgtccaaagcaaaactacaagcaagagaagatctatttttcaaatcatgtgcagcattaacatctctaatttttgaaatctcgttcattaaaacctcacaattttcacaatcatcatcattaggaataacagattttaatctagcaatttcagatttaagagattcaatgataaattcctgttttctatacatcttctcacacttcttattcttttcactcaaaatattaatagcttcctcaaaagcacttacctcattatcttcatactctgtgtcagattcaccacgcgtcatgaagcaaacatcggagatgttctttccctt

SEQ ID NO: 436 - DNA, 842 bp, Oryza sativa
ggttccaataatattatgtccagaaggtggttcaaccaaagtccaaactttgtttctctcaaaattttcaagttcttcatgcatggtgttaatccacgattcattagttaatgcatgtgacacatctttgggttcaaaagaagcaacaaatgcagaatttgcacaacatcatgagtcgttaccttagaccttgttgtccgctcacctatattaccaataatttgttccggcggatgtcgtcgttgaatgtgcaaaggagcagcaacttctgcagttgatccacgttctgtaccagtactggtcgaagtagtaatctccggaggaccatctcgaacagcatcaacagaaccctcagccgacgaccctggccggtctaaccgcacctcctgtgccggtctgaccggaggtgtgccagtggtctaaccggcctagcgcccggtctgaccagccgagccgacctcgtcgtcatcgttgttgtcgctctcgtcttcaaaaatacgaccatcctcccgctgaacctgtgacagtgtacctgcaatatcgggtctagtacctggactagcctcatcaaaagaaacttcgcaagtctcaacgattttgttagtctgcaaaataagtacacgatagccacgagtgtgtgcgtggtaaccaagaaacaatccatcggtagaacgtgcctcaaacttatccaaatttccagatttcaagacaaagcacttgcaaccaaaaacacacaaatgtgaaactttgagttgatgtccaaatcgaagttcataagaagtttttccaagttttgatctcaagaaaacccgatttgaaatataacaagcagtgttaatcgc

SEQ ID NO: 437 - DNA, 624 bp, Oryza sativa
ccagttaagaacgactccctctactattaatacaggttctaatttacctgcacatgtgatttggacaatggttgttgtcttatgtgccggcacactaacctagtctttatcctacgggcacatctatctattatatatattattaaaggaatagaaaaatgagtctttacgtttgctctcatggtctagaaattttcacattaatcggagaaaaagaaaaaacagagttcatatagaaatacaatttagaaatagctgaaattcggaattaaaaaaaaggaatattagaataggagactagagtccatatagaaatacaattagaaaataactgaaattcgaaattaaaaataaggaatattagaagtaaagtataaagtccatatagaaatacaattagaaaataatagaaattcgaaattaaaaataagaaatattagaagtagagtatagagtctatatagaaatacaatttaagaaaaaaatagaaattcggaattaaaaaataaggaatattagaagtagagtacagagtctatatagaaatacaattaagaaaaaaatagaaattcggaattaaaataataaggaatattagaagaagagtatagagtgaatttaaaa

SEQ ID NO: 438 - DNA, 14170 bp, Oryza sativa
agtggaaagagaccttaggagcagtttaataacattttaagtacaagactcttcatataaatgaactataatgaaaagtgcaaaaacaaaataattgagttcctaatatgtcataaaccatgtcatatacggatatgttgctagcagttgagttggtactaaacattcgatgtaaggaatttaagcaagaagtgtcatgcaactaaactagcagaaagaaacttcataccaagtactacaaaatacatgtatgccatacacaaaggaagaatgatgcatgagctataggataatagttgtactctgatccctcttaacttgaagccacatacaagaaaagcatttcttttttgtgctcctatagtctttctagcatttcaacagttgtaaagttgaactttgaaatcttgaccactatgaataaagatcaaggtagacctaccgtgtgactagaacgcagccactatacgaacagggttgagttcaattttggaataaatataatgtttgtgtttgttaagaagaatgaactagtaaataaatacaggctagcactagatgttcttagatgttcttttcttatgaaataaatacaggctagcactagaagaaaataatataaggttgacaattgtcctatggacaaaataaaggttttgcaaaacttactgtcgtttggcttcaatatccttgttaaaatcaatgtcatgttcgcagtcgaggaccagagcaggaacctgattgagaagaaatttcgttcatttaaccaaacaaaccttactaatttcttttgaaactaaggagaacattaccttctggatactagaatgcatatgatctccttctaagtagaatactcgttctcttatatccggaggcaaagagccctccatatggactggaacttgactgaccgataatacaccaggaccttgtcctttggaaggaagcagccagctctcatgtttctcatgcaaacctcgaaggtaatcaagagtaacaccaccctcttcagatcttttccgaaccatcattcttttgtggcaagtgtcgggactagctcttagataaataaaaccatctggaataagtcctgggagtgatgacaccactgggtcaaaccaggagtcatagatgctgatctccatctcgttcatccagttggcttcatggacagcacgaacaaaaaccttcaaaaatttaactttgaaaattttaactaggagaagaaaataacaatgggaaatataaagactgcaatcgtatcaaagctctagattcacaatccaagcggactttgacggaaagatttacctaccattctatcactgaaaacacttctttccatcaacctgagaggctttatgccacttgaagattccttctcttgcatgacccttgtaacaaacacataattctggaaagtgtatgcatacctctgtggctcagcatagaaagcatcaagtatgttgaagtgatcagggccaacatcttgccatttagcaataggttcaggcactatctctacaaggtcacgtaattcgatggtctcattggcaattctttgaaggaatgtagtttttccgacactgatgttcccttccacacaaaaggtcagcctcttatttttggaaacatttggtgagtcagttcctttcagctcttcatcaacactttctttaatgaacaaagttatactctcagcatgattcttgtgtatgatgccaacagaactttgcaagaactcaaccattttctcattggacttgccaaagaactgcaaaaactcatgaagtgtcagtgtcaggtatgcggaaattaggataaataaagagggaaaaagacatctaatattcgtgcagtaaggtcgccacaatgaaataaatatcacaaatcaggcctggaggagaacccacaattgtactctgttcttttcctgacactaaggtttttcttttcaggatcttagttgtgttacaacaagaaaattaactttcacccaaaacagtttcaacacaaaatttgacatatatgttgaacacgggcatcaatttcaccaattcttctgtcatctctcctagcgagcacaagaatgcaagatctcctatgatgcagaattggacatcagcatggatcaataattcaccaatgaccacgaaacacacagttgcttgcaagcgcaacacaacacctacagtatccttatgtgtcagtcgactcacttacatacaggtatgtgagtgtaggcaaaggcatgcaaagtacttgacttaagtgactacaactaagcatatatatttctcacatgtttaataaacaacaacaaaacagatatagtactactccctccaggttgataatatttattgttttgaacaagaatgatgttatgattttggatatgaatcatttctaaaatatttgtcagaccatatgcacagattagttttaaaaagtactctaatcaaagtatatatttgttgatactatatatattatagtagaaaataaaggttatgattgtttcctagagaccgtgctcttgttgaaaacgataagtattatcgatctgaaggagtacaagctaatatttcacagttcacacacacacacaccttatccctgtacagctgcttgagctgtgccacgccatcgaatcccttgtccacgagcttcctcaggttgcgcggcccgactccaggaatcgcgagcagctcgccgctccccatcgccgcatcgccccgacttctctgcctcctatccaccaccggacggctcccacctcccccggcgacgctctgctcgccatcctcctcggcatcatcatccccgcacctcttcgccgcatcggcggagcaggagagccccctcctcgagcgcagcagccgccacggggagaggcggaggcggaggcggctagggtttggtgggcccgaacgcgcggcgagaagcgggcccgcctgggtggtgagcagcggcggggcgccgaggaaggaggcggcggcgcggggtacgagcctgtgcatcgctgcccgcggcgtcggctgcagggctcatcaatcgcgcctccagcacccccagtaggccgccggccaacgtggctgcggcggcggcggaattgcggctgcggtggttggaggggttcagggttttgctggcgctatcacctcgctgacttcactgaggttgccgcgaaaagtgaggagaaggaaggggaggaaggggaagcggtgcacgagcggtccacgggattttttttttagtaaattacagattggaccatgtattttttgaccgtagtttcacattgaactggttcaacattttcatttaacaccagatctttttacccaaaattacaatttggactagtggcccacctatcaatgacgattgaggatgaaaagagaaaattggagctaccgatagagcaacaggaaaaggacaaatgcactgatccatttctgaccactctcaccagctccgtagtttgcgtttgtggttgtgagtatggtgttagatgctagggccatgctgccggcgacgacggcgacggtgaccgtctctgctatcgatgttggcgacggcgaggaactaggaacgacagcagttgtggcgggccgacggcaactcatcgccaacgatggccgtggtgtcggtggacttgccgatgatgtgggggggacgagagtaggatgaagcgggaggccgggagctaatcgtctaggcaaaggccgtggcatccatggccatcaggggttgatgcaattcaaatgtactgcacctatctaattcctgagccatttctatttgcagagtgagatccatgttttttaaagcagctcgtatagtctgcttgaatcttaatcgatccattgattgatgaatcggcctctgcatgccccctttcttttttcttttctcctgcaaaggactctaatctcgtagtaatgcaggtggagagatgtagagagtcgtaggcgctagtaagtgtgccactagtccaatttgtaactttaggtaaaaagatctggtgttaagtgaaaatgttgaaccatatgtggttcaatgtggaacaatggtaaagatatatgtcccaatatgcaatttactctttttttaagaaaggtccacggaaattgtactctgttctgcgctggtttttcccctatgctcgtgcagcatggaccggaccaatgaggtggagaattttatttatttatatatttttatatattctaaaaagttacaaaatccatttttgtttccaaaaattacatgaatgtagtactcctgtaaatttctgtaatttttaaaaacaaatatatatttctgtaaatttaaaaaataaataaatatataaattcaaaaaattgaggtgcgggacttaggttgtatgggcccatctctcgtatgactcgtgtggtgggctgtggtctagaaacggggatgcgaagggctattgcacctttcggccctaaatcgttaatacggcccatcaggggaaacagcggtccacgaacaaatctacgcaatagcccataaatacccgtgcatgactgcatgtgaactttgttttaaaaaatctccttttttttttaaaaaaaagaggaaaacttacgaacgaacagtcgaacatattgtgcatgacgtgccatttttttgcatgatcgtccaggtaaatcctggtgcaaactggagttactgaatttgacaatctcagaaaaactgagtctcacatgaactgaatattttgactctctcttgtagcagcctcaccgacccaggagtatccgtgttttctttttttactctttttagacagggattcagtggactctgaccgtacgtcgtcggtacgtatttctctgaacgattctggtaaatggcatatctatcagccaatcaggtaaggcaggacaccgtccaaatcagatgacgtattaagaaaacgaatgaagcttcacgtgccgatggctttgacggcaccgttcacctatcaggaattcaggatacaatactcagaattcaggagcgtggaaaacggagtagtaaaacgcctgtagattacacccaaaaaaaactgcacgagttgactcgttgatcttgcagaaaatcagacatagaatctccagctgttttcagagcctcttgctgaaagagtcagttcagttaggctagctctgactagttaactacccttacatactgtaatcactaatctcttctcagtcattcagctgagcttgcaagcgtgcgtgtgggaaatgttgagattatagacatataatgatttaatctattccataaataaatcatgacattacagatgaaaactagcatgaacgcatcattagatctacacatgtaaactacacagtataacatgaacagatcaaatatgcgcaacatattgaacacgtaccgaggtgacggaaagaccggctgcttggtcgaaacttttcgcaagtgtctacgaaggcacgaaacacgcgagcgaagaggaaggcgagccgtcgcgaacgaacagggagcagtcgcgcgaagcgcttcccaaaaaccttattgccgccttctcccggtgcagaacgtcgaagacagaggttccggagacctgctctcccgatcgccggtgcacgccggcgagcgggatggagtagtctacgagcgacgacgcagtacagagtaggagacaaaccctagattgatctcgcaaatattgcgtgaagatggcgggtcggtttatatagagaagggtcgcttgatcagggcgcccgcacgatctctactgcgcgtaaccgaaccggataagtcgcgcgtaacttatccggactccacgccgtttgcacgcaccggatttttcggaacgtttccaaaacaaaaacgaatccgaatttgcagcaaaacaaaactgcaaaaggaggctgcatctgcgcaagggtgaggatgccaatttttcggaccattcgacgcgtacgtcgtgcacgcgcgccgcctgccctgccaggcgagacgagcgagcgcgcgcatgtgtttcccctcttctctccaccacacatgcttcaagtggctaggagggcatcctcccttttaaggaggtccccctctcctagaataagcaaggtggtactaaactccacatgcatgccatcccatgaggtgggcttttgtgattttccaaagaattaatcttcgagtgggctaaggcccattcattaattccaacaggaaaaagtacacccataagatacgactcggtttatgaaaaaaacagcattcttaatcatcctgcacacgctttgctgttctttggaaagtcttaacaaatctgtcaacgtttgggtgaaagccatggccgaactgcaacacgttaaactatgggaatgaaagctacagaggtagaacaggtcgtcttacgatattaacgcagcctgttttttgttttttcagatgtgtctggcacgagctgtttttatggtagctctgactagtattactagtaattaatcatcagccatccaactggtccttgcatacacgttgaattgttcgtattttctcgttagcccttgctcctaatgttgggttcttatagtctttcttttgtttactgtactaagatcaatgctgataggaaagcaggtagagatcaaataatgcgagttgaaagaatcggcttgaagaccttgcgatgcaaaaagaccttatctaaagtctctctatattttggtgagatcattgcaaagaagataggaaggaaaaagagtatatattggcaataggtaaggtggttatgagctcccatttcccatacgaaatactcttctatactcatatcatcatggatttaaaacaactgcaacattaaactagaaaatgttgttaataaacaaaagaacaaaaccagcatatacgaaaggttgttcaccaaattctatttaattacatgcataagcagatctttccatccaactatacttaaaaccttcacttgtaatgaagcaaccaaaccattaattcaagccatcattatactagaattttgtaggacctggatgcattcagtatgaataaatataagtagctggcctagcggaaactaaacaatgtaactggtatatctgattaatttggtgaagatgaactgtcacacgtcctgcatatgtaggacagccttacctgcatcatcccaaatatgagttcgagccaacgaaacaaacaaaattccatcagcatctagctaataagattgattagagagcttccatgagaggaaaattaataccggcagtgctttactggtgcagaaagattcttggaacagaacatttctttttcatttgagcaggggaatcagtattatctttgccaatttatgtcacacactgtactatcctaccaattaagaattaacacttatcaattattctctattaaacctgaaaagttcagggaatatttattgctgagagattaactaattcactagtcataacataatcatagataaggcgcaagttgtgaggacaacatcaggtaggttcggcaggctgtgctgcgaagcacgaacggagaaaagatggatggattaattgtcattagctgccatacaggtcggtaggccttaacatcctccacagtccatactaatcacattatcagaggctatgtagcgcctccatttgcagatatcattatggatcaagacatatgctgctggctagggatgaaaacgatcggaaatcaaaaaaacagcctcaaccatttccgtaaccatatttttctcggaaacgaaatcggaaacggtaaagtcggaaacgaaaacgatatcggaaatatcggaaaaccggaaacggaacaatacggacggaaacatgtcggtacagatcggaaaccgataacaaatacggaaacattaaactataaaaacatatatttaactttacataagtatgttatatatatacataaattcaagcttatactatataaattataaattaacttcattttagccatgtacaaaagttagagattttattgaagagtcattcaatctataagctgtgggtcaagtatagacatgtcctataatatcgacatatttagaatacggtaattaccatattataagaaacggtaatttccgcgagaatacggtaaatacggaaatgatcggtataacagcaaaaccatttccgttttcattttcatattttttatcatttccatttttgtttcggttgattaccatttccatatggctcggccggtagaaagtcgaaaacgaacgccggtcggccggtaattaccgttaccgttttcacccctactgctggcgacttgccactcgccataattcttaattccatttccgagctgtacgcatgcgatcgaatccttacaaaaaaaaatgatgtggtagctacaaggtaggaggatgtatttttgcattcacgttccaacaactgttgcctcacgtgttgtttcaaactaaagtacttaatgatctttcatgagaagaagaaaaaaatgctttgtgtacttaatcactgtgaggtggcccaggcgcagggacaactctagctcatcttacctgatgtctaaagtgtctaacgatagagagtggagatataacacaccattcctctcctaattaagcaaagcatatgcgtgcatctagatcgagcaattggttaaaccaagctagtgggaaacaaagggaaggaaaagaacatcataccatttcatgacttcttgcaaacgtaccttcagtgcagctgcatggctgcgattgacaccgagaaaattaagaaaacccacccacgtacgtctatatcgagcccgattcatgcatctcaaaaccgtatgtttctcgatcaatccttgacaattacgccaaactcaaggcaaactgtacatgaatccccaccccgtacaagaggaatttttggagctaatccacacattcatccagaaaaattaaacaagtctggttcgatcgatcagggagaagaatgaggacaatggtgtggcggtagaggagatagcgtatcggctctgtccgccgtggacagtggacttcctctgtctgcacatggtgatggcgaccttaattaacccgttgatgatccatgtcagccgcgttgcttaattcctccgtggaattctggaggttccggcccggactcccggtcgggtcctgcatttcatccgcggctgctaatgtgcatgtcatcctgtggttgcgttcgtgacatgacacatctgcagcttagctagctagcattttgttgtcaaaactacaaccacatacgtccaaagacgtggtcactcaacaatggttggaaaaaaagtagagtgtattaaattgagaattttactgatccccctattacatggccctatggggctatttatagcctactagggttttggttatacaggggaatttacatggttgcccttgtgaaagggaaatttacatagatacatagcgtaatcgcggtctatgggcccttagcgggccgatgggttattgtcgacccaattgacccctaggcttgatgggccaggatagcttcttcggccctcccggagccgaacttgctacggcgaagtcatcccccttcggcttatgctcttcgccttgcccccttcgcccaggaggcctctagcttggttgtgattccctgcctctcgccgtccttgctctatagtcttcgctattggggggggttcgtcttgactaaccctgacgtctcgggcttgaatcctcatcggtcgcatgctttcggcaggtttggtcgaagggccccatgccatatcgccaacacatttgatcgatcgtcggtggagatcaagtgccaaatctagctaggtcgtgtttagttccaaattttttcttcaaattttcaacttttccatcacatcaaaatttttccacgcacacaaattttcaacttttccatcacatcgtttcaatttcaaccaaactttcaattttaacgtgaactaaatacgcccctgtgtcggcatatcaaacttcatcataggatccatggatgcatgcatgctttcatgcggtacagtgctagagctgtacagtgcacccctcgacgtggaggtggaggtacgtacgcaggcacgcgggactcggcaacaaccaccaccaccccgaccagtcgagatcgactccgtaccagcctcctctgactgcatgcgagcatgcgactgctcctagcatagcaccagtagaagtctagaacgtacggccgcgtcgtgtggcggcagttggtgcggggtacggggggcggcgtcgccgtcggcgcaacagtgtcacgcacagtgatatctcctcgcgcacgcggtcgcgggcgtacgagcgcggcgcgagctgagctgctcccttgttggggagggggccccggcgttcacggggcgcgcgcgcggcgcggggcctgacaccgtaccaacccgccaccaccgagcgcgcgaacgcctcacctacctatacacaccgcggggtggtggtggtggacgcggcggtggctcgctagctcgcgcttcggctggcgatcactttagctagcgatcgaagtgcatgcacggatgcacttcggtgagagcaacgtccgaccggcaaatggatccgaccggaatccattgaagaccgggagttgactggcgcgcactgtacacgtggataacgcatgcctttcgggccgttggatggaatgcaagcgcatcaaaagtagagtgagtaattgggagtgtaatgtaaactctggatgggacattgtaaactctcgatagaatattctctcgttatttacatgcattgaaatggttataatttttcttaaagaaattaactagatagattaatatgtgatatattacttaacaagcatgcaggttaaaattcagcttttacattttaaaaaaataaattatgactagttaacgtatattaatagtcaaatttgtttttttcgttacaacttgtagattttaaatttgactttacatatttatgaagtgaattatcagttatcacatattaatctatcttgatagttttttttaaaaaaaaactcataaccatttagatgatatgcaaataaacgaggggatgtcaccaaagagagtttagctagaatagtttcccgtgagtagttgttgctagattgtggcattgagcttgagccactactagatctttatggttttggacgatacggttgctagctaggcctaacagctgcaagccaccattttatatgctgtatatataggtcactttcagctccaatctcagcaatctgaccacataattccatgaaaacgaaaacatattttttttaatactatgaaaattcgtacgggcaaaataaggtgcacagatcagtgtcggtgcagacgcaatgaaggactgatggcgaattggccatcacaccacacagcactctctagtgacaaagaaggaattgtcgccgcagagttcagccctctagctagccctctcgtaattgaatggaaagaaaagaaggtttcttcaggggcatttaacttcttcagaccgcatctaatccgtctaaacgcggcaaaaggctaattcatcgtataatctagctagacctgactcgcgcgcactgttccaggccaatggcgctcgctaacctggacactgccgagaacacgtgagtaccttgcagtgcaaatactagtactagaagtacgtagaaccctagaaccacggaccatgtgtgggttcgtgttcaagaaagacgagagggagaaagattttggacccatgctgtggccctgtttagttataaagtttttttttccaaacttttaactttccatcacatcaaacttttcatatacacataacttgcatggtggtccgcgcagattgcgcggctagcatcattatattttctcttatataaaatcatatatgttttctcattatattattaaaatatattacaatgacaacataattttgaattttgcaataacttttcaaaactactaatgtgtaataactactctagtctcctcttctaattttccttattttttaattctgaatttcagctatttctaaattgtatttctatatggactctgctttttttttctctgattaatgtgagaatttataggcaatgagagcgaacgtgtaggctcctttttattccgaatttcagttggttttaattcaaatatgaactctatattctacttctaatattccttattttttaattccaaatttctatttttttttcttaattgtatttctatatggactctatactctacttctaatatttcttaattttaattccgaatttcggttatttcctaattgtatttctatatggactctatactctacttctaatattctttatttttaattccgaatttcagttatttcctaattgtatttctatatggactctctagtctcctcttctaatattccttattttttaattccgaatttcaactatttctaaattgtatttctatatggactctagtctcctcttctaatattcattattttttaattccgaatttcagctatttctaaattgtatttctatatggactctgttttttctttttctccgattaatgtgagaatttctaggtcatgagagcgaacgtggagggtctttttttttccaaattttagttagttttaaattcctatatggactctaaactctacttctaatatttcttattttttaattccgaatttctattttttttcttaattgtatttctatatggattctatactctacttttaatattccttatttttaattcagaatttctattatttcctaattgtatttctatatagaatctatactctacttctaatattccttatttttaattccgaatttctattatttcctaattgtatttctatatggactctatactcctcttctaatattccttatttttaattccgaatttcaactatttctaaagtgtatttctatatggactctagtctcctcttttaatattccttattttttaatttcgaatttcagctatttctaaattgtatttatatatggactctgttttttttttctccgattaatgtgagaatttcgaggccatgagagcgaacgtggaggctcctttttctattcctttaattatataatagatttttctatcacatcgtaccaatttcaaataaactttcaaatttagtgtgatctaaacttcagtgtggatgaaagatcagccacaggttctctccttcatcaaggcgtagcactatccaggttgacgcttgacatgacaagcattcactccgccgtacaccgactctctgtgtgtgttcagcacgcggatcccccggacgcgctgactccacctgcaaatcctcaacagtgcaagggggatcgctctagatgcgaccgcaatctaccacactgacgacgacgccattgctgccatcaaagagatagcttaattaaaaacagtaaccactcataaatggatgtgtttcagcttagcttcttgctgcagaatcgtctgaacgagaaggaaaaatgtccaatttgatcatcgcttcagtgaactttggaaataaactcgagacttgttagctcgtgtttacacctgcgccacacgtacactagcctctgcctttttgcactgatcaaatctcatcgaatagccgaccccaacactatcaatccttttccgttgtcaaaccgtgcagattcaatcgactgccgctgctacttgctaactacttccaacgatccaaggcaggcacgcgcaagagcaagcatgcctggagatctcttcttggtagttagcttggttgacccattaataccggccatttgtgccccccaaaagtgctcgatctcttcattagtgactagtacttggccacgacaaccatctttagatctgtaactacttctataaagtgttcaacttcttctgtctcgatcgatagcaacgtcgagttcgatggcctgttcaccagaaatcaattaatatgagaggttggccgccaaactggaaggaaggttaagagagtatagtttaataggagtacgctacgattcggtatacgctactcgtctatacgcctctc

SEQ ID NO: 439 - DNA, 31101 bp, Oryza sativa
aacgaaaatcttcgggcacagtgccgtcgttgtcctatgatcctatcatcctacccccaatctagcgagtggtactatccctgttccgacaagtgaaaacgactcgatttgatccaaaaagatgaacttttctcgaccagctagctcatcagccacgaggtatacgtccaaccaagcgggtgtgtctagttcacgctaaaattaaaaattaaaagtttagttgaaatttaaacgatgtgatagaaaaattagaagtttatgtgtgtagaaaagttttgatgtaagttgaaagtttgaagaaaaagtttagaactaaactcggccaatattgaacaaaaacatttggacggtggatgttgcgtcggagctggtccaatattgaatccgagtagttcccaacgcaaaggggaactaggcatgttagttttgaccatgagacaccttgccccaattcgttaattaacatatggctaatcaaaactcgtaaggcccagcgtgtgcagtgcagtgcagtgaggcagcaagctaaggcatgcaactacctaatcagtgctattaaattgtggccatgtggcaaataagacaggggaaggaggattagagaaaacggtggttagtcacgcacacatgacaaaacgcaagagacacgagagacagagaacagctcagagggtagctagccaatcagtggcggttgctccaccaaactttggaaacgagtaccaaaaactggtcgatgattccgtttcgctcatcatcaccggcttattttaatgggacattcccccactaaaaagctgagcggctttctccgatcgctaactacaatcaggcatccagaacgagtcgttgataactttaaaaaactactcctagtgccgtgctgtgctaccactgtaaaccctaaaaaaaaatgccacgctgtaacaaagttgttaccggttacttgaactgagtaaaagaaaagggaattgctatacgttatttgaatgaaatttgaatataaaatcttctagattttggttcattggatccatactaagattcatgcatcggcttctcttctctaactgtagtgggctccctttcttctccggtaccggcgacactcccaactccgatagggaatatacggattagggtttagggttggggtcaggataggagaggaggttggggagggggaagagcgggtttcctcggggcttaaagggatggcagtgggcggtggacttcggcgggcggcgaggtggtggcggcaccgccgaagccgtagggatggagaagggcggtgggccggcgttggcggcaggggcaaagcaagcatgcgattaggaggcgacgactaggtgatggtggatccggcagctgggagccgccggagacagggaagatgatggggcgggggcatctcgccatcaccaccttgagaagaaagagagggaggaagggggagcggggagggggagggggctcatcgaggggcccttatcggcgccgttgactcctttcggccagtcggcgaggcgggtgatagcgcggtggggcggtggcggcggtggattgggcggtaacgcgatggcaatggtggatcggaatgctcgaggaagcaaagggaacatgagaagaagaggtagggttaagggcttgcacaaaacttaaagcaaatttgatggtctaaaaatcgaatgatataaggtgggattttatattagaagaggtataggcatcaaagaaaaaaaattggtaaattttgtactcgtagctagtactggttccaaaatttaactgtcaaggcaagtacaagggaggtcggggaggatgattgggttgggtagagcggccacactattgcggaatttcgcgaggccaagtgagggtacaccaggacaccaggtactacaccagtactgggtctcacggcatctcgcatcgcgatcagcggtcaaatcccacacacacgccgtaggatccagtcaatggagagaggaaaagaaaaccaaccaacacaacaacacagaaaagcttcgccaagtgaatcacccaaaaaaaaaaaactcctctctacgactctaccaacacgccgccgtcgccggctcgctcgctcgctgcccatatatacgcgcgcctcgcgtctccacttcccctgctattactactagtacaaaaccaacgcgaagctctcgtcgcgcacaaccaactcgacaccgcggcgaggcgaaccaacgcgcggcgtgggcatggggaggtcgccatgctgcgagaaggcgcacacgaacaagggggcgtggacgaaggaggaggaccagcggctgatcgcctacatcaaggcgcacggcgagggttgctggcggtcgctgcccaaggcggcggggctcctccgctgcggcaagagctgccgcctccgctggatgaactacctccgccccgacctcaagcgcggcaacttcaccgacgacgacgacgagctcatcatcaagctccacgcccttctcggcaacaagtaagttgtaaacggatttcaatgcgctgtcatctgttcttgtgttcttggtgctgatcgatcgtttggttggttggcgcaggtggtcgttgattgcggggcagctgccggggaggacggacaacgagatcaagaactactggaacacgcacatcaagcgcaagctcctgagccggggcatcgacccgcagacgcaccggccggtcagcgccgggagcagcgccgccgcggcgagcgggctgaccacgacggccagcaccgccgcctttccgtcccttgcgccggcgccgccgccgcagcagcacaggctacacaacccggtgcacgccgcggcgccgagcaatgcgagcttcgccaggtccgcggcgtccccgccgtcggaggacggccacagcagcagcggcggcagctcggacgcgccgcggtgccccgacctcaacctcgacctcgacctcgacctgtccatgagcctgccgagctcgccgcccaagacgccggccgccgcgtcgtccacgaccgcgtcgcgccaccatcaccaccagcagcagaagaccatctgcctctgctaccacctcggcgtccgcaacggcgacgtctgcagctgcaaggcggccgcgccatcgccggccggcccacgcgcgttccggtttctcaggccactggaggagggccagtacatatagcacagcaggctttagggaaaaaaaacctgtaaaaaacacaaaaaaaaacggtgggcaatagagttttttctaagttctaatggagatgactgatgttgattagtttgattcttgatgtttatcattaaccaaaaatctgattcttttcctcttcccaattttctgatttgatttagcagaatcttacaaaaagtaattggagatcataaaacaaaactaaaatggaaattataatgagcgagactgtgagaaaatataaagtattgctgggttgcgcatccagttcgggcgtcccaagtgccgtttgtgtcatttgggacatatcgcgagaatacagcatgtggtgtgttttcggtaggtaggtacaaactactcctgcttgggttatccgatagcaaataaaatccattaatgactcatggtggttaggcaccggagaaagtgagactgacaatgttacattttggtgttaaggtttggctgttcgtttaacaatgacaacgacatgagattctaaacgtggtgatatatagtggtagttagccaaccaaccttagaaacctatattggtggtggtaactaaaatttacttttgtttctattggaatagcatgccttaaaaaatactctctctgtctcaaaatataatacttcctccatctatttttgatagtcatatttctaaatctgaaaaatttatttttgaatgacatatttcaatccaacaacctatcatcttaatgattttcttggatttaatgcgtgactctccattcttccacacaagattggctacatgggcatcgagaaatgtaaatattaatgaatcgcttatttacaaagaatgactagtaacatatttaaatagatgataagtagaattgcttatttttggtctgtgtgccaagatgaaatatgactgtcaaaagtagatggagggagtaacttgtagctctcaagatttatcctaaaatataacaatatctccaccaacattatcttcccaactaatcacaactctctaccattcacttctacctactttcttaataaccgtgtctaactctaaaacttcttagagcaggtacaaaagtaaactattagccagctgcaaacatattttaatgagataaaagatgagtgagaagagcagcgggctacagatctatagccagttgcagcacggactccaagacgcaatgtgtgtatgacatgggggactatatattaatagtatagtaagcaactattatatgaattggctataaatgaattggaggcagtagtaggctatattattaaacttgctcttatattataggacggatggagtaggcagcaacatcatactccctccatactcattaaggaggtcgtttaggacagcgacacggtcttcaaaacacaattgacttcttgtttctataaaaatatttattgaaaagtgatatatttatatttttatgaaagtatttttcaagacaaatctatacatataatttttacattttcaaactcaacagcttgagagttatttatgatttatattcccaaggttcgacttaaacattgtgataaacgattttttttatgagtacggagggagtatttctaaaataaacaattaaaatcgggtataggttggtcagtacagagcatcaattatgttgcatatctgttttccatctgatatataaaaagaaacaattatacatgtttttggctagaaaagatttcgttcacaagtaatactaataagaaagctataaaaagagccattatatttgagcaaaatggctccttctcgttaattgctaccatcgataatcttgatagggtgtttgatatagttggtaggaaatgtccaaactacgtatctctctcatctctcactattctttttctcaaatttagccatagtcttaccaaaacccatatcttgtgctttctctgtcaaaaaatattgcaacttaggatagagtttatattcctattcatattctatgtttcaatatttttagatagaggtagtaacattttatagtagtttcctgagcaatatgtactttatgtagataatacatggaagtctggaaccaagagatcgatataaagtcttggcatgcttggcctaatgtgtctcatgaaacacatggcttatggaaaatagctgaataatcattcgaaacttcttatgtttttgttacttttgtcaaaactacgaaaaggagttccttgcaggtaagttcgacatggacatggatatgtttattcttctcgtgactatggatatccactcgattaccctgagtccctgatccactctttctgcgctaatgtttgagggtatctggtttaattttctactttgtcaaatgaatcaaaagaaattaggcaacttttaacatgacgaggcaattcgttgattcataaccgatttttttgttcggcaacttcttaatactgcagcccaatgtggcgaatacttagccaaacacgtgcttatttttttccgagctggcatgtgtcaagtacccagtggatcttcttagttttgggaagatggaccaactccacagatacctggaagtttcgtgtcagatttgtagtgtgacacctgaagcaggaaagattgattatggagtccccatctttaaattccattaattatagtaatgctagtatgtgtcaatgtgtgtaaggtcaatgtttgattcatttgccatcatatttgaaacgagaatatttgaagtcagacgccgaatcgattgcccccaatacaaaaacggtcagagcatagatgatggtccgtggccggcgacacgtatgctgtccgtctcgtgactttaccaaccacctgtaccttgttgctgctgctcgttacgcttccttgttgcaagtacgcgaaatgatctgtcagtgtgatctctctcgtggcgcggctgcaatgtgaacctacgaacaagggagatgattgcctgattacctcgttccggattcagctaaaaacgtggttttcaagactatatgctgttgacaaaagagtgcagaaactaaaactgtatagtcatgttactacctcacgaacccgtaaaatctgcaagcttcctttccagatcagtggactttcatggctaccgggaggatttttctctcgaggttccgtaccatctactcccacaaaccacaagttgtttgcatatactcatcacgggttaactaaccaagggggcacacgttcttttccgacgttttttttattcttctcccccttgttcttctccatgtttatctgcagcaacaagctgtagataccgtcacaagtgcgtgacagattccgttacgtgacctcatgggataactccctgtaccaaaccgctttttttcttccttttttttttttttgccttcaccaaaagtcatcgtcgtcatcgccttgtttgcccatgatggcttacgtacgcctcggtggcgaccggcgccccggggttcctcgcgccgtggcgcgtctctcgccacgtacgtctcgtcgatcgcgccccgcggaaactttgagagattttacgttctctccctagccggaatcggctgtcgccgtcgggcgcggctagcgatcgagagataccatcgcggagatggcagtggcacgcgcgagccgcaaggtggatttggatgaggggggaaacgtgtgcgcgaatgcgcgatcgcggcaaaagctgcggcgcagtgcgtgacacatgcgcgataatcgttggagactggctggccggtgctgtgcgcgagcgggatcgtgaaaggtttccgcgtgttacaaaagttagttgtagttgatacgttgaaacgacgactaacctttctaatcattttagtcattaatcaccaaacatatattagacgaagacatacgttgtttagataataaaatgacaacacacgttatatatcgttaataaatattgtgtgttttatatcatcatctgacgtgttttaggtgatcaatgactaaagtgatggggaagatgaactgtcgttccggactaacttctccaacatcgcagaaatcgtctcttctaccgttcaccgccgtccggaatgcgtaatccttgcttgaaccgaactgaaaaacgtcgcccgtcatccgaccgaagggacccaaggtttggtatcttcgtttgaacttttggcatgcttttatgtcttatgctaacagaagatagccatcgcgtcgaatcaagaaaccaaaaatatcggctcatggtgggctaataccaaaaccgctaccaccacagtactactacctagtatttagtatcacttgactgtcaagacatgaaagcaggaacagcgactcatcctcggggggtgatctgatctcatctcatctctaggccggcagcaagtggtactactaactgatgcgaccccacgcggaggcgcaaagtgctgctccttgtgctgctgggcgtcgtggcgccgtgaatccccacacaaaacaccgttcaaatcagcgagcttttagctttggaggcgatcgcatctgtgtgctgtgcgtggggggaaaagaacaacgtgggatcgatgtggttgttgctggttggtggggcgatgacatcaccgacgaccgcctcgcaccggcgcgccgcacctaaccgggcaatccaccggtggatccatcgaaatcgcgagctgtagctgttcccggcacgcgttcggccttgggccccggcccccgcgacggcacgcgatttccgggtcgcgtttggccttggcacgctgtaacttggaaaaagaaaaccggccacttgggcacggatgatgcatgcatggatggaggagtagtgatctaatgatctaatccatatcgccaacctaatcgtcatcttcttgatgaaggccgcaactggctaattagctcgtgacaggaaagaatgttcagataacaggtgatagatgcgagaagggtccagcaggtcatcaggtttgcaagtttgttttctccagctcagtttgtaatttggtcgagaattatatgtcgagtttatcatcagtttaataaatgtcctttgaacatagtacagtggccggtcgggccaagaaaactggctttcgaaacgaattgcttcacgctggtgccgaggcaaagcatcatggtcatggaaaggtgcctgcccggctgtcctactgcgtttgtgttgtttcttgatggatggatcatgatcactcccttttcagtttagaatcatacgtgcaggcgtccgagaagagaatttagttctttgattagtttaggccttttcaaatactgcacagtactagtttccacacaaactgatggagttggcagcaccaatgtcaaaaaggaagtctatgcactttgatagtatccgttttttcatatttaaggataatctctgtcttgatcaatcattgactgaaaaaacaaaggtgaaaggatcattagtactagctttctaataaaatcagctaataaagctcccaagtcgacgtgtgcatgcttaacagaaacaaaatcagctaaaagcacttcttgtttaatagaggttggtcatacctactcctaccattttgcccaaacagtgagctgtggtaggccataagcccatgataagcagcctgtcctcttctccgcatcttcctggtcatgtgactttgggacctcttctcagaagtttcaacattctttaatcacaaccgccagtgagttaatggcagatggcaacaaacagaatttgggcttaactgaaggcatttggttgcagaggtaagccatgtgctttgaagggggcaaaaccggcaaagactatgctgaaaccaggctaacctgctgatatctgaccatttttagagtgtttgatactcctacttgactgtcatttgcagcgacggtccatttggacaaagaaatgctcctagagtgtttgactacttgttgtaggagtatgtatgtaactgtataagaatgtgcaactgcagatcttgtggaagctggaacaaataataaggcgtggaattggccgtcttgcttctgcattacaggaatatggaggccgttacagcgtcgacaacagacactttgcagcgacatctgcaatgtcccatgacaagtggaagaacacactgtagaaattcctgtgatgaaggctccagactggagtactctgttaaaaaaaaagccaaattaggtgaggattttacatcacatagtacaactaatcaggatataaggttgtccagttttgttgtttcagactttcaggtgatatcaaatccccatgtaaagtcccttttgattcgtagcaatgaaaaaaaatgaaggaacagaaaaagacgtgattctgacaggaatataagtgtaaaatagggagattgcaaaacacagaaaaaacataaaaatgatcgtttaattgagccgtaggaaaaatataagaatcaaataagagagataaactcaaagattttttttttcaaaaggttggacctcttgcaatgaaccattccacaggaattacttagaatttggaaaactccaatcttttgattcaaatagaaaaaattttaataggatttcaatcgtataaaattcctctgtaaattcttagattcaaatgggtctaaattgttttttctgtgatggagcgagtatagaccagtcggagtcaacaagtcagcttgcagttagcggcatttaatcggaccagtcctaaaattccaacgtttcaccggcattgtgcagtgcagcgctgtgtcgcagagggagcatatcaaatccttcttggaggtgctatactgcgatgcagcagcggcccctcttcaaaagttcaaacctgatgagatgggagtgctgtgccagcatttatttcctctgtttacaaaatcaaatcagtatagaacgtgacatatttaaatacaatgagccctctttgattcaaaggaaattcatataaattttagaggatttcattcctataggaattttttctatatatccctttgaatcaaagtaatggattttatagaatcctatgaaattcctatggattgcctaatgccatgcaagttttggaggaattctaacatgaggtaaaacctcttgaaaacttttctttgagtctttatctctcttctaattcctgtttttttcctgcggtccaatcaaacgaccattcctgtattttgcaatcatctgttttacacttacattcctatcaaaatcctgcgttttttctattcctatattttctcatttctgcgattcaaaggggccttcaatctgaatagatatgttcagattcatagtactaggatgtatcacatccagtacattgattttttatgggacgaagggagtagtatggttctcatcagacaagaaacacttaggccccctttgattcaaaggaaattcataggaattttaaagtatttcatttctataggaatttttcctatatagccatttgaatcaaaggaatgaatcctatagaatcctatgaaattcctatgaaacgcctctttccatgcaagttttggaggaaatttagcatgaggtagaacctcatgttaagaatcctttgattctttatctctcctcaaattcatatatttttcctacggctcaatcaaacggtcattcttatgtttttcctgtgttttgtaattctctgttttacacttgtattcttgtgagaatcatatgtttttcctattcctccgaattttcattcatgtgaagtactccctccatccaaaaaaaagacaaaccctaggtttccgtgtccaactttgactgtccgtcttatatgaattttttttataattcgtattttcattgttgttagatgataaaacatgattaatattttatgcgtgacttgtctttttaatttttttcataattttttcaaataaaacggagggtcaaacgttaaacacagaaaccaggtttgtctttttttttatttttgagacggagggagtaggagtaaaatgggactttggaagtagaggtaaaatggtcagatgctcgaaaagctgggacatcataggtagagtctgccaaaaagagtgggctagtactcttttgacgcactccagtcctttggtgtcagttggaccggtatgtataggagctggtacaccatggtagaatgacacccatttattccttttcagtttatggaaaaggctgtgtttagttagcgaaaaaagttgaaagtttagactgtatttagttcgttgaaagtttgagaaaagttgaaagtttgaaaaaaaatttagaagtttatgtgtacataaaagttttagatgtgataaaaagttggaagtttggggtagttagggtgaactaaacacggccaaaaaaaacttctattacatgttacctccttcaaaaaaacgaatttagaataggatgtataaacacaccctacagaaactaggtgccgtgtgaatacattttcttttttcttttgttgaagacgtgaatacttttgtcttggcaaaatgcaaacaaactaatgagtagaccgtatggttttcagacttcaggctagtatgccctttctactccttccatgtttctcactatccttgccgtgccaatgtggtcactgtctatggcatgtgcggacgtgccgattaaccgggccacagtgccattttgttaactgaatcaggtcggcgcgatataaagtcttgctctccccatggattcacggtacagcgatggctccacgtcgccgtcgtttcgtgccacgcgacgcgacacgcatcgccggctgctaacctcgagattgccttggccgcggtcagctctccagctgctttcagtttaatcctgcaaattttcgtcggggtgtggtgcagccgtgcaggttaggttcgcgggaacatgccctcattgactcttgcgagtatcatggcactgtgtgttttctacacatgtgtttctattgtcgtttccgtgtctggataccagctcgttgcttgacttgctaggatcccttcttgtctgctggttgaggcagggaaagatgccaccaagttttgcctaccggagtactcctatactgtaccttgtcaaacctactgtctgacgacaacgtcgttgttatgtactccgcgtcagtagtgctggtgcacaacgctctgctcctttcgtcaaataccgacctgtttttattcctcacggcagggaacggagcagtaatggtccagtacagtgttgcattgactcccttgaaaacttggacgagcccgtgacctcgcgtgacgctgacggctgaaacctgcaggctttgggcacgccgcccttgaaccaatctccgttattccccatgagaaaaagattagaggtgatttattctacacttattatggagtgaaattattctcctcaattatctcctctccaaatcgaaccaggccaatttaagtactaccttgtattagtcgtattcgtacagtactcctgtataatacggagtacgggtaagtagcacgcgtactcgcggcctgcatcctcttcgggctttggtgcatcctcttcggcctgcatcctcgcgtaccaatatgtggcctgctggaccacacacggacctagcaatcacagtgcagaccaattattgtgggccgcatattggtcacaaggccgacaaataatacggccctcaagtaagtagcaatgcggagagacaccgttgtttacgggctcttcatgccgctggaaatctggtccgaactgaaggtgaggggttgggccacaagacggcggcgtaactcggtaattgagctttcgagagggtggcgatgtacgtttgggctgtgtgatttacacaagacagtttttcctttttaggagaaaggctttgtgtacttggcgagtgggctggatttccaccggtggtttccttttgtttttgcctttttttttttatcatggtgtccttttgttttttttgggaataagtttattttagatcccttaacttgacagcaacttcgattttcgtccttgaagaaaaaacaagtacaacgggacccaccgttgtcaaaattggtgcaatataggttccatgacagtatagtgggtgttttttatctgatgtggcaatttgacccgagtcaaccgtgccgagtcaatgtgggtcccacattggccacagttcagttgttggaggacttggagctggagtaggccaattgcgtcgttgtgggcggttgcggcgaaaggttgggacatcgggcggcggcgagctcactcgtgacaggcggaggtgatggcacgttcactagtagaggtggggacgacttcacaggtgtttgggtcgatgtcagtggaggcggtgaaggcgtcactagagaaggacaacgtgcaatgaggtggacgacaaccggcatccatgaaccgttgtgccccctactccagcggccaccacggtcgcctcactccagcaactcctccgctagtcctcgctcccgccgcatctcatcgctgacaagctctcttcatcctcctcctctgtgtggccgacacagtggcaatggggatatggggttgcgccattgtgtgggagattgtgacgagacaagccaacgatgacgacgtcaggcgcgaggaagatgacgacgtcggagaggaacgatagcgagagaggggcctacagccaccgccagcctagccgccaccggggaccagcttcgtctagggcgatgctgacatcctccccctccccgacaagcgtccctcaaccctgcttcatcggctggcgggattggactcataaaaagaaggggagagaaaagggcaaagtgaaagagagagggggaagaacaagctaggggaaccctgacatgtaaggcccacgctgatttagattgccacatcggacgaaatcaaatcgaactgactgtcaagttaagggacctaaaataaacttattcctttgttttccgtaacacgtatgtgcaactggttcttctagtttgcagtttgagacaactcaaaagcttagaagtccgagtacagcggaaatagaaatatgaacagaggaacaatcgtatgcaaacataggtgatgttcttttctttttttttcttttgaagataaagatgagaataaagattaagtttttttactaaaacaatatggtattaacatatgattgattgagttttaattattataaacttgaaaaatatattattatgatattttagagcaactttcatatagaaagttttcacacgaagcgcaccgtttagcagtttgaaaagtgtgccacgaaaatttttatcctcacttttgttggagaaaaaaaagacctatgaaaagaaaagtatatgaaattgtgcagccttgttgcaggtgttaatatcgcatcaggcactggcagtacagctactccataccatgaccgtttcccatctatgattatcccataaatatatgcatgtcaagttgacatttgacaacccaagtttgttcccacccaacgcggaccaatcaaataaggccatgtttaattcgcgaaatgaaaatttttagatgttacattgggcgtttgattcgatgttggaaggggttttcggacacgaataaaaatactaatttcataactcgtctgaaaaccgcgagacgaatttattaagcctaattaatccgtcattagcacatatgggttactgtagcacttatggctaattatagactaattaggctcaaaagattcatctcgcgatttccatacaaactgtgcaattagttttttattttatatctaatgttctatgtatgtgtctagagattcgatgtgatttttttttaaaaaaattggaaactaaacaaagcaacaagacataaacaaaggcagaacaaaagaaagctacgccaggtcgctcgactccatggctgtgtaagaggtcgaatttatcctattttctaaaagaaagaagatcaacttcgacaagttgatatgtggtaggaccctagttatcaacggatcaaccctacacagatcacctcgaccaatcgataagtccgacgacacggcaacacggctacttgttcccagactggcacgacgactgtataatatatgcgaccgtataacgtgcgtaattgatgctcaattcggcgaggaaacagaagaaaaaaaagaaacaaaaacgaatggaatccagatgggataccgatcatgtgccggccgtataatcttcagacttgaggacaaacacgacacatgaacacagagacgttagaggcaccatgcatctccaggtcccacgttttcaggaatccaatcagggatggccgagtcagtcagtagtggaggtcacattttcagtttcaggttagagacttcattttatttttcttttcattttgattagttgaggtagttcagtgctcaattaagtcatttacgattaaattaactatgcatcaactactactaatctatcaccaattggagctttggaaaaggagaggaaatgctagtacgatatcgaagaatgatgtggtcaggttggtaatggttgtctacagaaaagaaaagagaaaagaaaacgaaaagggttggtgatggtttgtctgtcccagccatgagcgagctgtacaccgcctaatcacacctccaaacaccggtttaattcaatcgttgtcccaatcaatcatcctgggggaccttaattgcagcattggtttatgcctggatcaatcatcgatccattttctctgtattagttgggagctaatccatctcatcttgggacttaatttggagcaaagctccaaaaatatattccatgcatggggtattatattattgaattgtgctactgcaaatgaggccatttttctgagcatggaactgaaaccatcatgtagaaggggacctggctcttttatggataccaatggttgatcacatcctacaggtgcccgtgtcacccccggaaatgagggattagctttgctaattaggtgttgcttttggtggtacgacattgttgccgtgcatgcaggtaagcgtcgtggaaatgaatgcgctgagttagtggcatgcatatgcatatgtactgcaaaatgctagtatatatttttgtatatgatgattgttcagttgccaaccaacagttggttgcataaagaacagtacatgatatgacactgacacgcgagattgcagttagattttcggttcgatgggttgtcacagagattccgtttagtttaggcgttgtcaaatgttctagttctaccaacattattccccttttatttgaggtttcaatgtctgaatgtctgaatgcgtgcttcaaaattgcccatgtttgtgccgttgatttggtagaggaattcgcatcggttgtgacgaagaaaacatggtcgagatggttaaaacgacaataggatccggtagccttgatccgtcggtttcatagaaaatgaccacgtggaacttagggaaatacggatcatcctccaacgtctagatcagcagcggctttgcataggattctcatggcgaagagataccttctctgtttctttaccaggtgagaaaaaaataaaggtacataggatccgtgcaagtttcggtcatgcatttgacatgtcagtgagccagtcttacatgtacaaagatgggttttctgcctctaaaaatacagttctatttcgtcagttgcagagatagcagccaatcggactgcaataagacgcctggtcggttgcccaacgggcggtgaagtgaatctcctccatgaaagtatccatgtgatcgaatagaaacagatttgtcgattgggtatttggattctttttaaagatgatatttgaactagtgacagtagtagatagagagtcgaaccaaatttgtgaagtctagatgaaactcaatacagttattacatgcctattctatttcgcactcctggggagtatggctgtatgggtgactgcctagagtgatggcgtacattagacatccaatgttagagactcagaggtcactagatcagtacattggacgaacaggtttcattagcaacttggttagttggtctccatccgaacgtgttgaaatattacagtgaaatatctaaagtagtgaaaacactaatgtttctccaatcctgattgagccacgttatccgttcactatgaatattacattggagtatgcatatgcatgcgttctatataattcaacaaatattaagttcatttccaacgttaacttttaaatcgtatgaatacatataaaaaatttacccctaaactacttttcattgattcggtttttttttcagccttggagcaacgatgacgctgcatgtgatggagggaggacggaaatttcgagcggtagagtcgggtaagattggctaaacctgattgcgacttgctaatacaatatttcttgggtctcgtcttcgtttccttctctttggccgagtcactaacaccagtggcgctaaagtctgcagctgcagagactatggcacactgtcttgggttaaaatatcatggcacctagacacctgtttccaaagttaagatcttaggaagaatccaagatggtttagaaaacgctaattataagaaaaaaaaaccgttctttctagaactcatctgcttgtcctgtgcgatggatcgagatgagatgacggagagtttctgatcgatcgatgtggccctgcatttctggtgaacaccaatggatgcctggcaactctactggagtgcttccaaaatggtgttgacaagaatacgttgattagttcatgtttgctttcttaatcgagatcagatcacagagctttcgatccgttaggtacaaagcatgctgagcataactctatggccgtcatttgaactgaactttaaaactgaacagacagtcagatttgcaatatattcaaccatgccaagttatgctagctctgaattcctattgcttcttcagctgaaaataaatcagatctctctcctgagaaattcagctatcagggacctgcagcatgtaaggctgcgtttgttccttcagtatgatacgtaaaacgaaaagctcatcaacatataattgattaaatattaattataacaaacttaaaaatttatttgattattcaaaaagttatatagatttttttaaaatatattgttttatagtttaaaaacgtgttaacaggaaacgagaaaattatactacggagttgaaaaaaaagaacatgcactaaatcctccttattccaatataaatctaatcgtatgcattcaaaactacatttcagtttttgtattttgtagtttctatcagcattggattctgctaaagtgctataaatcggcagcccccttccgatttccgccgtccatttcatttttacccaaagaaacaaaaaaaagtacaaacagaaattcttaaaaaaaaacccagcaaataacacgtcattaaacggaaactaatccgttacatgacgtgggccccacccagccgcgccagcccacctattcgttcggcttctcccccgcccccgccgcccgcctcgttcgcttctctcttccccttccttccattccagctagcaaccgcaagtccgcaacgcgagaaacgcaggcagcaaagcaagcgaacccaaagctggcctcgcactcacactgacagccttgctctcctcctccccctatatctctcctccctccctcgccgcctcctccccaatcctccaaaccctaatcccccacctcactctctctcgatctcgtgctctcctcctttcgcgagcgcgttctttggaggggagatggcggaggagccacagccagaggccgcgcccgccgcggtggcggcgacgaccgaggtggcggtggcggagaaggcgcccgtggaggcggagaaggagaagaaggtggaggaggagacgccggcggtggaggccgaggcgaaggaggagaagaaggatgaggcggcggcggcggcggcggcgggaggtgatgaggccggggcgatagaggggaccggatcgttcaaggaggagagcaacctggtggcggacttgcctgacccggagaagaaggcgctcgatgagttcaagcagctgatcgccgccgccctcgccgcctgtgagttcaatctgcctccccctccgccgcctcccaaggcgaaggttgaagccgccgttgaggagaccaaggcggaggagaccaaggccgaggaggaacccaaggctgaggagccggccaaggaggaggagcccaaggccgaggtggcggcggcggcggcggcgccgccggaggcaggaaccgaggagccgaaggcggaggcgtcgtccgaagaggccaagaccgaggagccgaaggccgaggcggcggccgacgagccggccaaggaggagtccaaagctgaggcggcgccggctgaggaagccaagccggccgagccggagccggaggagaagaccgtcgtggtcaccgaggaagaggcggccaccaagacggtggaagcgatcgaggaaaccgtcgtgcccgctgctgctgcgcctgctgccgccgccacggaggaagccgcggcgccggaaccggaggtgcaggcggcggcggcgcctgagcccgtgttgatctggggcgtgcccctggtaggcgacgacgagcgcaccgacacggtgctcctcaagttcctgcgcgcgcgcgagttcaaggtgaaggaggccatggcgatgctcaggtcggccgtgctgtggcgcaagcgcttcggcatcgagtccctcctcgacgccgacctcgccctgccggagctcgacagcgtggtgttctaccgcggcgccgaccgcgagggccaccccgtgtgctacaacgtctacggcgaattccaggacaaggacctgtacgagaaggcattcggcgacgaggagaagcgggagcgcttcctcaagtggcgcatccagctgctggagcgcggcatcctgtcgcagctcgacttctcgcccagtggcatctgctccatggttcaggtcacagacctcaagaactcgccacctatgctcggcaagcaccgcgccgtcacccgccaggccgttgctctgctccaggacaactaccccgagttcatcgccaagaaggtactaatgatttcactgccattgattagtgctatttgcgtagctatttctttgcaactgaagcaattttagagtagctatttgtgtttgtaggattcaattcttaattaatgcatttgtagtttaacgttgcaagtgaatgattgggctaaaactttgttctttaggcaatgtgataaaggttggaacttttagggtgtcactgctagctcttttgcaccaattttagtactggcctgagttgactgttgtcttttggcgtgtgctttgttgttaatcatagcgcgagctgggatcttttccttttgttctatctttttctggtacgatcagatgagggagttctgtaaggctgttaatataccaatttgtagttcattccaatagtttcagttaatgaaatgtgatcaaatgtttttggttgggtcatggtgtgcaggtgttcatcaatgtgccatggtggtatctcgctgccaacaaaatgatgagcccgttcctcacgcagcgtaccaagagcaagttcatttttgccagcccagccaaatcagctgagaccctcttcaggttttgcacacagaaaccattgagaatcaatgcttttggtattttcgatcttccaagtttaatttgctcatgtattgctatctaaacgcagatatatcgcaccagagcaagtccctgtccaattcggaggtctcttcaaggaagatgatcctgagttcaccacctcagacgccgttaccgagctcactatcaaaccttcatcgaaagaaaccgttgagattcctgtcactgaggttggtccttgtgtacgtgccaaattacctagaacaatctttagatgcactgatcgctgatactgattatttccctatatatgaaatttgcaacctttgtagaattccacgattggatgggagctccgggtgcttggatgggaggtgagctacggagcagagttcactcctgatgccgagggtggatacacagtcatcgtgcagaaaacgaggaaggtgcctgcaaatgaggaaccaatcatgaaaggcagcttcaaggttggcgagccaggaaagattgtgctaacgatcaacaaccctgcatcaaagaagaagaagctcctctacagatccaaggtcaagagcaccagtgagtccgtttgaggttgcagctgcctgatcaccagattcaccacaatggcagctgaactcattccctgatggaagagaaaccttttggttttggttctttaatttattggttttgctgttttggttcacattttgtatttgtttaattaaaaaccaaagtgagcttgtttttgtgatagttggaaggagagggttgatatgatataatgacatcgtgatggtttgttgagggcagaggacaaaaattgtggaaggactgaagaatatctgctgctttgtatatctgtctgtacattgcatctctggattctcatggacatgttaaatttagaagtacttgtcatcattcaccaatccatgttaccctttatatttctcctcttaatttccttgtctctcagaatctgagggaattatataatcttgatttccattctctaaccttttgcttgcccatttcctgcaagtaaggatcaattgcaaaatgatcatggtttcacttgcaaaatgagaactaccctccatccatttcttttctgtatctcctgttgactgaaaagaaaacatgttttttgacttctcccttttgtaaattacttactgcctgacttgccttaaacgaacaaacagcatgaggacaagatgtgcaggccaagcaggaaagcgattaggcatcttccaggtgtttgtgctgctaatgatggccataaactaagcgtgggtggagcaacatccagaaccttgttccaaggctgtcatcgtgtccctcaaaacaatccgccagcgccaatcagccacaggagaaacagctgttgcagataaacaaggcaaaagaacaatgcagcagtgcaagaaactctctcctctcctcctttgaccacgacagcaaaggaaagaataaaaaaaacatagggccaaaaggcctcatatccagtttggccatgtgcagtgcaagggagctttgaaaaaaattcccttggaggacgagcagaagagagctttcagctttgtgtgtgtgcgcccgggcattccggccagccatttcgacaggtttggttttgagtctcaagtgttgacaccctgtgtgttgccctcttgtctttgcttgaaccaatgagactggctagaggcaaaggtcccatacctgcatggctgcatatggctgtgtttttaatggcgagaggaagaagaagaagacgacctgatgattgatgattagtggtggcaaggcaatggcatcgacatgcaccatttgtcatgtttgacgtttgcgtgcccatttattcagcggccacaggacgtgtctccggttgtaagaaaggttgccagtatcaagatactactaggtagcatcgttttgcttaaatagtatcatatcgtagaatcatatcggaatattatgagattttctttttttacgtttaattaatacttaaattaattgcatatagccattctatataaaaaatatagtaataatatatgtcatgcaaatatagacatttatcaagagaaaccacgttggttttgatatatttaactgatttctatataaacttgagcatatttatttacattatttttaaaccatcttattttaaataatattttgtagtatcgtagggatcgtacaatcgggatatcacctaagatttcgtaggatcgtatagtaatgaatagtaggatcgagatactatgaaatttaggatactatgtgggatcggtatcgttttcacatggtagaatcgtagtatcgtaatatactattataataatcgggatattgaaaaccttgtgtaagtagggactcgcccatatgccagacagacagcaccatgagtttatttcttcctccgtgtcaaccggctgacggctggcctcaacctcacctcgcttgaggagtacttcctcctttcaaaatgtaaagtggcccactttacattttgaaaatgaaacggagtgagtgctactgataggagttgagatgagcacggtggaagcctcagtaattccgtcctcgcgcgcgcgcatgtctgggtccccgccggcggcggcggcggcggcggagatcgctctcgcgtcgtgggctaataaattggaacgcgacagagttgcaacaaggcggtgggaagtgcgcatccatgggggcagttggaacgatacttggaccagtgaccagtccggattgggctcgccgcggtgcagggaccagctatagctaagccagcgacaatctgggggccaccgattaggcgccggtccacggccacggccgtccagactgccgtacgtacaccggactccccctcccgtccccgacgaggacatggtcggtgagacgctaatagtaataacttttgaggtattttgtagtactacgttctcagtgacagtgcatttgagtagcgggttgatgcgtttgcccgtacacggacacagctcgtgcatgcgtgcgtgcgtgctgctcgctcccaactggcgtccgcgcggaccggtcacgccgcacgcgcaaccggggagacggacggacagagcggcaaggcggatctgacacgcgagcacgcgtgaggacggcgcgcgattaaaacggctccgattccttcctccctcctgcgttttttttggtcgttctccgctgctcgtctcgtcctcccgcgcgcgccgcagagggtatcatgtggccgcggactcgcggtcctcctaaccgggcgccgggcgcgtgaggcgacggggtcgcgcacgcatctcgccttgggctgggctgggcttcgcttgcagctcgaacgtgttggtgtgtgctgcggggggtttcgtgactgaggtgtccctgtcgtttctccagttcagctacacgacggatgccgcggctccactcgctggtgctggtcagtccagccaatgcttgcaggattgcggccgtgaatcacgcgcggcgtatcggcaatcaaaagactcgtactcctactctgccacgctgcccgcacgcgtacgcgatccacagcgcggtcggtggcctgagcagtgtaatcgtggatgggattcctccgtaacttggcgatgcaggtaaattaaacctgtgttggttggtgaccccatatcgtgtggctacaaagctgtttggtttatgatttgtgcaggattaggcgtgtctggtttatgcttcgtgctgcagcagcagcagcagcatcggtgcttcgtcagttcaacacaatgcctgacttgtgcaatgtccagagagcatatgagcagatccagtgctatgtcgtctagagattaatgtgctctagtacctttttttccccaagatatgacatgaaagtcacacagactgtttgccagccggtcggctgcgtgcttgcattgcaccacaaacccgtactgttaattgctaacagatgtaaggtgagcagaagccagcaattggcaatctggcatgacaaaggagagcgtcgagttatttcggctgccatcaaacacaagagctaaaaacacagcacatgatgaggataagtgagccacttcatttcaactatcagtagaccaggtacaaccagatacatttgggtacccaaatctgccagccagaccgccaacaagtagcgtgtttcgcattatgcataggtgctaaaggagatgttttcagtgctactcctgctcccaattaggcaaccgcaattaggattagcactccatttggcgaggtataaaggcgagaatataacagctaggaaatgaaagtgaatcgttttgtactccagctccaaagttgtactagtagtgagtgaagaaagaaagcagggaaaggcgaaaacctaaagcataccatgttttcgggaactgcaaaagttctgttcggtgctcgctcgctctccagttcaactcttgcatcctcactgcagattgatcatcatgaccgattgtaaatcctaaatctcctgtcgttaattatgtacctgcagatttgacagtactatattttgtgccagagcaacagaagtaccactcatcgactcaagagctgggttaagttagacagtaaaacaacattctgaaacaggctgaaaaaaactgactcacgattgcccgagaaagtgaggaaacagttgaaacctgaaagcgctgaattctgtatacacaagtagtagtactggagtactctactgaagatgggcatgacttgaaggctgaacctcggattccatttcatggcaacggttgcaaaaccgatgcccactatttgggctattaaccctttttggagccttgtatgagtatacgcgaccaaagtcaccgagattcaggccacgtgtctcggggcaacgagatgctctttcgaaaaccctttacaacgttcggtgttcatccgttgattatccttgcaacgtttaaggttgcagaattaggatatccaatgatctttttttagataatgtggttgattaataaaagaagaagcgacattagtcgcttaatgatgacagttcctgttgaagaaaaataaagggttctctgtccatgggtgttagcagatttcacaagccaaacatattactctttattatctaaaaaaacaagcatattactccggtcatacataagtgacattttagataatgacacaatcatcaatgcacttgttttacaatatagaacttatactacaacaagtatagcaaagttataatattttgaaaatatttttgagacgagtctaaccatattacttttgaatgctgaattgaaatatttaaacagaaattgacaatcaaggtttaaacatattggttgtacgcatttcaaaatgttatttatttgtgaccggagggagtagtaccctaaactgccgctacaccttaataacattgcagaatgccagaaagaaaaaaccctgaagatccaattctcactaaaagcatcggaggacacttcatatcaatatatcatcacgactgcccttcagaatgcacactttgctacttcttgaatcttcttggtttaagctatgttgatagtgtgacagacgagaagaattgagtaggcagctgtttgatgactcagtatagcttgcacataaccacgcacttggtatcaaaatgtgggttggtacttggttagatactactccttgctcttctagaaccttgaacggctactgatacaaaattacagtcctagcactagactacaacattaaccaaactgaagaggcagtacatctcacgtatgctatatctagcccagggcatgagtgacttgggggaaaacgactgtaatgctggcaatgcgatttctactctgcatctataatgaactgcatttctgaaatgatactacaacaataggccgctaaaagaagaataacttatcaggaatcccgtagcaaggagttatttgatggatccaagaatacactaatttcctctgcaaaaagaagaagaatatactaatttcagtttactcctagaaccaaccacaccaaaaagattgacttcacaagtttctgcatatagccaaggtgatccaggtactctgagttgggcaagtaaattcatctatttaatggccagtgtagaaagatttccattttcatatttttaccagaaaggatatgttacaaaattctctgaaaaaaaaactaaaaaaataccaaaacaagtgaacggcacaatcagagtgacaggaactagctatttctaactaatatttcaactaccaactcctcgtttttattgaatttacatagagattgtgatgaagaaacatggtcggtacagaatttgagttttacctgatattctgcccttcgttaaatttaaggatgaagtcagacaaaacactgctgtcgttgcaagagtcccttgtggataaccatctgtcatcaagctgaacttttacatccctgtgctaggagaaagcataagttcatttgctattaggagtgctacctacacttcaagatagacttgataaaagaaactgtaggtaagctctgcagctcagtagggcattaaaccatctatatggcaacaaagaatgaagacattaagtacttataacaatgtaggacaaccagacataagatttgaatattcatgattactgaaaaaagcatacctcttcaagctgagaacttcataatttttccgcaggtaatctgcatgcttaactagagcatcctgggcatagtccttgccaacagttctaactgcagctgtattaagcaaattttccaatgaaccatgtttctttagaagtttcactgcagttttccgaccaaaaccaggaacaaggtgctgtattcctggaataccatctgcttcatcacctatgaagcaccctgtgcagaatagcttcgatgcatcagttagctagatttcctaataatgataaaattaactttacattgtaggataatacataaaatatagacatatactcactgaggctcaaatctgcggttgggtcacacttgtactgtgcaacataatgcctcagcgtataaaaggaccaacggccaatctcaggaatgggcataactaactgaacatcttcagatatcagctgcttgaagtctttatctggtgagccaatgacaactctaaaacctttctgtaaaacttgctctgttaaggtagccactacatcatctgcctcatacccatcgactctgacgacctgaatttgccgtttgcagatttgttcagcgtcagaaactcagagctctacctaagaaaacgttgccgatttctcgattttagtaatctgtatataaaagatctggttcacctaccggaacattgcactcgcgaagaacatcgataacgcgcgaatcggcgcctgtaccagggccacgaggtcggtgcgccttgtaggacggtagcagccgccgccggtactcgttcccgccctccccgtccaaaacctaacacgaagcagagataatttcataagtgactagctgagaggagcatgtaaggacgattccttcgttggggtctgggagtgcgtgctcacggcgacgacggggtcgcggaggctgacgtgcgcgaagaagagcgcgagccagcgcgcgaaggcgccgaggctgcgctgggatccgcggaagcagagagggttgacgtcgaggaagaacacccgaggtttcgcgggcttcgcgggggcgccgtccctgcccaccagctgcttgcgggaatgcctcgctggaggcggcggtgggatggagacggcgaaggtggaaggggaggacgacgaggatacggaggcgtacggggtcacgcggaggcggagcgagcgaggtctacggggcgccgccgccgccgccgatgacgacgacgcgacgaccggagctaccggcgccgtgctcacggcgggaggtggcatcgcgatggcgctcggtttggtgggaagcggagatggggatgtggataaagggggctgaaataaaaaaataaaaaaaaggagagatccaaatattgctgggctttttactaaacttcatctaagttatgggccaaaagcccatttgctaataagctctcaaggccatgatgtatttggcccagtactgcttcctaaatacctacttcttccgtcccaaaatataactacctagtacatgatgagacattatcgtagtactaggtaatgtcccatcacgaatctggagtccagattcgtagtactagataatgtcccatcatgtaataggtagctatattttggaacggagaaagtagtataaacaaggctgagtaagttgagttgagtgagagatgtgcatgtgtgtacaaggaagatcacggcacagcagggatcaagacatgagtgaatttatgtaaataagtccaacagtgtatttacaaacagaaaataatatgtgaataaatcttttatatatgtgttcttagcaatctaaaagtaaaggctgaaaaataaacttcaatgagaaaaccctaaaatcaactacaaatttaaggttaaaaaaatcaaattttgcatgataagcataagcataagcgaaaagatgaagcttttagataaaatgaataagttctctctctaggtccctcaatttatcgtccaatatgatttttttttgtcctcggtctagaaaataggatacaaagcatcttccaacttataaaactgtacaaacgagtttcctcatcagtattgactccggttttagctaacgtggcgcatacatggatcatttgactagtttttcgttgccacgtggcattaacatagtgtttgcatggcaattcaatgcggaaaaataataaaatatgtggggcccacatatcggttacacaaacaaaacaaaaaaacaagtgggcccatgtggccacacatgtcatcatcactacttccctcttctctctatatttctagttttcttttcctttttgttttttcttgcttcttccccgatggcatccggcggctagccgtgagcagcaaagagaagggcggccaatgggagcgccgcgccgccggagtgggagatgtcacgtggaggtcggtgttggtgtcagccatggagcgcgcaagctcggtggcaaagatgaagccgttgtcatcgcggtcaaaggcccttcctgtcaacgatgtcatcgccgctaccgacctcccaaccccctcaccagcctcgccaagaggaggtcgagcgagtggatccgcgacgattaggtgtgaattttttgcgcgtgacgtgtgtgaaaatttctttctagcaatttttcccttcatgcataaatttcaggatgatccgatgatcacaaatctaaaagtttcgagggtaaaaaacttgcgaaagttttctagcaatatatggaccgccataaagtatatgggtcgaaacctttattctcatctctaacctaccccgtcccaaaaaaaaaagactaaccctagtatgtgtccggatttgtttgctaggattgggttttttatgggacggaacagtaaaaactttgcaaccatgtacctctactagtgaaagtattcagagggagacatatcacggcgtgacaaaaccgacaagtattcatgtactatcttttgaaaataactttattcttttagacattgttattatcgtttcccggcttgaatccaaccagtaatacgctgaaatatcctagacttgatttgtggtacagattcactgaacctggactaggttgtctggctagcaacaacagggaaagttcagtgtatctatgacctgtgacagtgaagaccagaagctagacttcttttgatgcttatgctttgccggcaagtctcttttgcccgttttctgtggtaagtaggagtacaaaattctattaatgcttattttacgttacaattccattaattttagtagcgaaaaagattagtcctgataataaacattgtttgatgtaaacccagctggtacagtactgtactactgctaccacctttatcctaaaatatagaatgagactcactattggactatgaatctggatatactttatgtccgtattcatagtcgataggtctcatcgttactatattttgagtcggagggagtatttttgaaaggatccctcctggtacttctgttttcactgaagcggttggtacg

SEQ ID NO: 440 - DNA, 4219 bp, Oryza sativa
aaaatgaatgcccgtagcgatgattaaccagcgacaaaataaatgctcatcgtcagcattggttgatttggctccactgctaaatccaacaaaattccctcattccacacgacggttttttagatttacttggaataacatctagccatacaaatgtgcagagaatactatgtcaaaaaaaaaaaagatgaaaatgagacagctaacatttcctttattgccacggcagttttttctccctattgcaaaccaagtggctgatggagaagaaattatgaattttctacgtccgtgcatggacagtgaatggcgtgtctcttctgcatgacgctcctggttgagtgtgcttccctgcgaccagatcaatggagtctggagttagaattctatggaggcgatacaagacaaatggatccatatgtccctgctatactactgctataaattatatatattgcttcattaggcacgcttttctatcatgcttccttgattggggagtttagttcgaagtgactattttcatcttaaaatataacaacggttagctatgtatttaatatacctttttttaatatagaacatactccttccgtcccaaaatataagcatttttactataatgacaagtcaaacattttttaattttaactattaataataataaatatcaatcatataaaattgatgttactagatttatcattaaacaaactatcataatatgcaactatttttatttaaaacaacttacttttatagatagcatctcggagaccgtgtcggagaccaaaattgcttatattttgggacggagtgagtatgtagtaattactacataagtttattttaaccaccactatatactccttccatattcgtaaaggaagtcgtttaggacaatgtttaagtcaaactttagaaatataaatcatgaataactctcaaattgttgagtttgaaaaatataaaaattatataaatagatttgtcttgaaaaatacattcataaaagtatacatatatcattttttaataaatatttttatagaaacaagaagtcaaagttgtattttggagatcatgtcactgtccaaaatgactttctttacgagtacggagggagtataagacatcggtttatgtgatccctttttataacaatggtgatacaacgacgattttgtagtaacggtgaaatgaggaccggtaggctttagattaagcacatacgtggactcttcagagtactaatagttaagaggggtaaatgaccaaatttgtacgttgatttggacgggtagatctaagacgttttaccgtagttctgatgtgcttctaaaaacaagtttaataatatagaaataattgacatatcgtctacgaccaacctaatatcccactcatatgatagttaataataaatatatactacattattaatatctggtccacctctctcatatagtttattataattcgtgtgcttaattttcttccctctcattttctatttcatccacgtaaatacaaataatatgatattattacaacctatataacccttctacatcatatttgtattccttgtaattattcattatagtggtaatcatgttttcgggcttttttcttttttctgctagtgttttacacgtaaaaccatatcatatcccagcacatccatgaccccttcacttggtattggcaacaccggtgatgctactacacggtagagcatccttcgccgccgtgtcagcatctcgccggcgatctccattccacccaaccgccagaacaccggcgaggtgatgcgctgccgatccctcgcatatcttcggtcttcaccgtcgcacgtatttgccaatggaaatatctagaaaactacagtaagttttaaggttctatgagtgaaaaacttatatatatatatatatatatatatatatatatatatatatatatatatatatatatatatatatatatgtaattatagtataattaaaataaaactacactataaatgcactctaactatactctgtactataattatgatataaattatataaaacgtatattcatctatggtttgtttggttagtactgggattttacggtaacatgtgtaaaaattttgttctagcaatttttttctcttcatacataaatctcaagatgatccaatgatcataaatttaaaagttttaagggaaaaaaaacttgtgaaaattttctaacaattccgtttgcggataccacacatgcgccgcgtacgttctggtcgtcagtgatctcgaacctgtcaatagtctgcacaccgaaccaagaaaccaacccgacaccctgctcgatcgttttggacttggtctgcgtccacagaaacaataatgcgatatgccacgcgacgcgacgcgatgcgctgcgcgctgcacatggcgccgtcgtcgtcgccgccatcgctgtctgatcgtcatccttgctccgggggagaaagaaaccgcatgatttggggggatccggaccggttcaaaggcagaggctaggagagggaggaccggttcaaaggtttggccgttctaacgaaaaaaattgtgctctgaatttgcagccagttgcaatcagtatcctagctgtggtggattttgaagagatcaaatttggagctattgctatactttaactccatgtgggaaacatcttctggcaacatattccttgagcttggcagaagctcaaggtgtcgctcttgtgacagccaagttcttgtttggaatggggcagacttttccccgttttctgcaggaactaaacatttactacggcgagaattcttgggtttcaaatgagccaagaaaggttttgctcaatgaattctgttcatggtacatagggcttgttatatagaaacagttggttggtagctagccaagaacctagaaaaccagcttctaatttctagtttgtttttttggtttcgtaactacagcttctcagttactgaacgtattgcttgttttgatggtcagaaattacatgctgctcagtgttctgctgtgatgcttatgttaaactgatcttgcctgacactgccagccaatcaactaacaacgcaacgaaattattcataaattggataattactgcaaatccactacaatcctaacaggaacaaggatttgacctgaatactttccaaccttgtttgcaaataaaaaatactactccctccgttttacaatgtaagtcattctagcattttctacattcatattgatactaataaatctagacatatacaatgtaagtcattctagcattttctacattcatattgatgtcattctagcattttctacattcatattgatgatctagagcatcaatatgaatgtagaaaatgctagaatgacttatattgtaaaacggaggaagtaacaagttgtcgcgtagaaagagttactactactgaagatatctgcttttcaccgaactgatgagcctctgaggccattggcactttggcggaaagaaagctacaatttgggactttgttgctcacttcagtcatgtccgtcactctctttgcaggggcaaaggggaaggcttgaagctaacgtttggaatcactgaccaagtgagtgtgttcagatcactgtaatttcacctgcttgtcttcaaaaggtcaatcttctttaagactaagcagaatctgcctcgtgatcttaagccggaaattttcggtatgcaacaggtgacctgtgatctctccttcttttcttgttcttctttacctccctcactttgtgtaagttgcattttttaatttagtgatcaaggtttttgctataataggttagttcaacgcggaataatgactactaactttaccgatctttcctactattgatctgctaagacatgtcggataacgacatagaaaacaatcatctttgtggccggattagtgtagcaacgactaaaaacttagccatgtttaccgtgttcgacagagaagctaaatgtgacaagtgcatccacttgctgtcaagtggcacgatggataaccagatataaacaaccaaggttctttcactagttatgttccttttcctacagggacaaattaaggaaatggctgggaaggctgacctggtacaagaaaaagacagcaaaaagagtagatatttatgttgactaggaaccatggatagct

SEQ ID NO: 441 - DNA, 688 bp, Oryza sativa
ccataagcatctttccactgtaaagttgaatattgtcctgtgtggtacttatgctgtaggcaagtaaagtttatgagttgcatctgtacacaatgggcaacaaggtttatgctactgagatggctaaggttcttgatcctactggaaccctgtttgctgggcgtgttatctcaagaggcgatgatggtgatccttttgacagtgatgagcgagtgccaaaaagtaaagatcttgatggggtgttggggatggaatctgcagtggtgatcattgatgactctgtgagagtctggccccacaacaaacacaatttaattgttgtagagaggtatgaatctgtctaatgtttcttgctacatgaggtaacagcagtacaacaggttcatcttactaggcccccttccatttttttcctctagatacacctatttcccctgcagcaggcgtcagtttgggcttcctgggccatcacttcttgaaattgatcgagatgaaagaccagaggatggtactcttgcttcttcactcgcggtatgatggttctgctacatctgaacttttaagtattgtaatacaacttgattatgatatacatacttgttgaattcttgaataggttattgagcgcattcacaagaacttcttttctcatcctaatctcaatgatgctgatgtgcggagcatacta

SEQ ID NO: 442 - DNA, 607 bp, Oryza sativa
acgacttaaggcggccatgccaccggggacgcactgctcatgcctaatttagctgggggggcgcatccgctctatagctcgtatcttctcggggttggcctcgatgcctcgggctgagaccacaaacccgaaaagcttgcccgccggtacaccaaacacgcacttatggggggtcaaatgtatgcggtcggagcggaggttttcaaaagtctccgttagatctgagagtaaagtatattgggtgcgcgtctttacaaccaagaaatcaacataaccctgagaaatacgtcctatttggctacccctagaaatcttagtagttcactgaatagttggacctgcattctttaacgcgaagggcattgatgtataacaatagggtcctactgcggtaatgaacgcagttatttgatcatgctcgatagacatgcgaatctgatggtcaccagagtgtgcatatagaaaacacagaaggtcgcaccccgcagtggagtagactatctgatctatgcgaggcaaggggtaatggtccttaagacatgcgttgttaaagtcggcgtggacaatacacatccaaagcttgccgtttgcattgtgaacgaccagc

SEQ ID NO: 443 - DNA, 914 bp, Oryza sativa
aagaactttcctgtggcaggaattcaggaccaccatacgtccctacaactgtcctcgcctcctcggcattcaagaggagcaaccagtggcaaaatcatgaaatagacaagaaaaggaagcaacatcacaactgcaccacattggcactcatgaagctaccaccaacacaacagaagcagccaaataatcatttacagggacgccttttattgacgacgaagaagagtgaacatttacatggacgagtttgatactactattgtacagcattggctagcgctatacagaaacctatatttcaataaatcttcagcatttacagggtcgtcagttcaaggctatctgagacgcagatgtgacgatggaccattcagaatttgtaatactggaacatatggtggccaggaattggctatttcatatgggatgttggcccctaagctgagaggaaggaagacattgctcttctgaaatccagagagttcagagcagatcctggtaaagggttaccttcgggaacccacaaaccacctctgtggggaagcataatctgtttgttggtactcttatcaccaccacttgactccgcagaaggatcttctttctttttctttacaaattcaaagaactccgcaacttgtcgggcatatcttcatggacaagatggaaatatcagacacagaaaatttgaactcaagggcaccacaggatgttcagctgaagctatagaaaagatccaaaagtatgtagcattctctaaagaaaatgggcatcgcaaaaatgcgggaatgaatagcataaatacataaactccatcataaggttcggcagaaaaataatactacaacagatgaaacagagcgtattggataccaaatcaggccgggaaatgcatggataccaaaactagggcc

SEQ ID NO: 444 - DNA, 11170 bp, Oryza sativa
aaagaaaaagaaaaaggaaaaaggattttccctggaataaaatattgcttgctcaattttaattggttgaaattatttctagagctctgaaaattccactaaaaatcctgttaatgaattttgacatgtagaactcaagaaaaattccacatgtcaagtccgattgttatttgcattactttcttaaggttttctcctgatttcacctgcattttcttggggtcatttgaaaattacaattttggcttgggaggaaaacttcggggtgtgacaaacctaccccccttaaacggaatctcggccccgagattcggaggagctggtgaagagatgcggatgggcggctttcaactcatcttccctttcccaggttgcttcctcttccgaatgatgactccactgaactcggcaaaaccgggtaaccttgtttctggttctcctttcgctggtatcaagtatgcgaaccggcttctccacataagttaggtcctcctggatattaatgtgttccgaatcagcctgttcttcaggtacccttaaacacttctttaattgggacacgtggaacacgtcatggatgccgatcatgttggatggaagttctagctgataagcaacttctccccttcgttccaagattttgtatggtcccacgaagcgtggtgccaacttgcctttcgtctgaaaacgatgtactccccggagcggagtgacacgaagatacacataatcccctgcttcgaaagtaagctctcttcggcggttatcagcataactcttttgccgagactgggcgattcgcagtcttttcctgacggtcctgactttctcctctgcttcggttaacacttctgtcccaaacagttggcgctcacctgtttgatcccagaaaagtggtgtgcggcactttcgtccgtacaatgcttcaaacggtgccatttgcaaactggactgttagctgttgttgtaagagaattccgcatacggtagacttttatcccaggctccaccaaagtcaagtgcacaagctctcaacatatcttccaagatttgatttactcgctcggtctgaccatctgtttgtggatgataagccgtgctgaaattcaaacgagtccccaattcttcttgcagtttctgccaaaactttgaagtgaattgacttcctcgatcagatacaatcttcttaggtaccccatgcaaacacatgattcttgaaagataaagctctgccaaccttttcccagtataggtagtgtgtactggaataaaatgagcaactttggtgagtcgatccacgaccacccagattgaatcgtgccccgacgatgttctgggcaaacctgttatgaaatccattccgatttcttcccatttccattccgggatctgaaggggttgtagcagtcctgcgggcctctgatgttctgctttgactcgctgacaaacatcgcagagtgcgacgaattcggctatctctcttctcatgctgacccaccagaatttctctttgaggtcctggtacattttagtactgccgggatgaattgaatactgagtttgatgagcttctgtgagtatgagatccttcagttctttgtcgtcaggcacacacaatctttctcccaaccagattgtgccatgctcatcctcatggaaatctcgggcttttccgaccctcatatttttttttagctcagctatttcaggatcatttacctgagctgctctgacttgatccacgagcgtaggccgggcctctagggcagctacgtatccgtgttctacgatgcccaaatttaggtgctcaagatcttgctgcaatttgtcacacatgccttcggtacatactgcattgcaatagctctttctgctcagagcatctgctaccacatttgctttgcctggatgatagtgtatccccatgtcataatctttaatcaactccagccatcttcgttgccggagatttaagtcgggctgggtgaagatgtacttcaggctcttatgatcagtgtaaacttcacagcggttgccaataagatagtgccgccagattttcagagcatgaaccactgctgccaactcaaggtcatgagtgggataattggcctcatgtggacgcaactgtcgcgaagcatatgcaaccactctgccttcttgcatcaacacacatcccaatccttggcgagatgcatcacagtagacctggaagtctttcgtctgatctggcagaattagaactggtgcggagactaacttcttcttgagttcttcaaaactttggttgcactcagctgaccatttgaatttttcatctttctttagcaactgtgtcatgggcctggcaatcttagagaaattttcgatgaaccgacggtaatagcccgcaagtccaagaaaactccggatctgagaaactgtctttggtggggtccactttgtaactgactccacatttgatggatccactgccacgccttgagcagaaatgatgtgacccagaaatttgacctccgataaccagaagtcacacttgctaaacttggcatatagctggtgctccttcaaaatctcgagtaccaggcggagatgctgctcatgttcctcttctgattttgaataaataagtatgtcgtcaatgaataccacgacaaacttgtcaagaaactccataaacactttgttcatcaagttcatgaagaaagccggtgcattggtgagtccaaaggacataaccgtgcactcaaacaacccataccgagtggtgaaggctgtcttgggaatatcctcttcccgaattctcaactgatgatagcctgatcgtaggtctatcttggaaaacaccttagctccttttagctgatcaaacaggtcatcaattcttggcaacggatatttgttcttgattgtgacctcattaagggcgtgataatccacgcacatcctcttggtcttgtctttcttctccacaaagataaccggagcaccccaaggtgaagtactcggtcggatgtaccctttctgcagctgttcgtcaacctgcttcttgacctctgctagctcattagctgccattctgtacggcctcttgtaaattggagcagtcccgggtgccaaatcgatccggaactcgatttctctcttcggtggcattgtagtgaggtcttctgggaacacctcaggatactcttgtactataggaatatcctccaacttcctgggacttttctccactgtttctgtctgaccctcaatagcagcctgattcagactcgctacggacttctgcgacgctggggaacggaaggtgatcttctcccctttgtcgttggttagggtgatggtgcggcttgcgcagtcaatcactcccttgtttctggtcaaccaatccattccaagaatgacatccaggtctttagattcgagaaggatgaggttggatagaaacggtgatcttttgatctctatagtcaccgaggggcagtagtgtgctgtcctcatatcatttccaggggtatgaacctgcatcggtattttaagttccactaccgataatccatgtgtcccagcaaatcttttggaaatgaaagaatgcgaggcacctgaatcaaagagaactgttgctggatatgagttcactggaaacgtgcccaacacgacctctggtgctgcctgtgcttcctctgcagacacatgattggcgcgggcctggatgaacctgggtccagtgcgattcagcttcggacacttgccagcaaagtggccgtgcttgccacagttgaagcagggtcctggctttcctacagcccccttcttgggttgttctaactgaactgacacagctggcggatctgactgagctggtgccattagtgggggtggagtcgagttgtggttgtgctgcttactgttgttgtgactgccaccattgtaatcgttgttgaagttactcgggcgatagggacggtgctgacagacgatcagggtggaaggcccacctagctgtcccgtcatgaaacgaggcttctgattgttcccctgaggaaagctgatctgagctgtctttctttttcggtctattttgttgcgttgctcttcctggcggatagccttgtccacaagcttctcaaagtcctcatagactccggagattagttggttggtcaattcatcatcgagcccaaacaaaaacttctcctgcttctcagcatcggtgcgcacgtcctcgggagcgtagcgcgcgaggcggttgaactcgtgcaggtactctgtaaccgttctggttccttgttgcaatgcacggaactctctcttctgttgtgccataatcccttcgggaatctgtgccttcctgaagctttgacaaaactctgcccaagtaacctccgttgcatctggacgggtcaccacgtagtgatcccaccaagcagaagcaggaccttgcaactgatgtgtagcaaaagcaaccttctctcggtcgttacattgcagaaggatcagcttcttctcaatagcacgaagccagtcgttggcctccattgggttggtggtgcttgagaaagtgggtggctggatacgaagaaagtctaacagtttggacacgtgtgatggtggaggaccaaactgctggttctgttgcgcctgctgcaacatctgatggtaatgttgctgcatctgttgcatcatcattgtcatcatttgagtgactgttgggttttcgggcggtggagatgatctgctgccagatgcaccactgacatgagctccatcggtctgctcttcgctgccactggcgtcgttggagtcacggggatcgtcccttgtcttcaccatctggaggaggataggtagaaataagagaaaggaagaaaacagacggctcggaaactaatctttcttataagattaagtgcaatcatcttaatcttgattaaaacactgaaaaagaggcacacaactcctaataaaggctgtcataccactcacacatgatatcgactgccgactaacccacaagcaacaaacctaaacacaaaaactagcacgcaaacagactaagaagacgataaagctaagggtggcgactctgaagcttggagcggcgcttgcgatcggagaataggtctgacatctaaagagtacagagggataggaatcaatgcatgctcaaatccaaatttaaataaagcaataaaagactcaaataagggaaacgaataaaagcgaaattttatgcatagatcattttgcatgagagcgaataaataagacagactcacataatgacaaaataatgagaaattagatacatattaataataacaaacgaagcataaacaccttgcaacccatgttatagagctaggacctaatgcatttcacccatcaaaccccaactgtctgacgaataaatcccaataattttactaaaaccctagactgacttgttttgaaaaaccccacttaaacgagcgaccaagatttttcccttgaaccacaagaacagatcccaattttcccggaacaaatccaattgcaaagaacatatgcaatgaaaaggattcagagggctcttaggtttttccatttggcttgtcctacggtcaaggtcggctctgataccaacttgtcacgcccagaaattcacgaaccagaatttctaagctgaatgtgcattaaacccctgtccaggaccagccagggtacacaaacgacaattgttgacatacagatccacgtcttacaaaaatataaaagattacaaatgcagcggaaaaagataaaagcgagctaagcctgaagacttgactcctgcagcgggcgactccattccacaggcaatccttgacggcagcgacgaaaccaacctcttcgagacatcttcaactgggaaggacttcaactctggtgtgggggaaaagagagcaagactgagtactacccactgtactcagcaagtcacaccggaagaggaggtatgatgcaagatatatccaagggaggctaaaggttcttttgcataaagccggcatttcaaagcagtagttgaaagcagtaaaacagttgtagtaattaatccatattaaccaatcactgtccaacgttacaccacgttgcaacaggcccaaaccaccacctgaactaaccagttccaaaagctaactagggtgaaactaatcacggtgaatctggtcgaccgcccataaccgcgggcgcggctattcgaatagttttactctgatcagaggtgtacaactgtacccacaagacacagccccacgacacgtttccgtgcgccggcatgccaccacgacataccggaaagaggccgtgacaggacccttcgtataaccccctctaaccgatcgcaccacaccttagggttcgcccccgtccccagcaggcaacgggcagcccccctttcgtgccgcggtgaatccggcagccgatcaaccggacaccccggccgacccaactccatcacgcccaccctcgcctgggtacgtcggctagagaaaagctacactacaagcccagccgttgcccacgctggcttgtggtaagtacgataaattcttccagggcatcccgcgaaccggtccttaatcgccatgggcacgtctagcaaaaccatgcacccacagcccaccatgtagtgtattttaattagccaacaccattgcggtggcactaatccagagctattgccaataatcaagtctatgctttaatgtggtccccttttatgcactagttgaactaagcatggctaagcatctcctaaaccaacatctagtcattttaatacccaagttatcaatggcataaggaaaacaacatatagctgagtaataggacccatcccacatgatattgtaaaacaatgcaatatttaatagaaatgcgggacatttgtaaattaggtacaatatgatcaattgtattgcatgacttgccttgctctcgcaatgatggaaccacagcaacgtcttcgagaaaccacggatcgacgaaacggccgaaatctacgcgacaaacaaagcacacaagcaaaacatgctataagactactgaaacagataacaaagccatttttaatggattctacacatttttatgaatttactgagacttgaatggacttaatcggagctcggatgaattagttatgaattttagaagattcactgtgtttttactaataaagaaaaagtccttaattaattattgcgcaatatattccagggctgacgtcagcacaggcggctcggcgccgacatgcggggcccaccggtcagcgacacgggagatggaaggggcggcggctccacgtggcggccgaaccgacggccccgatctacccaagggtagatcggacggcggtgggagctcgcggccggggcgcgcgggcacggcgcaagccgaaccggcgaccatggcgccggcggcgcagcgctcacgcggcggcggtgcgcatgcggcagcggcgcaaggcgacggccgacggcgaccgaccggcggcggagagcggcggctagaggaggagcggcggctacgcagctaggcggcgacgcggcggctaaacggtgcgggagagagaaaacgaggaggagggcctcaccgacaacggtcgacgacggcgggcgacggaggacgatggcgacggcgggacgagctccggaacctcctaacgaacaaaaggagagggattagagggagagggaagagcgcgagagagcgagagcgccggccgaaggcggcggccatggcgtcactcaccggcgcacgacggggatgggtctccggcggcgaacctcaacggggaaggggcggacgaggtagatctcgaccccgcgaatctaacggcggcgacggcgcaagacggcggcgagcctagcggcggctagcggcgcccggagagcggaaaaaggcggcggcaaggggttgcacggcgcgggagcgatggggagctcgggagaggtcggcgaaatggggaaaaagcgagagggggtgccggcgatgcttaaatagggggagagggaaccggacgtggccgggagcggcgggaatcgccggccgacgcgggggagtggggaggagagagaggcgggattcggttttcgaatcccggccatctcgggcgcgggcgcgagcgggagagagaggggaatgggcgcgggagacgcggcgcacgcgcgggcgtggtcgacgtggcccgaggaaggcggagacgtgggcgcggcgacggttgcgggcgcggcggcgcgagcgggagaggcgggaggtgggagacgggtccgacaggtgggtcccacctgtcggcgaccccgggagggagggaggcgggcggccggctgccggctgggcctcggcctgcggccggcccaacagagaggagggggaggaaaaggagaaatgggccgacggcccatttgacaaaaaggaggaaaaagagaggaaaaagaaaaagaaaaaggaaaaaggattttccctggaataaaatattgcttgctcaattttaattggttgaaattatttctagagctctgaaaattccactaaaaatcctgttaatgaattttgacatgtagaactcaagaaaaattccacatgtcaagtccgattattatttgcattactttcttagggttttctcctgatttcacctgcattttcttggggtcatttgaaaattacaattttggcttgggaggaaaacttcggggtgtgacagctgcccaagccttggagttgatggatcgcatgctaaaactcaaagaacaaggcttacaaggagagcagattactcggcattttatcaaatgccgattggcaccaattaaagaaagatcccgtacggcattcgagtttgacggcaagcatgatcctaatcgtgaagaaccagactctctggattttaaaatcttgaaggagagaatgtataaaatcttctcaaacgctattgtcgtcagctactcacatcagctgccagttgtgccatataacgcattcaatccgcctccgcaggtatgtatccgaaatcttcaacccatgaccaaaacataatcttgtcttcatgttgagttaactaaccgtagaggtatcttattcaggaatatgtattgatgaagtctgaccccccaatcactcagcgccggtctcctcgccaacacaccgttcagggaggtggagggccaacaatcagatcagatccgcaacctcaaacctccaatccgactggacagacaggttctcgcaagagaaagctggtgcttaacgacgacgaaggcgacgacggcaacaaatctgggaacaaagacttgcccaaaaaactcccaaagcataccactcccaggaaaaaactggctggccgcccaatgccaaagattagaacatcttccaggtataaacctctcggtaccatttccctttgacatgcttctctcatagaaataatactgaatattgaaaggacactttgcaggaaaccatccgacatagatccaactggaaaagatcttgatccggctgtgacagagccaagttcatccaaggattctgagccgactgccgagagccagccgactggcgcccatacttcaggtgataaagccaatccgagtgaccagcctccaactggaaaccagtcggcagcaactgaaactacgacaactcaagagcccccgactggaaaccagtcggatgtaggtccagatcaagaaattcccgaagttgaagcgcagacgacgacttctcaaggacctgaggctggtaacgactcgatgattgggtctccaaataaagaacaaggatcacctcacgctcagctaggaacaccctcaggtaactcatcttctcaagtgatgccagtttgaacaactcttacttattcgcctaacgtcttggaaatacatcaggaccaccaggcgatgacgaagaagaaattccccgcataaaggcggctgacgactctcgccctcctatcttactcaaatggtgggacgagaactcacaagctgccggcatcgtcataaatcgtcaaaaagaagatgaggaagtgtgccagctgaagaaggcgcttggagaagccactcgtattgtgaatgtaaatcttccaggcgactgcctttgatgactttgttttctctttagcagaactaaaccatgaaccatcatgcagagaatccatcttcgcaatgaggccaagaccgcaactttagaaaagctggttcctcatttgggaactcttgaagcagttagggaccagctacatgaggccaaggagcttgccaaaaagacagagaaggaattaagggaccgaattgctcagctccaggattcaaacttcgagctgagtggttcatcaaaaggtaatctctagatctgtcccattaagttacgctgtcagaactatatcctcaaccgttcggattgcaaacagcgcaagccaccaggatggctcaaatggagaaacaaattgaagccttgaaaagagacaaagtagaactggctgcgcaaagggactcggccttgaaggaggttgaaggtaccgccagctgacaatctaaacttctctctttttaatgcagtagatttttaccataaatgtgttttgtagaccgcaaaatcaaatctcaagctcaatttgacgtcctggttggtaagatcaagaggcttgaaggagcaagagatgaagttgctaatgtcgctacaccacttgtccaagctatgttcctcaataacagtggtccgagtgcactcgacgcaaccgaaatcttcgacaagctgagagttgctccggatgtatatttcaagaatatcaagaaagctggaagtatgggagctagcatggcattggcgatgaccaaatccttgtacccaaggattgaaattgacgccattgatggctttgcagacgggacaagcgaagaagctgctcttgatcttatcagcaatgctcaaaacgcggctgacaagattgcaaatgacgttgtagaacaattccgcaataccgaccttcagccgagtagtaacaattctgatgatgaaaagactgattctgactgagtataaatgtaacaaatggaggctcaacttgtacaatactggtgtatttatgctgtgcttgataattctggccaagtcgttgatttcttaaaagctttta

SEQ ID NO: 445 - DNA, 737 bp, Oryza sativa
aagcacaatataccagcactgaccgccatcggctcagttgggtgaaacagaattaccttcgtgcagaaacgctggtcagcgccaatgcccgcctggttgattttcagtccacactggagcttgctggtcgttgggaaggtggagaagtggcatcagctgacggcatgcgctttgtcacaccagtgaagaccatcaactcaggatctaacagaaaatattttggttctggacgaggcatcacctggtataacttcgtatctgatcagtactctgggttccatggcattgtggtacccggtacattacgggattcgatttttgtactggaaggacttcttgagcagcagacagggctgaatccagttgaaatcatgacagacactgcgggtagcagcgatattattttcggtctgttctggctactggggtatcagttttccccccggcttgccgatgcaggtgaggcggtgttctggcgggtgaataaatcggcaaactacggagtactggataagttggcccgaggatatgcagatctgtcaaaagcggagagtcagtgggatgagatgatgcgaaccgctggttcgctgaagttgggtacaattcatgcgtcagaactcattcgctctttactgaaaagctcgcgcccatcaggactggcacaggcaattatggaagtagggcgtgtaaacaaaacgctatatctcctcaattatattgatgatgaagattatcgt

SEQ ID NO: 446 - DNA, 3119 bp, Oryza sativa
agggaatcacggggagtgatttccccctctttattgcgcgcggggtcggcggaatgcgtcggaatctgcggcggcggcggcgctggggcacgggtgagacgtcgggtccggcgcgaggtaggggatgacgggtgggccccacccgtcagcgagggtggcgggcgggcccgcccgtcagcggcgcgcgcgcgggggaaggccggatgggccgcgggggagaggagagagagggagggagctgggccgagccggcccaagaggagaaggggggggaaaaggacttgtagggtttttctttttataaaacctttttaactttgtttatttcttaacaattattatttgtgctctgaaaattccactaaaatttgagggctcctttttgaccaaggagaatttaacaaaaattctccgggccacatttgaatttttcttgtacgtattttaatgtttgccaatttcttttcgaattttaattaattctattattccttttagaaaatgatttttatttcgggatgaatttatcaggacgtgacaattaccagggcaagcagctcccggagcaggagggtgacgatgcagagccccacgctgcttgggaggttactgcagtgatcctcactggctcacccgagaggacgtcgttggcggtcaccgcgggtggagattccttctccgccgcttgccagaacgccgcactcctcgccatcggcactcttcaccagcgctacccggacgagttgcagcactcgccctactgctaccaccctcgtcgtggaggagcccgcgactacgccaccttccgggatgctagctcgaaggatgacgctaccatcatgcacctggcgcgcatggtggaggcgtacgacgcggcccgtatcgacttccatcagatggtgcgtcgcgggttggtcgagaacagcatgaagatcctggagctgcgtcaggagaatctgcagctgaagaaggacctagacgcagtggaggcgcagctgcgacagcttaagatcgcccagggagaggtctgtcgccccaagcgtcaccgcgtctgccgcagcctgaagatcaccgcccgcaagagtacctccgggcccgagcttgttcgtcagtccctggtgtcgaaactagatttcggcaataataaaagggggtggctatcaagctggaaaagtgtatgggtttggagacaaaggatttatacaggttcaggccttcttattcaagaagtaataccctactcctgtccggggatgaatccgccgagtgtcttattgattgtataatttggagaaaatcaacaactgcccctagaggcacccggatcccccttatatatgggaaggagtccgtgttacaaaagataatctatatccctaacggaatatgcagatacagataaaatacagtcgtaaccgactaagtctcaaggtaattccttgacgtacaagttgagaaacaaacccgaaatacaaataagatattctatccatattcggtatcctatattcagcccaaatatcatcaccgtgtagatatgggatatccataatctccacagtagcccccgagacctttgcagtcaaccatcatagccttctcaaagataataatccgagtgcttcaaacttttcatgccaaggcctgccgagtagcgaagacgaagactgtaaagggcgaaaagataaagaatatggtgcatcgaatagatgcacctaattaggtgtagcccccaactatgtgattagttaacaaactaaacatatagttgaagacaaaataatagcacaatcgtgcatcatatgacaaaagcatacgcggcacctaaagaggtattatagccgactgctttttagccataataaaaggaatccgagtggttaacactctaaaaggttcacgaatgaacatacttgacaggcatccgaataaaaaactccaaagattacccaccaaatattataaaaattatagtaatgaataagtctaatagcctaggctatgactatttaccataatgaaaacaggcatataacataccaaagaaatgactatggtaaaaacaagtcatttcaagttaacccagacagcttttgtagcctaaaaaagcttacaaaaacagcataacacctttctgtcgggcaccttttaatttgcattgcaataattccaaagaattatatgaccgcgtaaaaaggattttatcagcattgggcaacactattgtgcgcataaattgccaaagcaaaaaatgcctaagtccctaaggagcacaatgggccacgctgttaaaagtactgggctgaggtactgttcaggcctaagcccatttgcacctccgatacccttaacaataaattccgagatccaagcgtcacttcgtcttccccgccggaactctcgccattttccccaatccctgctacagtacagagctgcgccaacaaactagggttcatcattccactcgaatccaccttcgaaaagttcagcaaaatccttcccgtgatccaccgccgcaatccctcacctctccctagccatccctcgaatcaaatcagcgcattcgggtaaaatcgatggcggaagagaaagaaagctttgaaggccaatgggcaccatccgacgtaacggaggagaacctgaaggagatggtggcgcacggcgttctccctgccaaggagatcatcgggtggcggccagcatgcggtgaggcttttccgtcccccgatacacacgaggttgtagtcttttcccatttcttctatggcggcttcgctcttccgacctcaaaatttttccgcgggatattaagcttctatggaatcagcttgcatcacctaaatccaaattccatagtccacatcgccaatttcatccatgtttgtgaagccttcttgggaattaaaccccacttcgctctatttcgccgaatcttctttctcaaaccccaaccgaacaagagtaagccatgtgtagtcggaggggccggatttcagctgaggggaactctgagccagaagtacttctcgatgcccttcaagacttcaaacaaaggatggcatgcgaactggttttatgttcagaaccctgagcctgctcttcccgagtactcttgt

SEQ ID NO: 447 - DNA, 775 bp, Oryza sativa
attttaatttaaaatcggatttattgcgtcagccgaggggaggggcgcgcggaccgggtccacgggagtggggcccacgcggcagcctcacggtccacggtggaccgggtgcacgcggcttgcgccggccggcgccgtgggtcccacgcgtcagccgcacccgagggcgcgggcggctgacggccgggccccacatggcagccacggggcgcgcccgaaggcggcctcgccggcacggccgatgggaggcggcgcacccgcgccccgatggtcgccgccggcgaccaccggcgcggcggagcggcgcccgagagaggggagggaagggggaagtgaaacggcggtccacggctcaccccgggtcgacggcgacgacgggaacggcgaccggagcggaaaaaggcggcggcgcggctcgggtcgacgaggacggcggcgttccggcggtcggcgaccgaaacggaggggtggacgaggtcggcaaggacgcggcgaagccgaaggaggcggcgccgaagcgggagaaggtccggggcgacgacggcggcggaccggagctcggcggcgacggcggagagagagagcgacggcgcgagctcgattccggcggagagagagggcggcgagcggcggaaacggtggagagaggcacggggagcgtttatatagtgttgggagtgagagagggcgaccggaggggaaggaaaccggcgcggcgatctcaggctccatcaatggcgccgacgaggtttgcgggagcatttccaaacgaatc

SEQ ID NO: 448 - DNA, 5368 bp, Oryza sativa
ttctttccgaatagcattgctccctggataggaaatgccattagaacagagcgtgatacgcagcaacattcacacacacacacacacacacacacacacacacacacacacacacacacacacacaagagagtgttcagaataaaagaatgtgtgaccaagaagcacctttaaatacagtacagcaagctcagcctgaagcccgtcagccatctggatgagggcatgatctggtttatttttgagtatcttgatacgcacgatattcccatacattgagaaaaggttgaagagcttatcctcatcaattttctgcatggaaggattaacccataaaactaagatattggtaaagtgaatttgggagagtttatagctagtgaaatcttacatcagtgttcagattgctaactagaagtgtgcaacggtcattgatgccagacactccaggaggcaatgttccaccaaaagcagcagcgatcattgctgccttactcatctggtatggagaaatattaaaataacaaagtgcagcagatgctttgtatgagatgtccatgctaacctaagacaagcatagatagaagcagtaaaaactaaacgcggctattatctgcagggtttaaggattcataatacatacctgtgcatacggatctgtgtacagcagagagacgatcaaaagaaataagttaaacatgttttatcaaatatagaaaaaatggataacaaacaaatcaaggaacagtggaatgtcttacctccaggttgctggaaaccaaacaaactgcttggatcattataactaggctgttccaaacagaaacaatggaggtgagatacttcagcatagcagatcgaattgtccacataacaataattgaaagtaaacagataatataaaataacaatagaacaaaatgagttgaggacatacctgagatgatcttgagcgttgttctgtaggcaaagatggatttgtgaaatctctgaacaaggaaaacaaaatgagttgaattttcaagctccatagaaaattgacaatgaacaaaacaatattgcagttataaattaggtatctgatacctagatctatcgttgttgtagtgaacttgcaattcgctgagactgcagattcaacagaacaagttagattcaggagagctaagtgtgaaaactaagtatatggtgtagcaattgctacaggccttacttagaatattgaatgtctagctggcagcaaccatcatatatgttccgtccctgagattatgttattttccaaaagagtgagtttaaaagcagcataagaaatgaacaggaaacctacatgtaaagcaccataagctgtatattgaacaggaaacctacatgtaaagcaccataagcttgtattgcactttgacgtgactgatattgtatgagggtttgaaagcctgcaccaccaaaaaagatcaccatagcaaacaagtcttttaattcagcatgtagtaaacatatcgtcattccagcaaaaaaaaatgcactaaaaacatggctgtgaatattataaataatttaattttttttgaacgactatgcagttgagagaactatgaaatacgcctcataatctgcatgctatctggcaaggaaaacactgcattaaatgcaagaatagagtgagaatgagaggtagaaagaatctgaccggctgacttttgaaatgtgactatcttctccacaaatccatagggagaaaacacttgatgaagcacttcaatggttatagggtaaagcatatgatgaatggttactaacagaattcggttaggttcttcctgaggcccagcagcagacgagtaccgagaaagaaaagaggagagagatagaagaatgaataaagaagaataggcacatctagttggaacagaagagaaagcagagagatagaaggaatgcaaactaatcaatcagtggggacaaatgaataggtacatggaaaataataatgctattgaaatcaagatgttttgacaaaaatgttttttttctttttgtaatatgtgaagactatcacatgctaggtggtaaaacaagagaaaactgtatctagcagctacactaaataaaagccttatcctgcatcccatgtgtcaatgcctgaaatatacaccttgccaacaaaaactgacaatcatacagttatgagaacttagtcttccagcttatagccaaaaaccttggagcatgctaaggattgattactgttataagagaaggcacatttttcttgcaccagtaataactgataaagttctccatgtatttttcttgtaacagaaactcattctctgttaggttggtataataaaacttattattacaatatcgtatatcatagaagaacaaaccatcactccaaacaaaactaaactctagaatagagggaaaactcaaagtccacaatcatgaaagcatacctgatcaggatttcgtccatgagagctctgatcagtagtcaattcttggtgggatgaatattgcaagtaaacatttcttcccctaatatatggcataaaagcacatttaaaattacataataatatgagtatcatatctgtatctatattatcaaagaaaacataacaaaattatgggaaacaatgaaacttcaccatcatattatcatatgcaacatacaaatggcacaactctttcctatagcagataagtgcaacagcttcaaaagaaaatatataaacagaagtcattagcacctatattcagtgaagctgatctataagcagtcttaagaaatggctgtttttcccccaacaaacatagcttgtccgaacaattattctaacaaaaagtcaaaataatactattataccagaagagatgcccttgggatgcaacaacacctggtctaagaacaagcttaccttacactgggttgaattgtattgtagtattggatcacattcacagcagaagctaaatcctccatctggacgagagcctttaacagcagcacaaccacattacaaccacgcatgtccatttataacaactcaaacagaaaaaaaaaaagtagaagccgagatcaaacctggttcttagcacgcagcatgacgagcttggcgacagtgccgaacggctgcaccacctggagcagttcgctctgtatgcaacagaaagaccacagaaaatatcaaaaaaaaaatcgtactccgacaagcagctcatgaactgcaaaagcgccagcatctcttcacctcggagatctcatgcccgacgttccgtatgtggatcaccttggagggctcggccatcctcccgcaccacgcccgcacgcaactctgaccacacgcacacacacccaatcaaaaacccacccacgcaaagcaaacgaacgaattaatcgatccaccgaaccaatcgaaccgtagaatcgatgagccaaacaggagaggaggaccgcgaagggtacctccgaactagggtttaggcggtgggggcggagccgcggaggagctagggtttagccttgcgcgcgcgacgaagggggattggcgagataagatgaggcggcgcaggagaaggagaagtggaggggtggatgcagtggcagggtgggtcagatttggggagtccgcaatacgcacggaagaggaggagacagcatagcacccgcttggattaactcgggagaccgcgacaccggcagccaatgccgccaaatcacggagcaggaacatttgctaaaattgacgtaagtagatggatctcctcggaaagtcgatgatttttttaaaaaaaataaaacgtataaacgtatgcgctcatcgcgtacgtacgatctatgaatatagagcacattttatcctataaaaatatctctagaaaaccggacagatatattttaagatttacgaaatcactaccgatgaatacatcatttgccactaaaaaattaaccataaatactatttatgtgaagtctataacttaaatttgggtgggctggttttaccacaataaactaatcgggctgcgggaggccagattccttaacattaaaaacatagcaagcgattagagcgagattaattaaatattaccctaaaaaattgaaaaaatagattaatataacttttaaagtaactttttttagaaaactttaaaacaaatataccgtttaacagtttaaaaaacgtgcgtgtgaaaaaaggagataggtgagttaggaaagaagggaaggaacacagttaataattgatttcgtgctagaagatcagcagtgcttctgctgatttgctgctgttaatgatatcatggcgttcttctacagtaaagcctgtattgatcgagccatcggcttcacgccgcgacgagccttaaataattcgacaaacaggctgtcagttacaaattttatttcagtctggaatataatttttttttagaattacacagtacaacgcatacactcacccctataaacgcacgcatgcaaagcctacccctataagcatcttcaaagactgcgccgacaagattaacaaagtcatcacaggcgcctccctgggtatgtcgcctaccactaaaagcacagagccggtgttactgaggctctttataaccactaggctacaggccctttcgtagtctagaatataaatttgatggcacaatcatcatgtaacatatactcaaataaatcaaatgatgtatcagacagaatcacaaaatctgtttttttaaagtttgcctaacaaaaattaagatcagatatgacaacctaaaatgaaaccataatggcacatctccaaaaagaaaaacatgcagaaacagaggagccgtatcctctgcgtttcggttccacagaccacaatagaaatactactgcaggagttattatctagcttcaatagactttgaacatcgtatagtagaggggaaaatgacagtcaattgagtggtccaaagtacgagaagccctttacaacacatagatttccactaatcttacagccttatgcacgcctcctttaaaaaacaaaatcgacaatgcaatcagagaagaattcttaagggggcgtattctctgcccaaacctgtatgtattctggtggttcaatgaggaaaatctcagcggtttaggtattgactacaagttcagcccaccattagtctatggcaattatgaggaaaccaactgaaatatacatgaggaagacgggatacagggccagagcctttctccttgggttaactgcagcactcatgaatggatatgcagcccaggaactccatgccaatgtgacggtcactacgatgatctttagtatgacattgtccttcagcatgcaaactagagctcc

SEQ ID NO: 449 - DNA, 538 bp, Oryza sativa
gacaaaaatttaaataaatgtgttccagggctggagaaaaaaaaaatcatatgatcatctaaacagatgcggaaaaagcatttgacacaagtcaacattcttataaaaactttcaacaaattaggtatagcaggaatacttctcaatataataaaggttatatatgacaagaccacagcttacatcatacccaatgatgaaaagctgaaggctctttcctctaagaccaaaaacaagacagggatgctcactctcaccactgctattcatcttagtgctggaggtcccagccggagcaattagacaagaaaaagaaaatgcattcaaattggaaaggaagttatgaaactgtctctgttttcacatgacatatatcttatatacagaaaattgtaaagactttaaaaagactgttaaaactaacaaatgaattccggaaagttcccggatacaaaatcaacatgcaaaaattagttggttttctacacactaacaaggaactatccaaaaaagaaatttagaaaaccatactatttac

SEQ ID NO: 450 - DNA, 11849 bp, Oryza sativa
ggacatagggtgtgttgtcgagaagaaaactgcataatgctatgtcaacagagagattaaaataactgaaacccccaaaacaaaataatttggtcagtttcaaactgtggtgattgaatggggcaaacaaatacacgaggagatcattaaaccattatgatttcttccatatggcgaatcaaacatctagacagctccccaccaatgcatcatcagttcttgaattctctgaatgagaagtgttgcattttggtttcttctagatgcccacccactatcagtaattaccaaaataattaatgcaggttaccagactctaatcaacaacgatcatatctccgcacctacattagtttacttgctatgacacttttcctattcatatcaagttagacatttggatattgacaacgacctagtatgttgaaagacaacatagatgttaggtaacgatccagtatgctaccatattgcggaatagaaaatataaattgtacccaaaatcccaaattgtcaaagttctgcataaccagtatacaatcagttcatttaacgatattcttgccttagaaatgactatcggaggtagaactaagtagccacacttaagcaatcagaccatttaagccatgcctagcatttaaccttagctgagcagacaaaacgatacaattaatcggacacagcactgtgacttgcaagtgattgctctactatcaccatgaacccagtacctattcaactattgtaaatattaaagcagagcttccatatgaatggttagaaccgatatttgccttgaacatcgaatgtatcatctggttcaataatgtatagtccaatctacattataatacgcgtagcatcatgaaacctaagagatcgaatacttcgcaggcaacaccagcatttccagatccatacaaagtcaatcagccagcggatctggttgtcgaaggagagtaggtaccttcttgacggaggcggaccaggagagtgtgaggccgaggaaaacgatgaagaagaagggcccccagagatcccaatccctgagcgccttgccggggtcctcgcggtaggggttggggaagacgacgagcttgaggttgctgacgatgcgggcgaggtcgcgcttgacggtgtcccacacgggctcggtgagcgtgttgggcggggggccgaagccgtcggaggcgatggggacggagacggaagcgggcggcgcctggggcacgatgatggggacggacgcgccggggagggagggcttggcgggggccgggagcggggccggggaggtggagaccgggatggaggcgcgcggcggggacggcggccgcgccgggagaacggtggcggagggcgccgcgtaaatgaggctctcgatctcgtccatgtcggactgcgccgacgacgggtggagcgggatcgtgtcgccgtggttgtgcgacatggcggtggcggtggtggatctggcgcgtcggtggcgcggcggagagagatctcgcgggagtgcgtgctgggtttgggaggagagttggggtggggaggtgcggatttgcgggtgggtgcgtacctgcctgccggcctgcgactgtggactccaccggggggctttgcttgggaggagggagacgcgggatggcacgtgatacgacgtgagcgttgagagcgcgcccaaagtctggagaagcttaaaattgggataagcggttgataagaaataatctaaaagctagtttttcgattttctgaatttgatactacgggtgtgtttagttcatgctaaaattaaaagtttggttaaaattgaaatgatgtgacagaaaagttggaagtttatgtgtgtaggaaagttctgatgtgatggaaaagttggaagtttgaaaaaaaaagtttaaactaaactcggcctacaactataaattcttaaaatctgactatttgtgaaagtttctccgtagtcgattgcagaggatcctgatcactgaatttaacccgtggaggttctaggagaactgtagcaccctttgccacgctccgaagcgatggtgtggcctacgcattggagacaatggagatctcccgtcccgagcttgagagggattagtgaaaaggactttcaccttagcctcactgcctcagttgctatgttcttctttttaccttttcaaatgaatactccctccgtcccataatataagggattttaagtttttgcttgtaacgttttgaccacttgtcttattcaacaaattttaaaattattatttattttatttgtgacttactttattatctacagtactttaagcacaacttttcgttttttatatttgcaaaataaaattgaataaaacgagtggtcaaacgttgcaatcaaaaactcaaaatcccttatattgtgagacggtgggagtaacattttaaatgaaacaaaacaaagtttttcagtatgtcccaaatttttccattgtctaaaacgtatcctgcaatgtaatggggattcaattgaagtttggtacagcaaaaccaaaacatcggatcctttttttttagatattcacaatgtaaaagtgaaaataagttactgatcaatgcaatatatattgaccgaatatttatttcactacagtctacggcagtcttttacaagacattatttttgacttgtaaccacacaaataaataagcaataaataaattgaacctctatctaacctatggacagctaaggattgaatgggaagcaacacttctcaagggcttgtgaaaaccattgaaaaaagtctagctgttcttcctttacatctgtgggtggtggggcaagcggaagttcggcagggagatgtcgatgaaatgagtctactgcggctgccacgccatcttcattcccaattgctattgccagttccattgttcgtgattttaccttcagcaaggagccaagaaaagggttaactaacaaacacagacatgcatttgctcactaccattcatttatgcagcgacttcacgagataacagcatacttttactgtcctacatgacaaatgagcatacacctacttgaatgcagaggtaataaatcgtttatttcttttcatgtcaacctggcaaagcatgccccgagtgttgtcaggggtgcctttgtcaatactatctcctagtatctcaaaagttatgccacaattttgtagtgaacgtgaagtttagcaattgtttggactcctaatgtactcttttactccctctgtttgtttctctttttttttttacgttggatagttcaaaattgaactaaccaacgtcaaataaaagagaatggagggagtgtcagtttggagggaagtccgctccaagctcttgaggaaataaacacaaaagattataaacataaaataaaatggaagcatagaaacagtactacctcaggatcaagcatgaatcttatagcatttgaaagtgcctcgacagtaagttctgctataggaataggtgcagggccacacccttgtgcatgaattctctcaccccagaagaattgatctccaaaaaatggcactatggtagttgggcactgttaagagtaaagaaataagaaacgacatggagaaatactgccgatagttattgtgaaggaaaatatatgacattttatgcatatttaataagatcttgtatattgaggaaactatgaatacaaggataacatttttcatatggatggagggctgaaaaggccctggttttgttttgtaatcaagtgacatgttttctgctaaaaacatgaaaatatcacattcgaaggctccaatattaatccaacctccatcggtattgaaatatcatttcagtttgtaaagagactagttgcttaccccagctacaagccccgcggctgtggtaccagccccaccatgatgtacctaataaacaaacatataacctgataagtaacatattcgggaacataatgcactactattgaacatcacaagattcacgttaacgaaatttatagttactctgagcaaaagttttcattctattgatgcttgataccatatggtaacattcgtttaaaaaattacacattgtgacgctttcgaccatattataaatacagctaccacattgtttgctcgtaccagcgtattctgtgataccacacaatatatcactgcatattggaggtagcatttaattgttttattttaaaataaagattaaataattctataatggtgtatacaactcggtgaaaaaatcatggttagaaaaaagaaaaaaagagaggaaaggcagtcttctaaatggtggtgttgcaatataaaactaaccactgcagcacagcgaggaaacagccagtcgtgagggcaatcctccaaaatgaagacatcaactggaacttctgaaactgcaattgcaggttgcattcataaatgtacaaggtaggttagttcgttattctgtgtccatcagatgtcaatcccaacattaaacagaacaaaagtcagaccaaatttaatcttctctaaccatatttagtcaagagctacaagaaatgacagtctaccagatttaaaataggttgctacagaacaaccatatttagtcaagagctacaagaaatgacagtctaccagatttaaaataggttgctacagaacaatgcccgcatgtttgaaatctactacctagtacacacatgctccagaataactacatcaagagatagtacgcacattgtaaagattgaaaagaagcacaattagaattcagaaacaacttacaacttccaagatctccccaaccccgactaatgattcctctttgtcctgtttctcttagtgcgtccagaatgacagaagtgacttttttttcatcaccaagaggcttcaaacacaacaaaaaccacattagcagaactatacagttctcataacggaacataagaggaaataattctcatatcaatcccatcatagatgtctcaaagggctgtgagtttaaggctgaaaacttctgagtatctaattttcacaatctaagaagatctatctattatttatgtagccaaaataacatgattcagttcagatgtattaggaaaacttccattggcatattgcaagttatcaaaggattagatggatgaaaaaaaattgccgttcagaaaaacaaacaagggggatgcaacttgcatggtggaatgagaatacaaaaggtattcttatggttagtttttatatgaaaatattgttgtcatacttattgaaattatagtattcaaaacactaggttattgaacagtcttctactcatttttcacatagggatcataccatgctaccaaaaccaatatatattggttttggcccctgttgaagccactgagaaagctcttgcggtggttgatactttgttccaagatttaagaagcaatatcccacaacatccacgagaggaccccaatctgtagatgaaaaaacatgcacacaataagatcctaagatatttgtaaggcatgaaaatcaacaaacaggtcatggtggtataattataaacgagcatgatgatgattcattttgtaaaagctaagtaagttttacatctgcagactgagttgcttgatgcagaaaatatgttgtaggggtccaaagcgcacataggtcaatggggataaatgttatcatgatatttgcgaaacaaaaaaaaaatacatacgctagtatttctttttgtgtgtgtgtggggggggggagggggggcatatattagtgtttctaaccatgctgccatccatatctatatatatggtcagctaccctcacatgcacaaaaaatggaccctgtcaagagggtcctatcactttattgtaatgggctaggatacctaattacttggatttatgtttacaccataaggaagaaaatatatctaccatatacatgagacaaaaaaaatgatgtgcatttcatgttgaagctcaattatgcactaacagataagttgtatcatgaaattttagaaaaaagtttatataaggataccatttggcttcggcattagatgagggctccacatgtatccagtaggtaagtgtgatatagatccatgatatgtgctgaaataggcaataggggccaattttaacttcttcctgaactcatttatgaatcccctggtgccccaccaaattactaaatccaaaatcagataggatagctgaatgtgagaggtaagcatgtcagaatctgattcatttttaaaaaatcaagacagatcaattcgactgttatatacatataatggaaaataacatatctaaattgtggctgcacaactgtgaaaaaggtagaggttgtaccctgtaagttgcactctgaggcattcgtgccaatggatgagggaactcattagttggcctgcctacaaatattgggagttagaaaaaaaggatatatatcaaccttacacaaagagtacaccataaatcttctcaaataaaaaaggaatcagtcatagtgatcgtaggtcctgccatccagctcctatcctcacttcaaaagattgaggataacctacatggatatgtaggagtgcatcctctgcccacgtgtttatgcatgtgagcagttcatctaatgtgaattatactgttatacatccaatgttttatgaagacaatttttactttgcacttttcataacccaaatgaagagtcctcgcagctcactatttggtagagtttacattagaatttcgagtactagttctgttgtttttgtactataactatttggtagagtttccgttagaattacttgagtactgtttcctttgtttcatactatattcaggatattagtctagcatcactaaagaaatttatcgagcagtgtcaaaggtgttcttagtaaaagtttctagcacaatcaatagcaagtgggacatgaaaaggaacgacacaaaaatcttaacagggatagccatgatgataggaaaattataaaatgtttttatgctggcaaggagatagtacagacttacgtccatggaaaagtgaagaagatgtgcaggggtaccccaagtgcctctgcaatatgtagatgtcctgaagtgatataatttgttagaagaatataacacagtacactggtatatcaatattagtatcgtaatatttacaagtcctatgattacagtattttggcataagaccaagcaattgctttgcctttcaaagttaatggatgcatgaccattgaccagtcaagttgatgctttgttaattttttaaagggataaaagctggccaaaactttagtatgtgagcaagtagcgcgtgttcattttaccgtattgacagtggtttaagaaagtttacatggtggtactctttaactgttgcattcatagcaaatgttgaaggcctcagggtaaaggcaagcatacttgatgaaatgggagagataaggctttcaacaagtcaaaacctcggcagtagatccatcgcctcaattgaatgccaaatactaagtagttttaatgactcagaaaacaaaaatatgaagtcagaagctaacagaatttgatgtgcaaaatagtcctatctatctagtacttcttctgtttcacattaagacgttttgggttttgcataggttcatgcatggattcaagtatgtgcttcatatatgtgtccaaattagattcaagtatgtgcttcatatatgtgtccaaattcatatggatgttagtgaatctagatgaacgatggagaggccaaaatgccttataatgtggaacggagggagtacataattaatgcaggtgcgataatggattttcttgagagattataaatttccacatttataggaagaaagcatccaacagctaaaagtatcactaaatacaactctatctttcttacaaagtgcatattgtggcatgcacaactcaataagatttactaaaagaacatgctaaatcaacaaatattataaaaaaaacttataattaacctttggtaaagagaatagagtggtgtcataacagcaaaacccacctaaagcaggaggatttgcaattattgcctgagctctaaaaggtaatccagtgtccaaatcaggttctgtgcatgcaggtagaacagagaaaattatttccttaagctgctttctttgaacagaaatttctgtgggtccagccaggcaaaatcctttgttttttgtcatatctgcagttgaaaatgccctttgtcaaatcaaaagtatagtacaaacatatttataaaaactccgttcaataaataactcataagcactgttatataacttgtgaaaaccattatgcttcatcattagcaaaatggcataacaggattatgacggggcaatgttattttaacaaattcatttttgtggacaatcaagtctaccaaaataagcaaatgcagccttatgagtaaacagtcatatattttgagcaaggcaggtgacaagattaattcagaataagaaaagaaaaacatatggtgtataaaattttccattcctggaggcatagcagtatttatacaatctataaaagcaggagacagcaaatcatacactgagccaatatgcgaggatcaccacccaacgggtaaaaatcaataccagctgacttcacaaaggtacggaaattggcgtgagttgccaatctaacatagtgaccaaactcctgcaggaaatgccaaaatttctattagggaaaattggtttggtgaaactgaaagataccaactttagaaatatacagtccaaagtcacatgtgacaggtacacttaataacatccaatttttgcactatttagatatctagcattttgtcgcccttccgttacttttacccatttttcatattttttggactgaacaacagatgggaaaagacaaaactgcccttgaatcattaagcactcagtctactctacatcatcctggattgatccaatcttgccatctctagccttgctaacggctcccataaccgccatctgctcggggactgtgctatcagcatggaactggttgcatgagcaggtaaatcgactgcggcagcggatagtgatgagggacttgttggagtaatgaggagtaaggattaactcatcatccattattgattgacaagaaaatggtgagacaacctgcgtttgaaaggatttgaactcaggccgatgcactgctcctggcagctccctgccagccgagctagcagccattctcggtgatgagggactagcggagccggctgatggtccaagaccatggctggcatggatttgacaataatgccaccggtgagtggtggtcagggactgtggcagcgccaatggatggtgaactagaactgcaccagttgtgaggaatcaattgcaccgccaccgacgagtggcgatcagggactaccgcagcagcatggaattgtatgcggggatggtggagtcaactgcagcagatggaaagaaagtatggggcagggaagtcgactacggtggcgacggcaggggatcaactgcagcggcaggctggcagtacctagagttcgctccaagtgcaggctctgtggagtttgccagcgaacgagcagtttgtcatccacacagagggtatttcggtacaagagttatctgaagcccatcacttgatggaaatggtagagaactaaatgtttgtaacttcgaatggtattaaagtgaaccaataactctgagtggtatatttttaaaaccaatcttccctttctattaagggggaagcaaatacaagcttgcaaatatattgtaaatccagtatgttatttgatgattgctattaattaagaggattccataagatatcatgagtatatacacttaaaaaataaatacacaaaaacatactacgggtgtaaaaatagtgcaatccaagtcagatatatcaaggtagataagtaaagagtagtgtagctctgtccctctaaaacatttcaaaggctggtagacagcataaacttgtagccatggttcagttatgtgtagtcttgctcataatctcgaccaccactgccaggcaggccgttatgttcacatcatctaaagttatcagaataataatcttgagcacacacttaacaaaatagacctagcatatcaattgtccacaagaactcttgaatggatctctagtgggagtttgcaaattcacttgcctgaagtcgtttagctaaggctataaatggctggacatcccctcgtgttccaactacaagaataacaatcttcaactttgggactgacttgctcaatccaggtgcagcttccacaatatcacgagacagagaaccgaatgcatcaatctctgaaagttcggatgcaataagagcactacgtttcacatctacctccagtgtaccatcattctggatctttaccagattctcaattatctttatctgaaatccaaaataataatgaatagctaaatacatggtaccaacaaaacaagctgaattcaatgccatattgacatataacttccatttttgtaggtaaaatatcacatgagaccctaattatgaataggtaaaacacaaagtagaaacatcagttcttttggaacttgcaagaatcattctatgaagatacaagtgttgcttcctggctgttcacaaatttcaactaaagtcaagctctagtctcaccatgactgtagtaaacactaaacagcatatcaaacgtcagttcatttctagccccattgtaactagctcattgtggatagatgactatatagaatggtaattgcatctagatatcaggctgcaggcagaaactagtatccattgttacattggcaataatacaaacaacggaacagtgtcacatgaagtttctggcatgcatgaaaatactgcatcgtatattgaatgcaaaaaattccaaacgtgtaatagtataacataatatgaacaaccttctcattttccgatagcatatccaacgtgaggtcacacttgagcaacctatcagagtatgatcttacaaaaacatgctcttgccctttagaacaatccgaagtggcagttgtggatttactatgtccaaatcctgtggcagaacagattgcaatgttggcaacaattatatttttagcaaaaaataggcgtatataatgcagtagtatatatctactgtatgaatatttctcagtgaaacacctgcaggtcccagatgttttacaacaataattattatttttttaggtaaacaataatagtgagtatatcttatacaattctccgagctaatgcaattgagaacagtagattgcaagatgccaagataaactctgaggcacataatattaaattattcagccttccagtcttgtaataaagtgagaacatgactagccagtgttgtaagaaagtgagaacatgactagcgtgagctgtaaaatcaaaatcttagtaatgtgatgaaacgaatactcaggccaaaactccatgttatagtaagaacaaaattgaaatggagcaacaaccttgtaaatcagtaagttagctatatctcatcctaacatccttacaccaacactaaagtatagtaaacaactaaacactaccaacttgccctgaacaccccatcggcattcagaattcaaacatgcataaagcttaaaccatctaaaatggctatatatatcacaaatatcatcatacatttgctttggaagtggcaaaatacttaaactggtgaaaatttgtgcgacctgaaagttcccccttcccgaaaatttagcactatatat

SEQ ID NO: 451 - DNA, 941 bp, Oryza sativa
catttgatttgaacatacttatctaaaaaaaattgattttaatatccaatgagtagtcgaactgcgctaactagtttataaatgcaggtattgtacttgactctggtgatggtgtaagtcacactgttccaatatacgaaggatttacactcccgcatgctattcttcgactcgatcttgctgggcgtgaccttaccgacaaccttatgaagattctcacagagaggggttactccttcaccacaactgctgagcgggaaattgtcagagacataaaggagaagctcgcctatgttgctcttgattatgaacaggagcttgatactgccaggagtagctcctctattgagaagagctatgagctgcctgacggccaggtcatcaccatcggagcagaaaggttcaggtgcccggaggtgctcttccagccatcttttattggtatggaagctcctggcatccatgaagccacatacaactccatcatgaagtgcgatgttgatattagaaaggatttgtacggtaatgtggtccttagtgggggatctacaatgttccctggtattggtgatcgtatgagcaaggaaataactgcacttgcccctggcagtatgaagatcaaggtagttgcaccgccagagaggaaatacagtgtctggattggtggttccatcctggcttctctcagtacctttcagcaggtatccattgtctcaatgcatatacttttgtttcatctgcttaacgagattaccaaactatgtgtcttaatgcatttttagtacattgtctgcaagacactgcatccttgcaaacatttaacaaactttttggtgttgctttctttgacatgctccttgggccatgtgctgtcgactctgtcaaagggtggagatgtacttgatctttccattatcttaaaacacaaaggccaagacagg

SEQ ID NO: 452 - DNA, 15328 bp, Oryza sativa
gagcgggacttcttccctgcgccggagtcaccgacggccaccttctcctcacagcttaggcgctcagcgtcagcgtcgttcctatttggatgggataggtggacgtagggtatcccgtcgatacccttcccgatggtataccggtatatagcatttccgaaagaaatacaaaaaaacttgtgaggtccacatgatagtggccacctcacctccttgctctacttcccctctcctcacttcgcttccccagctcctcttatctcctacgcgtcgtcgagctcgtggtcaactccattctcaacctcgtcggtgagatgagaagcagaagcatggcccccatcctcatcgagctcttccctatggcgttatccacctcccgtcgtcacttctgtcctccatgacatacctggtcacacgcacgacggatgttgctgacgttttctccgccgctccaggacctgtcactgtcatcctcgactccacctccggcagtgagctccgttatgctagcatcgctgactatcctctactccacgacaacgggcctccaccaccggcctcaactccgtatctccactccaggtcggccaagccccaacaccgcatccgccttctccaactctaggacccgaccactttgtcgaccatgccatgattgcttctccctagctgacagcgcctcaacggatggcctcatctctatcctcctacccatccctaatgacatcaactctatcggttggcccccggtcaaaaaaaaaactctattggttggcccgtcgaccccgcccaactccctcctcgacacgtcaccaaccacgacctgccacaccctctccaccagtctgccccctcacggatctaaggttgtcgccgtcccaggcttctttttcgattgatcggcaactgctcgtcattgtcgttctacagagccaaggaccacgcttcctctagctcgtcttccactcaagctgacgccgtctccacccagcgtaccgagtgcacactatcaacggcgataagaacaagggcaagctcgactacgccgtgcttggagctcaccactggtgctcatcggtacggaggagataaggggaagagaaaggaggatagggaaatagaggaagaaggtggtgtgaccacttatagtgggccacacaagttattttctcttgctaattcggatactacatcagtgaaatcagccatatatactaccacgggacataatttaatctggttttgtaagtcgggggtcaagattttggtattgcggttaagggatacatttaaactcgacaaaaggaacgtcaagtggactcattcttggacaaatttgcaccatgggcttccgtgtcaactgggctgttactatacagcttgagaaatggcccatgagagaaaagcttgttacttctatttgcctctcttgtttctgctacttttggtacgagtgaaacggagaggaaacaaacaaccggtgactggtagatgtgatgggcaatgcgccgaacgccgatgcctcgtcaccacttggctttacagcgcaacagctgctcgctttcactggccatttcttttttccaggccgggatagctactggccgccgctacaggacgaggcgacgaaaaggcagccggtgtccggcgccaagtcatcgcgttttgcaggcgatgggaacggtccgcaccgcgtggcgtggagaacttgagatgcttctaggctgccgtccaggtgtgggcttcaggatgggcagctcgccgtataaaaaaaagttcatccgataggatgcaggatcagttgtgcccgccggcaagcgacggcatccagtggaaaaaaaaacaaatgctacgggtacagccgtacaaacctgcaacgtactgctccgtagcacctctttggggaaacgagctgcatttgccggcacagcaaaatcataggtatgctaatataaatcttatcaaaatttaataatggtaaaattttagtaaattaataatattgctaaaatcttaattatcaattttaacaaaaaaatagtatgttgatagtgtcatcaatctgaacatgctcatactcaaggtgggttcgtaacaagtggtgccatctaggaagtcggaaccggaaatcagcttggtgagggcagtatatgcatattgtagaagccatagctcgacggtgagagtaatagacgaagcgttaaagccatatgttaagaacgcgttgacgagaagctcgagtttgaggttatggccgtcgtcaccagatcaagcccctggttaatggagaagcgcaagagataacacataaataaatagttaaaagataaaacctagtaaaaggttttagagtggtcttattctacttctaagaactttcattggtcatgcctttatacaactagtgtctctataggttttgatgaaaagaaagatgcttctacatgctagaattatgtttcacattcactactgactactgtttactgcatatacctttagctttggttaattcaagctatcaagcatatgtgaaaccaattaagacaatttcttcctccttctcacaatggtattccttttagcagtttcaaatactatgtattttcatttccaagatcaaaaccatggttttattgtaaaaaaattgttattcccttttcattaatcaaccgtatcgaaaccaacaaaatattgcatttatgccttactccaccgttctaaaatatagcaatctaaaattggattagacttaatactatgaatccagattagaggaagtaagttcgtttcttaaaacatttttttatacttccattttcctgttccatgtactccaggggtaatggataaaggctgtgtttatttgttttggcaaaaaaaatttgatgtatacggacacacatttgaagtattaaacgtagattaataacaaaataaattacaaattccgcctgtaaacatcgagacaaatatattaagcctaattaatccgtcattagcaaatgtttactgtagcaccacattgtcaaatcatgacgtaattaggctcaaagattcgtctcgcaatttacatgtaaactgtgcaattggtttttttcattcacatttaatgctgctatgtatgtatccaaatatttgatataacgtaaaaattgaaagtttgaaggtaattaaacacaaccaaaaattgcaaatggataaggcagttacttctagagtccttgttccagatacctgtaccttatacaagaagccacagtacgatccagcagacaaagcccccacacctgatcccatcttatctccttcctgtttaccctgcacggcacccattatccaacttaacaatccaatgggccgtccgtccgtcccgtccctgacctgcctccccctgccggcgcggcgcggcgcggcggattccatcaaaaccaaaccagtctccgaaacctccccaccattaacctctaaaccataaagtccccccgtctcatgtcgtctcatcactcacttataatcacccccatccacttaatcacgctctcaacgctgctgtgtcacgtcacgtcacgcgcggctccgtaataagaccaccaacctcctcctcctccctcccacgtttggagctctcgtctcgtctcgcggcctcgagccctcgaccaaccaaccacccgcttcttctctcccgtctcccgaaacctccgagagctcagaagaaaaaagaagaaaaaaaagagaaaaaaaaactggtggaaactggaaggtttgcggcggaaacgagggggagggatggtggcgaggagggcgtaagcggggggtgggggtgaggcggatgatggcgtcgagggtgatggcgtcgtcgtcgccgtcgcacacggcatcggatctcgcgcggttcccggcggggaggggtgggggcgggagcgcggggctggggtcgatgaacgtggaggagatcctccgcggcatctacgccgacatgccgacgccggcgctgcccctcgtcggcggtgacaggccgatgtcgccgctcccggcgccggatgtcgccgccgcgccgcggacggcggaggaggtctggaaggagataactggtgcgggcgtcgccgccgccgccggcggcgtggtgccccctgctgctgctgctgctgctgccccggccgtcgtcgctggcgctggcgctggcaccggcgcggagatgacgctggaggactttctggcgagggagggcgcggtgaaggaagacgaggctgtggtcaccgatccctcggcggccaaggggcaggtggtgatggggttcctgaacggggcagaggtcaccggaggcgtcaccggcggcaggagcaggaagaggcacctgatggatccgatggaccgcgccgcgatgcagcggcagaagcgaatgatcaaaaatcgcgagtcggcggcgaggtcacgggagaggaagcaggtgggtgtggaaactgtgcatttttacaagctttcgttcgccctaggaatttgagttatactgagaaggctgacgtcttctttttgttggtgaaggcctatattgctgagctcgagtcgctggtcacgcaactcgaggaggagaacgccaagatgttcaaagaacaggtacttctccgagaccccgacatttctcgtgtgcttgtttgatgttggaaacttgaatgtggggattcgtgtgttgagaattgaaccgtgtctccattgtttattgagcttaaacttgcagaaatgtttctgttaaatctctaggtgagtaggcatgtgaccatgaacatgttagaactgcaacagagttgggctgtggagccaaaatgaattgcaagtagtattcgtttttgttagccatctgcttaggatgccatttgccgtggtaaattttttaaaggaaaatgcttcgcatacaacaatcatatactagtgcaccaagcagcacacgctgttcggctgttcggtacagcggccacgctacagccaattgctacaccaagcagcacagccgctgcactaagcttgctgccgcacagcgctgcatcaagcagccgaacacggcatatgcatattaaaactcatctcattcgctgcctttgatgtattctcgcttttccttcttggaaaaggtctccctataaaatttgtagtgtgtacagaagttgtctgaaagaagtgttattcactatactcaccttttgttcttgtctccatttcccctgtccattttaatttagaatttcatactgtgcctacacggttacggctggattgtgcatgacttgcttataactaatcaaggatggcataagttactcttcttggtcttctagcaatttccttacgataaactccctcgcatgtgtttcaggaggagcaacatcagaaacgacttaaagaggtaagctttgtaagatggtgttgcctttaattatctagtgctttagagcatttgtgttaagtgccatatcccaaaaaaaacttcacccacaacgcatgccctggaggggaaaaaagaacatcgtcttgtgaaaatcttgtaatcaatcctggatcagccttcatataggaacatacagtacagaacacaatactgggtaagtatacactggattattccgtattcgttggatatgatactccaaacaggagatgctttttagccttcccactagcctgcaccaagtggcttggcaaacaaacaataggtgatgctgacacctttcgatggcatcagcacaagtgcacaacacatgttgagttttgagattgtctacctcatccatttctttcttgggagcctgttcaactcattatagatgcattgcatgtatatatgtctgattaaaaaggcctgagcctgcagttccgtgcttttccaccacggcacagcttgccaggttgaagcagtatatagttataaattgtcttcttttgtcactatcagggaggttgggttgagagggagatgctttgtcaatttggttgtataagttgcatcgtaggcacagttgagcccacatcttgcttaggaacagttcgcctccatttggctttgcatactatagttgtcttccatttagttttcagccagcataggatttcagatttcttctaattttgcctttcctgcctggattgtatatattgatttatatatatcttgacgacctgcctctcatcgttggtgcagaggccgaattccattatccaaaaaaaaaaaaaaatcttttgcaaatctatatgctcattaactcattcattaggttcatcgatcatgcttatctgaagaaatctgtttactttatgcagctcaaggaaatggttgttccagtcatcattaggaaaacgtcagcacgagatcttagaagaacaaactcgatggagtggtagacgtgagccaagctcagttgccatccccatacagtttatgtagcatttgctcctgttttgtcaattcttctgttttatcggcagtagcctagttgcggtgaatacatgagtatttaggtgacacgaagcttaaatgtctggagtcatatgctacggaggggagagtgcgtacgagctacaaaagcaatcatatgtgtagggaggggagagtgcatatgagctataaaagccatgttccaatttgtcgcgggagtgtattctgtcccatttgttgtctgtttcattttcagtttaacaattaggtgtagtgaggaagaattacgagtactgagtagtactaaacagggtgactctaggtatgctgatatgatatctagttaggcattacttctgattctctgtttggtgccacgactcaaattgtctgtacatacacgttggatgtaaagtcacattatcaagtgaaatcatgatgtatttcctccagaattttttttgactgaatttcttacagaatttgggatggctgaagtatcatagcgaaaggcagaatcagaaagatacaatcggtgacatgtgactgtactttcaggtcgaatttcgtaagccagcgcagctctttagcgtattttggagtattatgattctgattaattggcaatcatctgtgacgtaaaattcaaatgattcgttaagggtaactaaatgttacagttcatatatagtaaattagagtatggttcctctcgtgaagtgattccaaaaggccccctactgactttttttttatataaaaatgggggcggaaaagaacatgatcagttgcatcaacacaccaaacattagctacagaaattctaatgcagatgaaagggtaagtaatcactgtccatccttgattcagtttggcaaggagacgctaaaatcacctctaaaaacgaatattggcttctgctagcttccagccgtcagacattacccgattactgatagacaatcctgcctaacatcagcaacgaagacacttccagattcgcaccatccagccacaacatctgtattcgcacactgcaagttcgccagcaacgtcgttaatgctctcataggggctagcttaacagggttacagggaatatatatcgcagcaagattttgccgatgcacacaaaaacattatactataagttattaatgcgagaggctagcttgctcccacttataacaggactagggattacctttgaaaaacccaaccagttggagtcccctcgaaatgagaaagctcgctcgtttcccttccaaagtccacatgtaatctgcagtgaaattatacgtatcaaagaataaatgtttacatcacaaatcacaagcaaaataattgcatatgtgctcatcaactatggtgtaacaacaactaattaagttactcactagactaaatagtccaacgtgaactgcagccttgtgcagaagagttaacagccgtatataatctattaaaaaacatatatcaaaagctgcttccagagaaacaattatagtgtttttgtctatgttactgaaattcacgtgtgaaattggcaatgagcacatgataagctaatgcatagctgatgttcttaaaattaagcattctatctacctaaacacaggttgccaccatgcaaatgaaattagtcgctaataactccgagatgcatagaattttaagcgagcttgaaaaaaaaaattatcccacatacctcataatcaacaccttggacataaatgaaagattcatcaactgatgaaaatgaaaggcctgtaatctgtgtaggaaggtaaatattttatcacatcatggaacatttcaccctcaatgcaggtattatgattcttctatgaagaactgtggttgaaatttaacttctttatatcagctacagaaagcaatgtcacaaggcgggctaaagtagatcgaacctcatacttggagcacccaacccatcttgacaaggctgaccacctgcatacaatagatcttcaattaaatccagattgatccacggtggtaacttctattataatctgagtatcttgttggtaccagatacagaagtacaaaattaaaagaaatacaaattactccaggatagcaaggacatgcaactattcatcggatctttcaaactaaaagaagcaagcaacccaacctgcgaggatcatagatggttacagtacgatctgttccaccaacagcaattggtccagaaggagaactacagagagagtatatgatgcctccaatagggccagaaatgcggtgtatgcatccaccattattgctcgttctcaagtcccatatgctcagctgcaaactaaccgccataagaagagagtacagagaagaaagtttatacagggacggtggattgattttgagtctaacctgagaaccttcagcgattgctagcattgaaccactttcattcacttgtggcatgcactgggcaaagctaaatgaagatggataccataacctgcagtttcaattttttacatgctaagtcagaaatattttgacattacaaataaatttcagcatgcatatactagaagatattatacagtaattataatatggtcatatggatgctgatagatgggggttatctgtttcattcacaaggcttactttgaatatagcaaggcaaaggtcagatataacccatatggatgttaatttttcgtttcatgtaaaatcgcaagtggtcgatacattgtgctttagcaactttcaaaaacaacaaagtcagtcagacaataatctgtcatgaaggcaatatcctggtaagaggaaacttacgtacgtaaactgcgaacatgaatgtcctggtcgtagatatcaatgcacttacacaattcacgagcaacagctacctggaaagaatataagttgtacctggttatgtggtaatgcaagtgctctacatattgatgcttatgctaaaagtataaaagccaataggaaatgcactgtccctgtgtataaagtttttgctaacaaagataacatgtggattttgtttgtaggcaataataccgtggattggtgcattggactaaaacataacccagcccaacttccttctccgacaccacaatcacgaggtggtactgaataggaggccctgtcaatgtctgagcaagtttagtagcgatatgttcatacatcgctaatgagaaagatgcaaatatgggatttctttcatgttttcaattatccatgccatgttgaagacaagacagaaagttaccatcagccaccgtatctaaccgagatacaataagatgaccataagagtcaactgttccaagaatcaaacagccatcacctggtaaagtggtaatgccacaaagaagggtgtgaaataaactgtggaatatgtgccgttttaattttaccaagactaaaagaagaacaaactgaaagccgaattggaattgataaataaatttattcggtaaattacaatataaacatataattttatcctcagcacttaacaaccttgctttgtgtataactgtatatatcgttctagtactttgcctagtgcctgtgactggcaattgcatttacaaacctaagttagaaccaaccaaatagtcaactcgtatagcaaatccaacaagctaaaattaaaatgacagatcactaaaactgaaatggctaggaagttacaggcgcatgagacagtgcttggtgaaaattagtactagttgccaagcaattatattgaagcaagagcagttactataaaatttcctcaagatataatataattaaatactccctcaattccaaaatataaggcataaccaccctaacccaaagaccaagaaaataattattatcttgtagtttggatcatcctaataaatacaatgcatgcatccaatagaattagagaacatgagagtggaggatttaaaaaagtaataatttaatggagaaggggtaatagttaattgcctacatgcatgtatgccttatattatggaacatctagaaaaagtagttgtgtcttatattatagaatggagggagtacaatataatgtacggtcgttgtttatgctctttgtaagccatagtttcagcaggcaaagcggaatatgccaactcaaacagaagagtatatatcaacacattcataacaggttttgatggctatttcagcctatgttatgttaagtgaacagcagaactactgaactacaacattttaatctgcgaaataagagatggttctatattgttgtgagatactgaagattgcaccttcaccctctgcaagaactacactctggatctctgaacgatgtgggcagcgatccaccactgacgagcttatgacctttcatttagcaactgaatgtaagagagcaatcaaggaccaaaatcgtaaaatggaagtccctatggaagcctagagtttgtacctctgcattgataggaatcaagaggctctccttgcccttggacaacatctcaccctccatggctatctgttcagctccaagatgaaagagaaatgggaatcaaacttgagaaccgcatcaaattacttcccaaatgtaattacacgccaactaccaccaccagcaaaaccaaaacgaacaggagagctatgtccttaaattctctcgccatcctgcgccaacctgcaagagcgactaagaactagacagcccgcacgacaattcctgatcccacagcattcgtgaaatcgtgaccccttgccgcgatacagttgtacgaacagaaaggaacgaggagccagtacgagggtgacctcctcacctcaatcttgtagacgcggcagccggaggcgaggtaggcggagcaggaggagccggcggcattgacctgcgagatggggggaaccgaacagcgcgaatcctcagagccctgggtttagggttttggaggcgcggcgccaacgagagagaggaaggacgcgtacgtggacggcgaggcgggtgggctggaggctgccgggcgaggggtcggagagcagggacggcggcacggccgccttccggaggctccgcggcgccagcatcgccgccggccgccgcagctttttcccgccgccgctatctcctccgtcttgggtgggaccgcctcactaaccgacacggtttcaccacttcacaaaatcacactaactccttgtaaaaaaacaaaaaaacaaccacactaaactccccccattcaaaaacactaaccggagatagttatctcatgataaagatgctggaaacgtctcccgaactgcgtccatcttgcaaaaggatactggtacagtcaataggtcacagtttcccaaggattttgtttgtttttgttctttcttcgcttatgtgccaaacagtttcccaaggattttgtttgtttttgctctttcttcgcttatgtgttatctgtaatgcgatttttgcaggaggttctttaaaccagaaagctttgtagtgcttggaagaaacacgttctttcatatgttgctgttcacgaatcgaagccagagcctggagcgccggttgctgatctagtgtggaacaaagttgggttacaccacacttgcccctttctggtttgccgggttttggtgcgaccagagatgtaaggcgatgactcgtacgctttcttgcggctacgcatttgtaaagtaaaacggccgattttccagtagtcccaaactttcgccgaacagaatgtccctagtgcacatgctttcacgaaaccatcctgtcggctgccgcaactttgaacttgcaagatagcaagaacacaattttctgattcaaatgcaatattacatggcacagcgttggaacaatgacattagttttgaagctcttataaattattagatgttgcaaactggcaccccagattttttcttttaaaaaaagagagattctggaagtgttagtacatggctcaaggtgaccaatgatctttaggtctaggatttctctgcgaccgaagtatggacatctgatcatcaaaccaccctgtagtattctgtattcctgccaaaaaattccgcgatccaagtctgggcatctgatcatcagatccttagatcttgtagtatttctgcccaaagaaaatgaataagaaatgacaggagggttacatgtttgatacaactataatatactactacgtagcgtttacttctttaaagacacgactgtttgttttcatataaacaccagggaaaagaatactgctgggaacttctaacagatcattagatcaacaacacatgcaaaatagtgacttttgtgaagatagctcaggcagagtagagataaaacctatgcctttcctgtgctacctcctgttattgctttgcagattttcagttggggaaaaagaatggtaaatttacagaacaggacatagaaggattattgcacatcagtcgtggacgaaaagtttttctctcgcaatataatttcatatttattccattgccttttatctgattaagaatggtaaaggtggaaagaattgaaagattgtatagacatgtcaaccagtcatgtacagtactcgtgtgcttaacggaatgtagcatctatgttggtcatcagataaggtatcattttgctgttcctatgaacttcacgcaattaagaattatagagagattgagggacaacgattgtataaagggtagtaatctgttggtgtttactcttcctaagaagtctgatggtgataataatcatagatagctttcgtcctgcagatcaatttgggaggaccaaattgcaggtgcttgaatatgtagagtaggttagtattactcgaggcaaataattagcttcaaaatcagttgtcatatattatgtccacggtgccattaattttctgtctccttttatttattatactactgttttcactcgatatccagagaccatcactattctaaacaggtcgaaagctaatgttactctttttttttttgcttcatcatttgcatctaaagtaataatttgttctactttcctaccaaggattgcatctttttagaaccaactctcttcaaatcagttctagaaagcataatgtcagtcggctctatataatataggttcacttataaaaatgttatacatggcataatatcgagtttcctctttctatcttccagtaacgtgcagggtgtttcactacattttcattgctaataatcacaatcctatatatcctacagtaacagaacccagcccaactcatattatgcaaatgaggaagataatcatccacaagataaacccctaaatcatccacaaaataatctgtaggcagtaggctaagagttcaaatgagatgtttcttaacaacataactatatgaaacagcgttccaactctctatgaattgcaaaataataaagctggtagaaagtatacctcaatgccttgcagtgcttttttggcttcagcattgcttttgaagtgatcatagaccggcttcaaaccaaaaacataaggtaaaaccatttcagaataaaatattgttttcagtaagaacaatggccgaaagaaatcaagcacactcaaataaactattccatccgttttatattgtttctccttaactgccatgtgcaaaatcccagtaataagtctaagaaagagttaatgagaaatgcccgtgtatgactgcatgcatgctataattatttaaattcttttacatcatcaaagtaggatacatcatgggaatattgtaataactacactcttattttactcaatagaaaaatatattaaaatgacacctcatgagagaaaggacaacactgtgaaacagggcatgctgttgtgcaaatatgtacactgtttcataatatattatttctttcatgttagagcaacttatcaagaacaggggttactgtcaggaaaagaattactgcatgtggtgatccgttggaatagtgagccacattcttgagaagtgaaaacaaatagtactattttcttttttctattttgtttggtgagggcttcattgctaatgcatgcatcttcttgctcctttcgatatgcaattcctagcggaatttcagtccacaattgaacctagattttggagttaattctttcgaaaaaaataaaaaaaacagcatgtggagccagttgttcatcttaggccttcctatgtgaagcatatagatcttagcagtagaatttgtaacaaaccctgtattgggcatcttccaggtgagacaatttattgatctcaaaattgtcaatcatagcaaatgcagagaaatctcaaaatggcagcacccaggcaaaagaaagatgactgccaggcaagagagaaaaaggttacctgcaatattttgattaatgaatttgcgagagccagcttcatgtcaccaggatgcagaaccccacttacataatcagcagtaagctcctccatgctcaggaacgtcctgtatatttatagtcaatatatagtcatcacaatgaaatgcaatgatagtatcatctcctgacactggtactagcacatggatcttttgtgaatgaattcatttagttgtgacttgtttaatgcctgactaattgtcgagttgtcatgaactggatgaatgcattctactggtcaattacatgattataagcatttgtcaggaaacatggagaagtgacttggagagaatcttacttgttaccaccatcctctttctcccgaaccacctcaaactttccataccatggtaagatgatatattttatgtactccaaacatggattggcttctgctaattttggagggcagaaagcatgttttatttttctactgatatcaacctgcaatacactaaacgtatattgaacagactcatttg

SEQ ID NO: 453 - DNA, 1565 bp, Oryza sativa
aactccagcatggaggacgcggccgcaggcgagctccggcgtggggcatggtcgcatggacggcggaggatctgcgtggtgacagagacggcgccggcgacgagctcaggcgtggggcgtgaacggcggaggatcctgcgtggtgatggcggcggcgccggcaattgagctccagcgtggaggacgtagccgccggctgaggcgtggacgacggacgtggctgccggtgacgagctcccgacggaggacgcggtcgttggcaacgagctccgatgtggaccgtggacgggggaggatgcggctgccggcgacgaggttcgggttcagtgtggagcgtgaacgggggagaacatggccgcaggcgacgatgcctcgacacctcgacgcccagctcctggtatctagtaggtatcatattgatacctcacaaatatcaccctgatacgtcgtagaaatcgcacgatacctgatagatatcatatgatacctcacgagtatcgcctgatacgtgataggaatcgtctgatacctaatacgtggtagaatcgtatgatacctgataggtatcacccgataccagctacttatcaggtgatacctgtaaggtatcatacgattcttaccacgtagaagatgatagttgcgtagttgcgaggtatcaaatgatactcgagtaggatcatgttaaacctgggaggtatcatgatcctccttagtatcatgtccggtttcaccaggtttcataggtgatactttaggaggatcatgtgatacctgggaggtatcatgatcctcatctgtatcatgtctagtatcattaggtttcacaaatgatatcctagaaggatcacatgatactcctcaaagtatcattatgtatgatacctatgcagtaccacatgaccctacttaggtatcatgtctagtaacaagatcctatgggtttcagagatgatactttagtaggatcatgtgatacttgcgtttctaccacatatcatatgatacttgcgaggtatcaaatgatacctatcaggtatcatgcgattcttaccacgtggtgggtgatgcttgcgatgtatcaggtcctaatacctaactggtatcaggtgatacctaccaggtatcatgcgattctgccatgtatcatgtgatacttgagaggtatcagatgatacctatcaagtatcatacgattcttacaacatagaaaatgatacctatcaggtatcatgcgattcttaccacgtagaatatgatacctatcatgtatcatatgactcttaccacgtagaagatgattctaccacactccacagccagccatgaccaagttaacaagttctttgcacaccatcttgtctctttgctcccccaaagtagcagatggataggatgaaggcccggactcgcagcgggatcgacggccggcgacgaaggcgccgaccggaaagggcccgcgatggagttggagccccggtggagggcgcaccggccggccacgcaaatggacccaagggtgggcgttaacggcggccccgtggatggcaggcggtggtgctgga

SEQ ID NO: 454 - DNA, 5494 bp, Oryza sativa
caagtttcaaagatgttttccaggcagctgctcacgtatcagtgttcctgcagtcatttatggtagatgtgcttggcaaaaggaattttggtggatacgccatactggctggccctatccaagttgtctgcaccatctgattattggcatcaccgttggcctaccacggtgcctttttcttctgaatcctcaatttgaatcaggccaaaatgcacgagtgttaggaatattcaatattgtactccaagattggcatgactctgtactagaacattcagcgtgtaaacgaccttattaatttggattgggatcctatgctgtttgaatagggaatttggaaggctatatgcatccagaccagcagggaccctctgcaaattaaatatggtgaaggttgtggtttataaggcatgcaagtccgcaagagcccactggcccctgaggacaaaggtactgaaaatattgttgttgcatagagattttgttcaagggtcagctcaatactacagaagattgggatttcggatcatgattttgtatgattgcttcgtgaattattgatggttcggtataccgaattcgcagtttatagtacatttggaggatatattggggtctacacaataaaaattctttcgtcttggtttctgctagacgttcaagctgaacaatcatatcgagtgcacgtacccgcgaaagctaccagtcgtctgttatgtggtatcccaaagccggtggagtataaggactgataaaaacctccttgaaattcctcaacaatactaatgcagaggtgtacgtaccatcatgcctgatcgctaggatcatctgctggaaacactaccttcagggtaaaaaaaaacacgtagcgctagtatttgacgctaatatatttacttagatttcattgttttgaactgtacgtgtcgagttaaaaaaatgaatcgagaaggcatgcatgtacattttgggttaagccaaattgccactcctaattgacgagtccgtactgataggttcagagaagtgatcattgacgaaatgacaaagcatctgtgagcccgcctgcccgagacgcctggcaccagggttcatggctatcatgggacaaatatcgtttttggcactattgtctgaagaaatgatactgtagctcgttctttctgcaagactagctgccatcgttaatttgcatccttccaatgtgcgtctagctactaggctagtactctaaaactaaaactttaaagaaaatctcttgtataaccttaaaattttagctaatcttttctatgtccctgtattttgcttacttctttgtatacccaaaaatatgattttgatcccttccatacccctcccgttagttgaccgtctaatttctataaaaacaaccattttaccttttggatgaacatagaaatttatgaattatgttagttgactgtctaatttctataaaaatgatcattttaccttttggatgaacatagaaatttacgaattacattactggaaatgcaaaagtttattggatgagactattatagttatgagttagacgtgtgatacattatttatgaaaaaaatatttttagataatgaaataaaaaatatgtatttattttatttaaaaaaatcataaaaataaggagcattcatacaaggatagaactacgaatggtcaagatttttttttaatgaatgctcccgataagaaaatctattgtcctattaaatttcaaataaaaattttaatttattatatttgttttattttcaaaatttatgtctaaattttccgcactaattatttagtctcttttttacataaaatgcacatattgtgcactcaaacaaaattttcaatggtttttaagcttatattcaaacctaaattatcaagggcattaaagacatttgccaccaacttaacggtgaaatgaagaaaaatgtgacggcaaaagcatggaagggatcaagttaaaatttcaaggggtatagaagggatcagataaatttcaggggtataaaaaaaattgagtgagttttcatgggtatacaggaaatttactcaaaaactttatcaatgcatttaccaatcatgcattcatgcaaggttgtttagcttttgatttttaccgcacgcggaactataattatctaagcattaactattacaaattcataaaaatgagtttatttgatttttgagagaaatttctatatatttcttttaaaaaaacatatcgtttagcattttaaaaaagcatgtgcaccgattagcaaaagaacacaccttaaaactttttgcacgatacttcctctgtcgcgtgaaaaacaaatctaaaaccagatgtgacacagaacaaaagtgtaacatctggttctatgtcacatctgtaaaaaaacgaatctatggattacccgtcgtctcgtcggtttatgacaatgatagcgtaattcatccaaaccgtctgagacgatgggtttagcctctaggtgctgtaactgtaacaggatgcaagacaaatgtaccaattgtatcggtagctcaccctctctcttcctgtatgtcctggatacagcgagggacttttttaccccgaacaatgcagaatccggcgcatgcagctatgcagatgcagggcaatggcacagcaagcagcacagacgcccagaatccacgaaaaagatcggcacagtccacatggaggctagccttgtcttcgtgcactagcatagcataccaggaaacagcaaaccgggccaggcttgccgctccgatatcttctccggtgtgggctacctagctccgcggccgcggccggccagccggtcccctcccttcaatgcttactgccctctccgccatgattgcattgtgcgccattgtccagggctccaggccgtgatcagcgctcgctgctacgctcagaccaacacaggaaattattacttgctccctactactacgtgcaagcagcgtaaagggggcaggccactgtttgaaattcatccctctcaccttttgaaacagccgcgcgtcgtgccgctgtagtagtgcagctgtgcaggtgcagtagctttgggtcaaaactcaaaactcgaaagggagacagcaccaaaaagatactgcggctgcagccacacagggctagctgcttgacgcagagagttcgtagcgacgttgctcgtctgggcatggcagtcgcgcctagatcggctcgtgcacggcatgcgttgcttgcctgggtacgccaccacctgcgcagccagcgatcatggccggcgcggcgtcccacggcacgagagcgagcgcgcgcgcgcgcggcactctcgtgaaggcgtacgcgccatccggccgcgcggcgcggcgcaggccggtgcagcgtgcaggttgacccgcgacaggcgcacggccgcacacgcggtgcggcgggccggcggcctggatttgggcggagttctcggtggccgtcgcttttcccgtgccagctgacgcgattacgagccgtacccgatcaaaaccggcgtgatcgccggtccgatgcatgcgttttgttttcatgccagatctttggtaatcgttagtacgactctctgagtccgcgagtacgctggtttctgttaattgcagcctacagtattttctttttcttttttgcctcggggaagcgatgcgagcgatacgtgataatttcaggtggcgcagtgccgctgtgcatgtgtgaaatcatgcaagattggcaggttgctagcgcgcacgtactcctctctggtgtgatcggtttcaggtgatagagacgatacatgggcataccttgacacggagtgggctgggatggcgcgggtggtccatcggctacagccttacatgctcctcctatcaaactctcgttatgtccagttcacttggcccatccttggtttcctctacgactagtgctcctctagccagtagccactacccactgtttccatattggcgcacgggtcatataagatggtttgttcctgttcacctgacgggaaattctttctcctaaaacgatatcgaaccatccttatccggattggattaacgagatcgtcgtgctaagtgtgctaacacacttgttatatgaccgttattccgagttcgtcttgctgctgggagagttgcagaattgtagtactcccttcgtttcatgtgacaagacgttttgactttagtcaaaattaaattgctttaaatttgattaagttcgtaaaaaaaagtactacctccgttttacaatgtaagtcattttagcattaacgagcatggtggctcgcgcaaattgcgcggctagcatcattatattttctctcatataatagcatatatgttttctcattatattattcaaatatattaaaataacaatataattttaaattttgtaataacattacaaaactactaatgtgtaatattcatattatattttatatacgtgttagttattaattatttttaatatcaaattttagttatttataaattatatatattcctatatggactctagactcgtcttttaatatttctttttttaattctgaattttctgtaaattgtatttctatatagactctatgcccttcttccaatattattttttttatttctgaatttttattatttctaattgtatttctatgtggactctaaactcatctttcaatattctttaatttttaatttcgaaattcagttactctaaattgtattcctatattgactttaaactcttcttcccatgtttttcttaatttcgaattttagttatttgtaagttgtatttttatacggactctaaactctacttttaattttattatgtttattccaaattttagttagttttaaatttctatatggactctatactctacttctaatattccttattttttaattctgaatttctatttcttttcttaattgtatttctatatggactctatactctacttctaatattccttatttttaattccgaatttcagttatttcctaattgtatttctatatagactctatattccacttctaatattccttatttttaattccaaatttcagttatttcctaattgtatttctatatgtactctagtctcctcttctaatatttcttattttttttaattccgaatttcaactatttctaaattgtatttctatatggactctagtctcatcttctaatattccttattttttaattccgaatttcatctatttctaaattgtatttctatatggattctgccttttctttttctccgattaatgtgagaatttctaggccatgagagcgaacgtggaggctcctttttctattcctttaataatataactagctaggtggcccgcgcaattgcgcggctagcacccatataaaattatttttttacatgattttacttaaaatttctgaaaaatttatctcgttgtcttaagatt

SEQ ID NO: 455 - DNA, 15418 bp, Oryza sativa
cattataggtaattattgtataaattttgactattaagtttactatagatgatttggagttagtagttgactactgtaaaattgctctaatatatgtcatgtcagaattcagatagtgtcaaaaagacacttaggttgagtactttttgttcactttctcaatccatctatctcgttttttatgctcactttttccaaactactaaacggtgtgttttttatataaaagaaattatataagaaagttgctttaaaaattatattaatttatttttttatttttttatactcagttaattatatattaatgaaccaccacattttctgtgcccggagatggagttcagccttaaagttactacctctccttcattctcgctattttgctcatccatacaaaaggtccaaaactaaccaaaatggagcctctgtcgccaactgaggctgaccggcttaatgtacttgctgttaggcacacagttaatcctgcaattcggagttacataagtttttaccgtcccagccttaaaacgattgcatgtacggcgggcaagaaagcagtaattattagattgtccaattggacgacgctgtacctgttgttgcgtcctctcctctggttaagaaactttattaagatgtcatatactgtgcgtgcatggtagagcctgccatgcatgcagcatgcatcgctggatcagtcagctggtgttaagcatagctaggggagcgatcgatcgacgatcagtacgttggggggctctgatttatggtgccacagtaaaacttgaagttgcactgacacgcatgcacatgcaattgcatgatcatattcatagccatagagtatgcaatattgctgcgccagatgctttcatgcacccttcaaattcaagcaaaacaccaagcaagcatacatgctcccgggctcccttctatatcattcattacacgggtactgaattactgaaacttcaaaaatataggtgtagtactagtaccacgtaatttatttcttgttacccggtttgtatatgttgtgactattccaacgaaattgcacgcgtacaccatactacggacggcaactcggcaagtacttgggtagctgggcaacagatcagttcgcgtacaggctcatcgactacgtaccaaactacatacgtataaatgtacttatacaataactatttactccatgtttctcgcgcagacgtactccatccgtctaaaaaaaaaagacaaactctgggtttccgtgtccaacgtttgactgtccgtcttatttaaaaaaattaaaaagacaagtcacacataaattattaatcatgttttatcatctaacaataatgaaaatactaattataaaaaaattcatataagacggacaatcaaacgttggatgcgaaaacccagggtttgtctatttttgggacggagggagtagtacgtaatagttctccaacggccaaaaagcatgtaccaatagtatagtatagtggagtattatatactattaactttgtactctctctctcgtttttttcaaaaaaaaaagggtttacgcaaaattagtactctctggctagtccccttataaggtttttaggattgttcgactttatagaaaaatgtaatattatttttaacataaaataaatatatgataaaaatgtattcgatggagtataggtttagtagaactaatttggtttttttatatcgctatatttttttaattaattttatcaattttaaagaagtttgatttggaataaacatataatttcctgtaattaatatggaatgggggaatacctagctagtaatcaccaggtcaaaaaaaaaaactatttaacgctagagctctactatatatgatgctctgtgtatgtaatctaagtacctgcagactctagcagtatcagtgtaccaccaagatcgatgatcgggcactactatctcacatagtatatacgtacatacggaccaaccccatcatccagtagtacttgacagtatcattttcttcaacttctaagcaagcaatgaacggtcggcacacatgcatatagttgtaagtactttcgtactactagctactccatcagtcctacacagcacacagaagtacctaagataacccggtcgtgtgcatacttgcctgctgcctcccgtgtttttatccaattcgaagcattgtacgagatgtgtaaagtatactacacaactctaacatttttttttttttgcatcgcaagacgacatacgaggtcgccgggtcgatccagagtttggtccgtcctgctcgtattatatctgcacagtacagtacacatggtaaaatcagcacccgccagtgaaacgcgatcgaccaacgtacgtacgttcgccaaggccgatgtgtgtgtgtacatgtgtttgtgtgcatccagaatcgtacaaacggccggggtctcgcgcagcagcagccagctagcgggcgcatgcatgcacaccgcggcgcacaggctgggccgtggcagcctgctgccgcgaatgaatgccaagtcgtccgcattagccagcggcttccggctttcgcaggtaggggctctctcaggagttcgtggccctgacacggtcagtgcactgcgcgcgcagcgcgcccacccgccggagcccggcgccgcaagccttttccagctgcggcgtttttgtccgagccgcgcgcgcgcagggtgtgagatcgattcaggggcgcgcacagcgagcgaaaagagctatactcccatgcgagaacgaagaggccacgacacgtccattaatgctgacacggtcatgaaagtgctcacggggaggcgcctccgctcccaagtcggtcgcgcgcatcatatcgtcgttcgtccggacgtccgcggtcgcgcatggcaaaaacgccaaagcgcgagcgcgatggagaaagcggcgacgccgacgtacggatcgaccaccgagcctaccgccatcacatgtcgtacacatgaaacgaaagaacgagcgacgccgcgaccgcacacgcctagtccgtgccgttgcggtgtgaggtcggctgcatggatgcgtttcgtgggcgcgtgtgtgggggtggggatcggaggattcggccggtttggattttactgctgtgttgttggccagttctaatccggttcggcctatcttgtgactttgtgatatgtgagtcgtttgacgcttggcaggccgtcggatccacacgggtccaaaagcgtcgtcacgaatgggcagtgggattcactatcttgcaccttgtttggtagaactctaacttttatatctaactttagaagttgggtctgaagtggagttgtggagctgacaaaaactagctccacctctctagttcatttcgtaagagagctccacccagctctgctcccttttttgtggagctgaaaactgtttggctgagctccaggtccaaaaaaagatggagctggagctgtgtcaaacagatccatatagtagtacaatctagatccaaatgaagcgcataaagcctctagtattagtaactttttctttttttagaaacacaagtactagtatattttagtttttttttaagataatggaataactagtatattttagttagccttgacattgtgaaggcatgtacaattattaataatgatatcttaatattgctaatttggaatatttaattgttaacatggaagagagaaagtggataaacaaaacattgttgttatggttaacaacgactcaacaataactcttagtcatggttgcataagagtgaaaaaataaacataaaaataattaaaaaaaaaagaatattttaaagttaatggttatagcctatcatcttaacaattgcaaagatatagtatctaaataagtttgtattgtctaatagcctattcgtattgggggaatttcaatacataggaatagaaaaagcggaggaattgaataggagtgcatgcacacttcaatccataggaaattttccatgaggtttgtttggatggaaaatttcctttgttttctctctataacttgtaggaaagaaaaaaattcctttggttttttctatatatacattgctatgaatcgaatgatattcgtaggaattaatccttaggaatccaaatcttttgaaattactctaaaacgaatagtccataagagataatattgtctctaccatttgaatatgtcctcgattcccagcttaaggtcaatctacacagttgcacgcaccggatatctttaattcttctcttctttgaattactgccctgtgtatgactggtaccttagcatggttgccaatcgactttttctgctgcttgtcagtgatttcgaggaaggagaaatgttagaatacggatgaactccctcactgttgtaaactgcacggatcctgatcatctgggttttactggagtagtagaaagtagaattggtgccagcaaacacagtgaaagttgtctgaattttatctgcccctttttatcttgtttcaatatgggagtacttgcgcaagcacctaccgggagggagcttaacatggtagtggcacgcatatatttgaatcgcatgctgatttacaaacttgagcgtacgaaatgatgcaaagatatttcatcgatccagtgcgaacatttacatgcggctctgtatctatcgtggcatgttggggaacgatattagaaacgaattttttttatttataattttttttattaaaagttttacaaaaataattttctattttgaaaattgacggaagtagtcgcctaccgccctctgggaaggcgaaaaatcgccctcccagagggcggcgaaaatgacgtggcagacggccgttcgctctcgggcgacggccgtcaacgaaatttgcaggcggcccccttgccgccctccgcgagggcgattttgtactgtgcggggggccgcctgcaaataggcggcgagggggggcatggaaatttgcaggcggcccccttgccgccctcggcgagggtgattttgtactgtgcggggggccgcctgcaaatgggcggcgagggggcatggaattttgcaggcggcccccttgccgccctccgcaagggcgattttgtactgtgctctatatttttgtataaatatcaatagttatcaaatctttttatattgaaaactatacaagattaaaatctccaagactgataaaatacaattttattattttttagggcatatttggattgttaccgtacaaatattttgttaccgtacaaatattttgttaccgtacaaatattttattaatttttagggcatatttggattgttagtgccaaatttttcttcacgaccaaatatttggtaaggtaaaattgcatttgatcatatttggtttgctgccaaaatgtaaaattgtagtgaagaatgttctacataatctcaaatctagattacgtattaccaatgaataggcttccattttcgtgtgttgtgtgctagtgggaaagaagatatgaagaggttgccttcagattgtcaattatatagcgtcgttttcactgcaatatatgtgaactcaatgagatacattattcattagatgtgacaagacgatcacgcgtgggcgtgattcactttatgtaaacaggaagcgccgaaagttgatagtgataactcgagctgccgcttttcatgtgtgctgttgtggactgtgcgcgctactggatctgacactaccgtgcagcgccgaaagtgtgttgtcgtgagcataagttgttctagcaccatatgaatgaaaagaactatgtagacgagacaaacacaagtagtactgcagtagtaatagcaaaagtagtactgctttacaagtttgtaagccaaaagaaacggtcacataaggactgaagaggtagaacactactgacgaggcctcttacccctgtccctcctaccctgcgccctaatgtgcccgtgggagtacgtgagtcggtccgggggtacggcacggccaacccgtcctgcctgtacaggtgtgacctctggctgctcctgagtgtgtgcctctggagctcctccaagctgagaggagcctagtacgtcgtggtggtctgcaccgtgcaagtcgtcgtcgtagaactggctagtaggaccagtcctaccggcgtgagacgaagaggccccagtaccgaagatcccggctgcaaatcctgctggacaaggaccatcagtttcgtacaggtatttaacagtattaataaaaagtaaagtaccgtgtgggcgagggatcgacgctccgtgagaggaagagctggcgaacgcgcccgaagaggtggcgaacgcccctgcggagctcgtggaagcgccggtcgtgcctgcgaacgcgctcgaaggcagacgaggtcctgcgatgaggaaacgtgcagttaaaacatggtgacataatcgtgcaaaagctgaaacaaaaatgaactaatatctgggctgaactgtaccgtgcgaaaccggtgctgtaggtcgcactgatccgaagctaggggcgctcgaaggcaaacgaggtcctgcgaggatggatcatcaagttacgacggggtgatgttttcgtacaaaaatagaaacaaaacttaagaaacctctgggctgagcagtaccgtgcgaaataggtgccgtaggtcgaggtcctgctccgacggtaggcgcgcgaggccgtggttgtaccggaccagctggaggtacgacgtccacggcgctgcgacaggagaagacgcgcatgaccgcacgcatcttctcctgcatccggtcgaaggtcaccctctgctcaacgtcagtcaagtgcaaacctctgttcaacctcacttggactgcggtgatatcggcactgatatcccgtgcggcatcagcctatgcaagatggaaataacaaattcagtagttgtcctatattatgcaagataaatgaaataattgtaagaagtaatacaaattggatgtaccgccacgaagtagtctcggtcacggtgcgtgggatacgcgtccgtgacagcggcaacgtgcggctctggggcgtctggagtgaaggtcacacgcgcacgagtgcgaggaaggtaccaacgaaggtagtcacggtagttctcctccgtgtgtgggaagagctcgttgatcacctcctctgtagctaacacccagtcgtcaacgtactgctgtacacgtggagcccaaagtgcgcctgctagctgtccccgtcgagtcaacctgtgaagagaggtaaattatatggctcgatgaagtaattatcataaaaatttagaaatgaacaatccgaactcacgagtggtcggcagggaggacggtcggctgcacgttgcccggaaacacctgcctaagtccgaactgtctcatcacacgctgcgggcagtgaggctcaacgaaaatgtcgaacaccatcggcaggatggtgagccagtaagcctggtcgcgtgtgcacaaggacgaaagtcctagcggtgctctcgcagcgacggcctcttctgtgtacggctcccagatgacgtcgctcggctggagacggtcaaactcgaacacgaagtccgggtaaccacgtctcacctggatgtgagcgtaacgacgctgcaataaacatgatcggaattagacatgttatgtgaagaaaaaaaaaagacgactgataaacttataacgcagcgaagttgcactaaccccacgtcgacaccagtaagtccccatcgtgggaccgtcctctggccactgcgcgctgcgaccaaccccatagggtgcgctgtccaccactggtcgacctatggcaaacctctcggctgcccaaagctgaagcaacatagggcagccagcgatgatcgctcccgcgtcagtcttcgtgcacgcctcacagagggcacggtacgtggctgctagcacggcagaaccccagctccactgcggcacgtcctgtggctgagcatccgcgatggaccgtgcgtagtggaccagccggaagtccacagcgtgcccgtgggtgctagtgaacatcacccacccgaacaaccacaacaggtacgcctcaagggagcgtcggaccgagtaatcatcagcgtcagggtgtagaaggtccgcctacaattaagaatgaaatgttagtacaaaacactcattcggtcgcaaataagcacgtatgataataacaacttatttacttacagtgaactggagcaaccaagccttgctaggcccgactgtagagtacggaggaagggtggtggtcggtcctaggtgtggaaggcgcatcacctgctcgaagcgcgcagtgatatcctccttccacccaaaaacaccgtccacgggaccaactgctgctcccgccagcggtagcccgagcaggtacgacacgtcctgcagtgtcggagccatctccccacagggaaggtggaacgtgtgcgtctcaggtctccagcggtctacaagagcggcaaggagtgaccgatctgcatcccaccgcttcgctgggtcacggtcgtccgccgccgcctcaacaagcctacaaagtggtagaaggcctgccgcacgcaacctgtatagagcaaacttcaaacataagtacaacacaaagcaaagttgagttgaaatgtgaacatacgcgtaccaaggaacgtgacgggggtcgacacgcaaccactcgcgcgacgtgcgtggacggaaggtgccgagctgtgcaccctcgactgctgacaggaacgagcggtggttcctgttaatcccacggttcaacagcgccggtgtgtcgtacgccatacctgcatcaaataggttgatcagaaacatataaataattagttcaacataagtaataaatgttgaactaagcgaattactaacacatattaaacaagagtacaaacaaacaaaagtgtttagtccgaacactcatcacgataacattatgatacaacaccgaataattcgcaatactactagtacaacaatagtcggaggtactcattacaacaacattgaattgaaattacacgatagaagtatttagtccgaacactcattacatcacaacagcattttatttcctaaatcgaaagcattgttacaccatggaatcgcctgctgcgcgacgacgccttggccttgcgcgcctgcttgttgttccttcaccaggtggtcgcctaccatcacttgcctgtccagatggactagcatctgcgccgcttggaacttctgcattcttcgggcacctcacttcatacacataatttgttgacttgaccaccctaaactctctctgcaaggaaactgcccaatgcttcaccgcctccttcatctcatccttatgagcatatcttgcaccctcaattacctcgttctccttatactcccagggtacatgatcaccctctgatataacaagtccagagaagtcctcatttgcccaatcagtggccattacatcaccttcctcatcggatgatgcgtcgtcgtccacttcctcattatccgaatcttccctctccatttcatcaacaattgtaccgactctctccccctcatccgccatgcccatagcctgctcctcccttggttgattttcctcattttgcatcgatggtccaacaacatcccctgcattgataggaccctctacatcttcggtttgcattgaaacatttatatctttctcttgtaccgacacaaatataacgaggggccatgaccgttcaaaagccatttccacataccgtctccaagcatcagtgctgtccatcggcattagttcccaaaaataaccttctgttgcacgactcactacaactgacactgacattgtgtagacttcttggtctattctaaatcctctcaacaaccaactataaattgactgaaatgttctctccgcaggcctatcaatgcccttagatgtcattacaaaatctgacagatcaacaccatctggaccaaatctaatatttccttcaccgtgaactatctgaaatgtgaccttacttgacattgtgcctgatgaaaacaataactgcgttaacctcgcatttctgtactacgccctaagttacattctctacaatattgttctctaaatttctaaaattacgttacattctccagatcaaactaaactacatcttacaattaacactactgtctatgtctcaattcatactattatattctatgctctggatctacacatatgtgctatgtgctacagatgtgctaaaatatatggaactaaaactaaaacgcaacatatatactcaaacataacatattagtacaaatgcacaaaagatgtatgggagcatacctgtgatgaattgagcgaaccagcagggcttcgccgctccccttctgctgccctcccctctctctcttttggttttttttggatttttagtgaatataatgaaatttcacagaggagggactgggctttatggggggagaggcaaaaatcgccctcccccagggcggcaagggggccgcctgcaaaatcccatgccccctcgccgcccatttgcaggcggccccccccccacagtacaaaatcgccctagcggagggcggcaagggggccgcctgcaaaattccatgcccccctcgccgcccatttgcaggcggccccccccacagtacaaaatcgccctagctgagggcggcaagggggccgcctgcaaaattccatgccccccctcgccgccaatttgcaggcggccccccgcacagtataaaatcgccctagcggagggcggcaagggggccgcctgcaaatttcgttgacggccgtcgcccgagagcgaacggccgtctgccacgtcattttcgccgccctctgagagggcgatttttaaaaatcaccctcccagagggcggtaggcgactccttccgtcaattttcaaaatggaaaattatttttgtaaaacttttaataaaaaaaattataaataaaaaaaaatcccgcccaagtaaagcagcccgtacaacaattttatcccaacaacaaaatgggccggaaaggcctcgtgggtcgtctttttttctcgggccatcagatccacggttcctacttccaagttccaacgccgttttctcctcttttaggcgacccagccgacttcgccggccgaaacctgccttacggcaactcatgtcttcagtgacctaacagcttcgtttatatccatgcttatataagttaaaatttaaaattgattttctggtttttgttgtagtttattttacaacgtttacatttatatcactaagtagtacggacacatataaacgttttacttataaattactacctctatattttactattttttatatgacaccgttaaatttttacattacgtttaaccatttatctcattttaaaaagtaaccatcttcccttttgttgtggtttgatttattactaaagaaaatttaagaaatatttttattttaagatttgcacgtaatttattaataagcgaagtaagcgtggctcaagtagtcaggtttgttgtggcgaaatcaacctactcaaattcaagttctagacttgatacatagaagtgtaaatggctaacccgtaaaaccaacttatatgtcaaaataagtcacgaacctgtttattttgatccataagtggattcgcggcttacccatttatacccctattaatacgggtgctcgcacttacgactaaattattctttcagtgatagataatgaggcgtccataatgattttgtaaatctcaagatatgatgtctgtctttcgaatgtgcttatatagataatgtgtgcatgtatggtaatagcggtagagtgtgaacacattgcttgcgagcgtccgtatttaaaaactgaggaaatatttttttttgctaataagcaataagcacaagtgtaattgaagaatgggtaaacaaatcaagtgatttctccgtaactacgtacactcacgccggccgaatccctcgtctacaccaccgcctggttgcgatttgtcagttatagggcgcaagttcttctctaatcgaattcacgcgggcgcggatatggacgtcgactgtacgctccggcttgcgcgtgacgaggcgagaagctctcgctggtttgcagtaggttgccgatctttttccgcctactattagtgagctcgagtgtggctgcctggtacactggtacgtgttggacttacgtaatactccgctctactgttaccaaaccttggcgacaactctactgtacggtactgtcatacgcatcacgtaatcattgaaaccttagctgctagccacgcgcacagttgggcggtgggcacgaccgcaccagcactaccaccggccacactttgcacccatacgcatttggtcttcttttgtcctacaaaatctactgctaagttaccgtatcgttaggaactcatgatcatacgtgcgtacaagtacaacgaacgatcacatgcatgcacgctcaatcgatcccaagcatgtaggagtaggaagagtacttaattaattaggctaatgaaatgaaatatcttgatctggtagtctactatatgccattaggctcgatgagattaacaccagagattagttcacctcaaaatccaaaagacaggagctaataggtaggaagttcactacacggcgagttttgcctgcttctcggcgacctccaacgacgactcctccgtgatcgtgcaagtcgagctcctccggtgcgacgagcaggacgcgagggccgggtcggcgatggcgacgatgacgtcgatgaacgccgccaatatggcggcgtgcgtgtccttgccgttggctcgcaggtaccatcccagcatctcctccagccagccccagttgccgaccccgtgcgcgaccaccatctcctccatggacacccggaagtccacgtacgggtcctccgactcgaacgccaccgccacgccgccgatgaaggaggcctcgccggcggcgtccgacgacttctcctccagtatggagctcgttgccgacgctcccgggtcgaagaggagccggtcggaggagcggaggccgcgcacgatggcgtcgtcggccgtgtcggcggcctcggcccccgccgacgcctcggacgccgtggagaggctgtcggagcagtcgtgccgcgcggaggaggtcgtgaaggaggactcggcggagtcgaggaagatggaggcaatggtcctggagcccgggggaggcggcggcgccgtcgcggcgcggaaggactgcgtccttgggttcttgcaggacggccacacccacggaggtgcggttgccggggcgggaggcggggacggcgaggtgtccctggccttgttgtggaagaaggagctcaaggccagccttccgatgaccattggtacggtgtgggtttcaagatgaaccggccggaggacagagggtttggtgtgtggctttaaaacaggggagatatgacacaaatcgtggacacgacgcggtttggttttaaaggagctttgggagggaagaggggaaggggggacggggatgaaagaatagttctgttgggcttttcagatttatggcctgtttacatggcaaaaaaaattatcctacatgttacatcagatatatggacacatttaaaatattaaatgtagtcgaataacaaaacaaattgcagattccgttagaaaactgcaagataaatttattaagcgtaattaatctgttattagcaaatatttactgtagcaacacattgtcaaatcatggcgcaattaggcttaaaagattcgtctcgcaatttcctggcgaactgtataattggttttcttttctacatttaatactccatgcatgtatccaaaaattcgatgtgacagcgtgaaaaaatttgttttggaactaaactgccacttacttgtatatatgtagatcttcgagaatattttttgaaaattagagtatctaaaaatccgtcgcaagttttctaaataaaaatatttcatatgttaatatagtataattgaagtgtaattatgtaattgtattgtgaacttgtttggtagtgttccactttctaatttaactctagaagttgggtctgatgtggaattgggtctgaagtggaattgtggagcatcctaaacccattttcacatctctatagttcattttgtgagagtactccaaccaactcgacacctattttaggtgaagctggagctggagccgtgacaaacatgccttggaactacattgtaattatgatataacttctataaaatttgtattcaacaatagtttggttgtcaataaccgggatcttacgcgtgacaggtgtaaaaatatatttttaacaatttgtttccttcatgcacaaatctcaaggcagtccactcgtcacaaatctgaaagttttagggacaaaaaaatctcttggaagttttctagcaattttgtaaaattaaccaaggccgcatacttcattttacataatattgttggattttttttctagattatttccatattgttatactctgtaaaaaggtttgggctctcattatcagccacaatgaaaatttaaatatctgaaacctttgagctgattttaatttaagtcatagtccacctgaaaaatggtttttctcgggattgagatcctctaaccctttgattttaaatcactaattaacatgtggatccgctatctagagagcccatatgtcagtgacctacgtagtcgtcagagagaattaagttagaggatcctcttctgtagtcttgggttctcattgtccaggaagacactgtatgtactgtcctcatacttgagtatccatgacttgatgatccatgtatgcattggttcatctgaaaaccaaaagggtgcaattttcagaacagacaacccaaatgaaccttgcaactcatttggcacactcagacggacgatccggattatgggggcaagacccacagtcccacacatgtgcgttcataagccaaaaagagcaggatgctgagacacaaacacacaggacagcgctgatacatgatacaccatccattgaaacctgaatggctaccttgtcttgcagatggaaagacgaccgggtcttgtagcacgaagcatgtaaaactgcaaaggcatttcgtgcttcaagcgaatgtttttccggccatgtttaacgcaaccccgagaggggagcttgaccctgtaccctgtccacgttgctctttcatggttccatgcaagatcggaggccatgtctttgcctcctgcttcattgcaagtcgtgtgtggctcgctgcatattggtagcgaactcacttcgccttgccagtcgcagggtggatggatgatgcacaaaagttttca

SEQ ID NO: 456 - DNA, 1409 bp, Oryza sativa
ccaccaccctctcatcctccacgccttcgccgacctctggactcgcaacggcctcttctccccgccgtccccctgccagttctagccaagtttcaacgcgacgccaccatgcacgccatacttcttaatcgtgttaaccactagctatattactagtgtacttgttaccagcgctattgatagcgtgtctgtcgcctcagtttgttaactatctacatggtgtacgtagttcatggttgggagaggttattaacagagatcccagcgtgatgtggtgcatttccaacggtcttcgatctgctgaaaccaaagcacaaagaccgtgcaaaatgcaccattaattagctccagcagcttgatctgcttgatgtaatgacacgccatatgcccatgtacgtgatgtgtaatgatgcgcgcgcgtggcgccgtggtggtgtaatcatatactacttgtgtttcatgctaattaagctagtagtactccctatctatactaaattagctgaatgcactggtcacgtactgctcgctgacacctgagcttattagtgtactacgcttgtgcttttgttgcgattcgcttgcacgacggcgtgacgctgtcctgtccatgcacgcgcctgtgtgactcgttgtgtgtctgtgtgctgcgcgtatatatgccaacccgaccgctttccgtttcgtgtggaacaaaggtgagcgttaacgtatacgcgcgcggtcgatgcgacttgttgagccgtgggggctcagctggggcgctgaaggtagtacaaaagctgccgctgcgatgctgcttgtttccttgtggggtttcatcattcgctggctcgacgtgttcggttgtctcggtgtgcgtgggtgggtgtgggcgcgtgacacgctgacgtgcttactgttgcggcgggtgagatttgatggagagggagatagctcgcccgatcgacgtacggctggatccttccgcggatcacggtggttcaaccgtgcgggcttcaccggcggatgcacaagttttaccccctggcttgaaatccaaacccgcatcatcccaatcctggctgctcagttgggccctcgcgacagagccagcgatcgatcctaccgagcccaaacaataaagagctttttttgggttacgggtaaagactattttatggtttttcggcggtcaacagtgatgcacgctggcagtagagcccggactaccgtccatccgacaatcccatgagtgacctgaacaggatcattttgatagtaatctgaacatgtcttaagattgaaaaatattcctccgtttcaaaataattatttttcacccactttataccaccaacataaaataaaaagactaaaataccctcatgtttatcaaatccaatataatttctatttactttatcttc

SEQ ID NO: 457 - DNA, 12644 bp, Oryza sativa
acttttgcgctgacattttttttttaccgaaacggatggcaggagctttggccattcatttcagatggactgggaataaaactgtaaacttttaacttttgtttgtctgtttcatgaaactgggaaatgcacatcttcatgcgaaattaagagaagaaaaaaaccggggcaagaaacaatggcacggcctggaactaatgctctgttgatctcaacactgtttgtagttcagcaatgtccaggagctaactaatccatgaaattattgttcacacgaacgctggtaattaatcagtagcgatctggtcgaagataaaaaaaaaaataacgatctggtcgccgccgccggcctttcctcacgccgccgcagacgctggttaatctttcccaaaacacatcaagaaataaacaggacggccccatcgcaatatatgtgcaattacggattacaccctctcttagtgttgaattacaagaatgccacaataatttttttcaaaattatccttctactacactactacagccctatactagatgtagtagtaacgaatttccacccttagatctcatctcctcagcggtatatatccatccaaaggtacactaaaaaaaatccttcgtctggattgctgtcaccaaaatctgtgaatcagtctaaaaagaagaaggaatcaaacggacgaaaaaactgttaattcgaaatggcccagttaaaatgaccaattgtatgggctagcatggcccagtgagttgacaacacccacgtatcatggtggcccatgatcatggtccacctcggtggtcctgttgtagcccagtaggtaactattatgtttcaaggaaaaagtctatactttatccttcagttatagtcggagtctgattttcattcctcgactgtaaaccgggtataacacattcctagtatcaatattgacttattttgcctccccgagaaattttgatggtggtttcacctgataaggcattctcttagaatggtttgcaatgtaaatatgtaatccattggatttcatgcaaaattctttataagtttatcccgaaaactttccagttcttctacgagacagactttactgaacttgaggcattcatatcattgccaatattagaagctacgttcaagatcaagacaatctttccactagttcgtctgcatcaaacggctcaatgcatgatgtgatccacagttgtcttgcatgtgcagtagatgtacagtataagagcatctccaacagcctctctaaatcgaactctccaaacacccatatagctaacttcccatcttatttagctagtcaaactagatactcacttcaactgactctctattaatcatcttcaaaataataacggacccacatgtcagcctatactcatattcttcttctctctctctccccttcttccttcccgttgccgacggcggccgcatgtggtggtgctgcgacacggggaggcgggcggctgcgcacggtggtgcggcgacacgaggaggcgggcggccgtgcgcggttgtgtggcgacgctgggaggcaagaggcgagacgccggcggctcgcgacaacgacccggggcgacactcgaggcatagctcggcgcggcggctcgtgacaacctcgacagcggatctagaggggggcggtgacggagctcggcggtggcggtggccggccgcgaagacgatggggtggcggtggccggccgcggcgacgacgggacggcggcgccctcgtcactccacatctgactccgacgatggaggccacaggtgcgtgccgcgtggagaaagagaggaaacaggcatgggtcccacatatggctagccggctttggctggccaactttggctagtctggtggggaatttatccagccggatggcttggagaggcatttggctagtttgttggagtagatttttttttgtgcaagttagccaaattttgacttggagagctatttgactaggctgttggagatgctctaacagacggtatgtgcctctttgatgccgtgcgttggggaaaaaaaaaagaagacgtcaacagttgtgaaacaggtgggcctgatatgcgcacatctttggtgggctagtgatgacatagaaccaggttactagtatcattttgttagcgctggaaacaaagaccggctcgtcaaaccttaactgtcgaagtgtcaaccgtcaacgtacgctgccggccgcctattcctctctgccgccctattccatgcatcgagcgttaaaccgttgcccctttcaatcaccagttcaccacccgcagatcgttcgatccccagcctccttagtccaacaacgcgcgccagtatcccctgaaaacaatagccgtgcaccccctgttccgcactaaaatcccacgcacaagtcgtcgcgggcgttctatacttctatccatatctcggtcgctacacgcgttacatccgtacgcttcatacatatactgctcctacctaagatcgatcgatcaatgcgcttctcaacaggtaatgggtgatcacgcaatggccaataatcacgagcacaaggtggaccacctcgaccagcccttctacggcccgcccgttctccctccggtcgagccgctgtccgccgccgccgcgcgccgccggtgcgtcgccgacccgtacgcgctctgctgcagggcgatccgcgtgctgacgatcgtggtcatcgccgtcggcgtggtggcgctggtgctctggctcgtgtccctgcccaacgccctcaaggcctacgtcgactccgccgagctcacccgcttcgagctcggcggcagcgacggcgccaagcggggccagctgctgcggtacaacctcaccgtggccgtgagcatccgcaacccgaaccgggaccaggccgtgctgtaccggcggctggaggcggtggtgctctacggcggcgagaggttcgggtacgtcgacttcccgcggacgcggcaggggcggaagagcacgatggtgatccggccgagcttcgtcgggcagggcgtcctcgccggcgcggcggcgttcggaagggagaaggaggaagggttcttcaacatcaacgtgaagctccacatgagggtgcgtctcaaggtgatggtcttcgtggacagcgtcgagtacaggccggacgtggactgctacatcagggtgcccgacccgagcaacgcgacggcggtggcgatggggttcacggcgacgcgctgccgtgtcgacgacttcatgtgatggactggaccctgaagggtgcagcattgcattgcacgtataggtgacttcagattgttcattgtgtatattatgatcttcgagacagcaaaaggaagtttttcttttcaaacgaattgaatcaaaaggaagtttgatcgtccatgacgaattaacgattgtgcaactttatttagtgttgtgtttaactgcagtatcaatgaatcaaatcttcggctaaatttcaacacttgtgcttgtgtgtcttcatggatagaggaggatgggagacagttttctttcctctgaagcagtcaagcttggctggctggtgcccttagtatctgacatttgtggggatcaatgccatgtttcaatgtgtaaccgttttatttctaggttattcctcttttaaaataatagaaggttttattaatcaacgaaaacatctaatctctgcagcaacaacaacaagtacgcaacactataaaagagagaaaactagacaacatgacatatcatgttgccttgtgacaccttactagggctgtcaaaaaagctagagactcgtgagctgctcgagctcggctcgagctcttaacaagccgagcccgagcctaacctcaagcttgtgagctttttcgagccgagctcaagcttttcacgaggctagatgtatatgtacttttattttttatatgacagactagtaggttaaaagataaattagtatacatttatttaaaaaattagtatgtgttggtattatatattaattttaagttatcttaatctttttatttagtattattaacttaaataattagtatttataatataatcaaaatatacattatcatatactcggtcgagctagcgagcctaaccgagctcgaagacggattaggctcgactcgagcttgtgtctagctcgagcctagaaagccaggctcgcttgtactcggctcattgacagccctacaccttaaaccaacaccttaacaagaaactgttatttgccccccatatcgtctaaaccaacttcaagtctgagagatttttatccagcgttaactccaacacaacacctacaataagcaagtcgacaaacaaacaccaacattatcggatcgagataggccaaattaaaatacgagtattagggctttcaccatatagagatcttgccaacagtaacaattgctccaatgccaccacgcccgcaaaaagagaaaagcaaccagaatagaactggtcatgactgattgtggccgttgaatcgttcttcccaaagacactagaggagaccacccacgttttcatttccgaattattgccatcaacctcagcaaattgaacaaccgtctaacgaaatgttgcctccaatgggacacctccgtcgagtggatggaaagggcttgatatcgaagacctaagacttcagtggactaatcatcactcatcacagattgctaattgttgaggaggtgtacagagaggaccaacgttgtctggcattggctagatccaatttctcatcgatttgccaagaggaggaaagaaagaaaaggataaaatcctcttggaaaccttggacgccttgcctcatcagagcaccattgcagtcctcagaagatttcctttgtttatggttgttacctctatacaaacaacaccactaaccggtcacctagccaatcacaattcgagggattgtagtcaccggataaagtacatctactcgcggtggatgtagttgaggtgccaaagagatctcggggccgccacaaccctgatggcggctccatgggatgatatgtatggaaaggcccaggggttcttaaaaaatgatatcatgttgctatgtaatattagagcttgtattctttgttagccgtgtttgtatcctttgacgcgaactatattttgatcgagttggatccttttttttcctaaggggtggatggaagtttgtgacccattgatggttaataatactagtaatcgaattagtacttctagaataggctgggcagtcaacttttgatgaatcctggcaatagaagaataaaattgggaagaatgaatacatgccaattttttgttgtttatggttgttacctgttccaacaactagatttagcatttacattatattgccccttatgagattaagaacatgtttgacatagctccagattccagatccacactagatgtggactttataagttaaattaaagtggttgaaaattgtatgtttcaaaatgattcattcaaatgttatcaatacaatcatagatctagatccatcgatttatgaagctagaaatacctagctacaagaaatcctggatttggagttatgccaaaccgggcctaagtgtgcaggatgatactaagtagtaaatagtacgatgatacgctgtgctcaatcctcagtgagattgtgtcactctatttgtactgaggaaacatctgcgacatgaaactggaaaaaaaataatacttcacaaactaatattgtgcctaagatggagaacaacttaaacaacaaataatctattcttcatctgttaatcagcatctgtattttgtatgattcgtatatcaagcctactttggagttccaatttgtttaagaatcgaaccagctattagcaactaacaacatgacaagtaaattttttttggtcgtttttctgaacgagcgaaaagtaaatctcaactttacaccgcgatggacatcgtctggagtgaccgggcgtctcttcggtccggcgacgccgccggtgagcagaacgccggcgtggtgatcggcgtcgtccccttctccgtcccctcgtctatcgtggacaggctcctggccgggcccccgaacatcttcttccacctctcgagctcgcactggtccggctcctggtcatcatcctctgcctcgccgggttggcgctcccgcgacggccaccgccggttcctctccaaggacggcctggccatgcgcagctgctggctctccttgtcattgaagcatatgccgaacaggacgaagccgcggctggacgcgacggactcgcggcgtcgccaccaccgccggacaagaacggccacgagtagagacaacagcgcgacgatgacgccggcggtgagcgcgagggcgagcaccatgcgggcgtcctcccccatctcttctcctcccctgtttctccagcaacgcgcggttgtttccgcggctactactccaagcgaggtttgtggaagctgcacgagaattggactatacgatggcaatgtccgatgaaccaggccagaagaaacgaagtctttgccggtcgttgtacagctaagctgctaatgacagtgaaaacgctaggtttatttgtgtccacgaaagaccggagctgcggtaaacggttcacctgctactcctactcgtccagttgcacattcgactgtgttgccggcggcttattctgttcgtcagaaaataacttgcgattttttttgaccggttcctacttcagataatttctggagtaactgaaacacccagttgattctttttgaaattgttgttttgctaaattttcttcagttctgaacttctgatttcagatgcaaccgcaacgttccgtccgtcaaccagcgcgcgggcgggagccgtcttgcaagacaggagtacttgtttgtactacctatacaaacgaattactactccactgaacctgcacggagagtacgttaaaacgtggaactcggagcaatttccagggctcattcattttagcagtcttcagattgaccacacatattcagtcaggcaggacgcaaaccgggatatccttctctgaaacaagccaaaagtggtcaaaacgaaagagatagcacgcgctttgtttagtacacgggcccaaaagcctaaacttttatttcgctaaaaaaacaaaaactggcccagaccgtaaattttgattttaatggaaggcctaagctgaagactattgtctcggtccatgacggccttgtttttcatgggccaatttaagccaatattaacgggcaggaaatttgaactaaattaggttgtagcaaatcgcaaatggcccacgcacaactggtacagttcgtacgtaccgcgtacatactctttttcttagcatgtgtttgttttgagagatttgttagattgggttgggtcgaactcattttcatggtggtttagttgtaagactagatgcgatggattgtcttcgaaggtaaatattctactgatatccagattcggctgacccatgaaaatctggcaccgcactgacccaactctcccgcacgggtcacatcaaacgcacatgtctcgccacagtatatatttatagaaatatatacaaaatagcatgatacgaagataccatatttatagatctagtacctacgggggtatcatatatgctatccgagacaacatatccgatacctatggtaacatgctgacgtcaacatgatatataagtaccagatcttacgggatataatgtgtagtactggaggtatcatattcgatacctacagtaccatgatgatgttagctatctcgttactatggtatatcattatgtagtctccgtcataactttaaccgtgcccatgcgagatgcctctgtgaccacgcggacaattttttattattttttgggaggggggagggagtaattaaaaccccttctcttttctagggttatccattaatcttattcaaaattgcttttggttgagcttgatgctaaagtagttttggatcgttgaactctctctttctaaaattcctctcatgctatgcaaattgaatcttatagttgtggatttggagtttgggacctaatgtgtgttacactcaatcttcaggattagggtttgtgcaagggttgtgtggtgtttgttacttttgaaggttgaagactccgatggttaggcgttgctcccgagtcaccgatctacctgtgattgatggagggaagattgtgaagaccggatctcatccctgtaagaaaagagatacctctagtgatttaggatgaatgtatttatgcaacatcactataatagagttgaaaaagactcagctctattcaacaccacgtagactctgaaaagggaaaaaagaagggttcctgagtacaccagcacatagtgtcgcatatattagtgcactgcccattgcgagtcgagaatgaaatttgcccttgacttatccttaattacttcctccatctcactcgctaaagagtgattaaacttgctacagttttcaaaactaatttttaactttagatttctcgtatattataatgtctgtaacaacgaaatcataataatataaaattaaatgtaaataacaatccattgatattattttcatcaaataaaatttattctatagtaaaatatttactgattaaatatttaaagagttggattttaaaatgtgtgtgcgttttagtgagtgggatgaaggccttgtttagttcccataacataaacttttcgtctatcacatcgaatgtttagacatatgcatggagtattaaatgtggacaaaaaaaccaattatatagtttacgtgtaaattaattgtgagacgaatcttttaagcctaattgtaccatgatttgacaatgtggtgttacagtaaacatttgctaatgacggattaattaggcttaataaatttggttcggtaattttctaacagaatctgtaattcgttttattattagaccacgtgtaatattttaaatgtgtatccctatatccgatgtgacactagaaaataaaaatttttgccatctaaaccgggccgaattacctaccacaacgcagttaaacaaaccttcaaaaccatttaagtcttcgagctgaaacgtctgaaacctgtgtaccactagcattgcaccactagtccactagtagtccacaggtcgaactgcagatagacacgcaattgaattgaatgctgcacacacttgacatttcaaaatggcgcgaaagattaactacacccttcctagtgtagggtgtacagctaattaaaaacctgatccctatgacgagacgatctgagtattgaattctctccctgcttggtcagtgcattgggatcgattagacaggtcttaaaacctcaacagctagcagatggatgcatgggctaaaccaatttgctagccagaccagctaagctagcccatgcaatgtgtgtgtagttacagcaccctgttccccgctgtttcgtttgaaacacacccgtcatcgagctccgcgagcgacctagccgacagctccttaaattaaccacacgctcgagatcaccgtgcgattccgatgcagtactgacaaatgaatggagccttctattctattctccctctgaacttccaattcatgcagcatcggctgacgatttagagcttcgggaagatgcatatgcagtgatatggatttgactgctcgcaaatgccgtgtttatgccatgacccgatttgtggaagtactactagtacatatcagtacattggttgagttaaactaatccctaattcagatttgcacagttagctggcaaattcttctggatccaggaatgattagcgattcccttgcagcagcagcagctggccagggcggtaccgaatcttagcgcatgcatgtggccatgattaggttattggtgcccaaggtttttacctctcagcatcaaaaggaagttagaaatgcacatggaaaaaaaggcgatcggagtgaacaatccaaggtagctacactggtgaaacttatgttctgtccaaggttgctgctgcgtgcagctagctttttcttcctttcggccatggaaaggaggacacaaaatggtgagctcactgtgctgcactgcagtggacgccgcgaggcgcgtgcacatgtacgtttccggcaagtctagctatgtataggcgactatgtatgcggcagagatgagagtagctaggccgcactccatgcatgatctaagagcgtgcagttctattggacataatttccctcgaagtgcccagctgtgcctgtgagatgtgcacctcatcaatgttgtagattgtgttcgagatctatctccctttctctcatttatatgcagagatgcatgcaagtgctgctggacatgaacactccagcaaatcgccgttgatatacacatcaaaaacgagttctgcaagtgcctgacatgatgaggcaccgctagctcatcaagctttctctgaactctgaagataagttcacatgaatggaaagggaggaaatctatcccagagaagtggacaggcatgaagggaaatgtaccccatacagatgtaaatccatacgaagcagagtagatttatatgctgtgctgctgtacacagtacaagcatctgtactacagagtactaatggttttggtgcagtccatctacgtgctgtttcttcattttgctgaacagtgaacacatgatgtatagcagtgggtatgatacagttatgtcatatctattagaggatcttggacgcgattttcgccatcgttcatttgttcttgcagtcttgcacagttgcacctgctcttgcttaggaccccttaaatcgcagggtagaaaaatagaggaatagaaaaaacacaggattccgacagaaattgaagtgtaaaacagaggattacaaaacacagaaaaaacacaggaatggtcgtttgattggagcacaggaaaaacgcaggaatcgaatgagagagatagactcaaaggaaattttccaagaggttggagctcttgctaaatttcctctaaaatccacattcaatgtgccattccataggaatttcataggatttggaaagcttcaatcctttgaataaaagggccaaataggaatattttcctataggatttgaatcctatgaaattcctacatagatcttttgattcaaaggggcccttagagtttttaccagtctctctctctctctctctctctctctctctctctccttcctgattatcctacttaatttttgcaaaagaactactactgtaattctggttttgtcctgtagcagcaccattacatttactagtagtttttattcagtgagtgcaaagaaggaatcgatgaatactcctatataacagccaaatgcggctaaagattattttacatagattaaacaccattagaaccataggcttattttaaaggaacgttttttaagccaagtggtaagatagaaaacaaccaaaagatttgcttcaacagagaaagctagcatgagctgagccagcagcatggccagcttgtcctcacatgaacagttagtcaaccccaacaggggactcccgtcctattacgaaccgtggcaaagaaaaaaaatatactccatccacacaccacaccatctcaatatatcatcagtcatcttctccctctcccctacggtgtacactccagctcagaatttactgcacaaaaattaaccacctcgtgcagtcacaccagccatatatgcatgcatgctatgcttacagggcttacatctgcaactctcccctctgacatgatccccccagggatccaatctgaacatctttgcacccatgcatgaagccatgaaatgccatgaaaaccattcacccatacaccccccacacacacatactccgtataactagtagcagtgtgtagcactgagccgcactggactgtgctgtacatgttgttcacatatctttctcaggtttctgctttcctcttgcactgtccgagcttattttacccacacacttgcccttacacctctaattatccgcttcacatgctcgctctcttctcccttctcactgttcatgtcgctctatctttactcgccatttaatcgttgcctcgcgctctcacatggcgccccattaatatatagcaccactagctagctcctcttccagctccaagctccaagaactcaactcactctctccgagcttagctctcactgtctcgccgcgcacacgtcgctctcactggcttagctgagctgagctgcattggcttctgcagtgagtgcaggagtgcaaggctattgagcttagaggtacaccagtggcattgtccatgtcgggcaggtcgtcaaggaggggcagcttctcgctgcggcagccgccggtggtggacatcggctgcaactgccgccggccgaagctgttctccatcttctcctcgtcgtcgtcctcgtcgttccgccgcggcggtagcaagcccaagtcgcccaacgcctcctccacgaagacgaccacggtgttcacggccacgacaaggggcgccggcacggccacctccaccgactcctcg

SEQ ID NO: 458 - DNA, 606 bp, Oryza sativa
tagatgtcccatcaaccgccaccactctgctcctctataggcctgttacttaattaaccgcgtcatgtgttttagatgatcttttttttcaatagtctttacttttttatcaccaatttcagaatttattttatttttcttattgtgttcttttgttctttttattttttattttcatcaactgtttcaaaattgtattcctactttaaatctctttttcatttgcctgattttagattttattttattttttattccgaatttaattcatctactattgggttcttgtactcttatttcaatactgattatatttaattttaaattgtattctactcaaatcttcttttcttttctttttttttataattttgctttttttattttttttattcctaacttttacatatcccgtattggatttttttatggactctttgttttttcccatcaatctttttttaggaatttttggaaaagcatcggtttttatggaattaggttttttttaacatttcacgaaaattttttcttccattaaccttttttctgactatttttttctttttttaaggaaaacgggtacatttgttcgtgcttgttttt

SEQ ID NO: 459 - DNA, 19201 bp, Oryza sativa
tactgacacctctctctccatcacggcatttgcatcgccagatggctatacaacagatcaaacaggtcatgcggatctgtaaccctggccacagcaacaaccgcaattcatgagcacttaatcgttttctctaggcactatgtggcattcatcgtcactttaattgccgtgaggttaccagctgatcttttaggaggagggatttaaggagttgttggagcttcactgcatgaacttggcttgcgactactaggatgccaggtttgcatcttcgattctgcatgccaggcgaactgtgcttgtgctgccttgcgctgccgacgcccacgctttgaatgcaacccgtagcatctctgcctcctctgtttttagccttagcccaatgcttctctagtaggcgtactatttgatcagtgatcttcagaattcagatgcgtgcggagagtgaggaggaagaagatggcgcgataatctgaagtgacgtagtaatcaatgtatttactcactgtttgtcagaacacgattactctgtctgtagatgcaggctgtattgaagcgaatttatctgcaagtgtgctgctatctattcggccatgtttcaattcatggtggtgtcgacatcgtaggtaaagccgtagtaatagtcgagtatagtaccgctactaatactccaaacttccagttggcaaaattgttaggcagaggacatgacttaattccgtgtgcagcagacgtggagcaacgcaacctggtaacagcctgcgaagttcgccgcatctggcgagcagagctgttgcttcttcggaaccgatcgatcgatcgatcgttgtagcagcagcaagcaacgcattcaagcgacaagggttggcaagcgagagagagagagaaagagagagaccgcgcgcggtttaatcgcctgacaccaatccggccatgcgcgccccctccccgctcggcgtcgctgcacaactgtctccaattactcgtgcatttatacggcttaaaagcgaattaatcggcaataggtctccctttgaatgatcctaaccaccgagcatctttccagttctccctcacgtcgcgtcacaggagaaaagattgcgcttccgctaatctgagaactttggtttttgtaggcaggagcagtggatcgatgattgcgtgttccttgttccaagcaggttgtgtttggcaaacaattgattactcagatgatatttgtgttaatctctgagtacatgacaactggcaaactcacaaaagtagtaacaaaatgtcacctgaactagaagtaaactgaacaatttcaggaggagtgaaagttaagaatgtttttctcagacacttgtagaaagctaacaacaaaaattttcattgtctaaccatctaaattaatcaaattatgatttacgaaaagaaatggaactgtctgaaagactgaaatgatattcgtatgaaccatgattgcgataggctttcatgctctcacctcctagtctccactagagttgtactcctgcattatctcgaagcacttccagtgataagtaacaacgtcactgaaatcgttctttaaaattggacaaaatcactatgttgataagcatacaatcacttctcccaccacaaatctgtgtctgccgatgccaaaaaaaaaaaagaaagaaagaagaaaaagggtgggcaacagaactcatgccatgtcacatgtttcatgcaaaagtgcaagatgagctatcacatgctagaatatatgatccccaccaatccatcccagaattttctgaactaaacgacaatagtaagaaaaataatacaaacagacttatttcctaccttttctgttttttctaattgaattacctgtccggccttgttttaattatgtccaagactctaagaccagagtctattaacatagtgcacggtgaatcgcgcgcctcaagcaatatgagcaaatatctgctttaaaatactgcttgttgttactttaagttgcttggtttcattaaaactctgacagttcatcaatggtactccctccgtttcacaatgtaagtcattctagcatctctcacattcatattgatgttaatgaatctatatagatatatatgtctagattcattaacatcaatataaacatgagagatgttagaatggcttacattatgaaacggatgaagtactaattattttgacaactgggaaattggcatgtaagtgtttttcttacattatattgtttcactgataagtggtctctcactaacatggatggcatccacatgtaatgtactaatgtggcaatcctgaagtgaaccttttcaggtcatcaagggtgacaaaccctcaatttattttctcattttttaggtcatttgggttatctttcagatggatgtatgccttattttagtttctatacaacaacttgcagttaaaagaaaaagatatatttcttatctaagaacagttcccttcggttggaaattcagtttccggctctgtaattttagtacaactgtgtacaaatgcacatgtattcaatcaatcacattacacattgctgcaacatatttatgtaccattcagtaccacagaaaagggtcaatactatatgacaggacaagagcattacttccattaaatgatttaaatgttgatgacatgataaacttaaagtctttgcactgttgcacgtagctctcagctgaacactagaacaggaaatactactgaaacgcgaaattattacctagaccaattccgtttgacagggtgcaccgcacgcaagaaacaggtctatgaaataattcctttcgggatccacgtaaactctgatcgatcatgaatgatggtaattaaattaaagctacgacggcgacggtgacgacgaagaagaactaaacgcaagaactgagcccccggctgttgcaccagctagctagcctcgccgatcggatcaccggcgttggcgcgggcggcgctggtcgtcgtcgttgaagtcgagcagcacggcgctgtggcaccgggggcaccggggatcctcccgggacagcatcacgtacatcatgcaccgggggcacccagccagcaccatgggcggccccgcgccgccgcccgccgcgtccgggctgccctccgacgacacgcacgagctcggcggcgacgcggtggacgacgacgaggacgacagcctgcgcggcgacgtgttcgcgccgttgacgccgccgctgtcgccgcccgggcgcacagtcgccgacggcccgccgccgccgccgccacgcgccctcgacaggctcatcagcctcaggcactccagcttggaactcttgccgttgttcctgctcatcctcgccgcctccaccaacaccacctccgatcactgcactcagctacgccaacaacattagcgagacagcacaagttcacaacacacacgacctagctaagctagccactatccaacaatatgacctagctagctagtgacacattgcactaaacttgttctgaagaaaaattcagtcacattgcactagaccaaatgcattacctcggattctaatatagggagcagttcgacgtgttggtggattggagctctccacttggttgcatatagcttttgctaggtaggagtatttgtcatgcaccactcctgttgttatataatggggaggggttgaggaggaggtgggttttcttaaaggcaagaacagccacatttaaacgctggtcaattccctccaagcctctggagtctggacgctgtcccgccatacttgtattttccattaatattgtagcttttctggagggtggaaaaatattggagtatatttattaattaattggtggatagacgtgacaaggagcaggtgtttctgtagatcgaaagggaagcacttgtacgggggtatgttaatgagctagctggaggttccttaatgcatggcctctgtaacaacatgaagtactaccattcatgtaacaagatgatcgtaaaatctatcatgtaatatacatgagcggggtattagtgtagaagtactccctccgtaattataaaggaagtcgtttaggacaatgtttaagtcaaaccttgggaatataaataatgaataactctcaaattgttgagtttaaaaatgtaaaaattatatgaatagatttgtcttgaagaatactttcataaaagtatatatatcacttttcaataaatattttatagaaacaagaagtcaaagttgtgttttgaagaccgtgtcgttgtccaaaacgacttcttttacgaatacggagggagtacacatttgactaaacatttttcttaataaattaggggctcatgacatctctcacactcttggcgcagctataaaatattcattctttgattaactccatggtcagataggattcacccttcaaatttttaaaccgagtacgatgtactcctctgtcattttggccatgtttttttatcacctaaagttgaagggtgagttaaaacattgggcaaaatgacagaagtactaatggggccagcactattcgtctatcttattagcatctcgctgtatgagaagagggcctaactgctagttgaatcctatatgcttcatggaaaataattgtgtgcaatccagatcacaaaagatcggtcaaaccagcggaggaaataattccatcttactagtgcattcctctagatcatttgaccggaaggaaggcatgcatcccctaatcccctaattatgagggtgtttattggcttttcaccgtactttttggttcgtaccatccaaaatagcctctgcgaaagtacagtttcaaaaaatcccgatccatgcatgattatgccatcatgcgcagatcattgcagatcatatgcgacccattagtaaaagttcagagactggcctgaaattaactgtagctgccggcctgcctgccgccgaggtcactgcgcctgcctagcgtgcgtgtccagccccaagggcgcgcagtcgcgacatcaatggcattatggccctgactccgcttattacgagttacgacacggcgtaagcacaaagctagtcaggcgacgaatgaagaagctctcgcgcgagacggcgatagagagagacgtgtggtatagctggcatccatccatatctcctcccctcgcggaggcggggcggggcggggcgggcgcaaccgcggcatgtgccgggcctttatgcttcgccagagccctccaaatagaaccgggatgaatgacgatgatgaggcgtcttgatgatgtgaaaaaaaaaaagtttccggacgtccaaagtaagtgcaattgcaagcgcgacgcacagttaatctgctcacaggcgtggtgcatttaggcacacagcttgctaatgaatgaaaccgcgagtaaattagctacagtatacgtgcaggcgtgcagtgaatgagggggctggctggctgcacggttcgcagatcatcgtgaacggcttcacgcaatttgggcctacgaggaattctttttagttgggcctcagttttggggaaaagatttggcccacgatgaactcgctggagagtcctggagaaaataaggggaatttttccgaaaaggaaaggtaaagaacgagaggtgaggcgcatggaggaggagggagagaaagtagtggcctgggcgtgcgacgcggagggggcgggcgatggagagcggcgcgaacgcacggcggcggcggcggctggtggataggggatccgatcgcctcgccttcatcaccggccaagctcagagcctcccctccgatccgtccccaggtaaccacaggaaagcctgctcttcctctgatgaacaaacctcaaaatctcaaatcgcctgctcttatatgggtcttgtgaaagatgttgcttccgcatccagatttgattcgcgggattactgtggttgtgatagggttagtattaagttcttcactagggaactatgcgtgcgttgcctggatgcgcgcaactattaggaggattgctgcacatgttatgtacagatctccaattaggtgatagatttgaattttatttttgcgaggcagaaagccaggaactgcctacattgcagcgctcgttctgcgacttgtaagttaattagtccctctagcccctaatataagtaattttgatattttgcttacactatttgatcattcgtcttattcaaaaaaatttaaaattattatttattttcttcgtgacttactttattatccaaagtactttaagcacaactttttgtttttttatatttgcacaaatttttgaataagacgagtggtcaaacagtacaagcaaaatgtcaaaatcccttatattataggacggagggagtagtttgttgatttactatgttgagaaaaaggagggatagaaacatgaaatagtttattagtttgttgtcaggagtaaattcttgtcctattaatgaaacaggatgtaccttgtaggatagtacataattaggtgctaggaagtgtgctagctgggtattttctttatctacaacgttttttttgcctaatactccagaacacagagttgtatttgtatacggcgaagacctatgcaagcaacgtttataccaaattaaccccttgtcgggctgcctcctgggctctccctccacactaacataaagtattcctagacctttttttggagagattgaagatgaaggcaaaaagactttgatacccctcattaaatgatggatggttggctgtgggtggatgattgggggaaatttcaaatgcttggaacccttatatttgtggacagagggagtagtaagtactcaagtgtagtttgattaattgaaccactgtctggagtgtacaaatttcagaggaaataacatttttgagacaggaatccttcatactcattgagttgcaactaagggagtccaatgtaacatctctttccacttacctactttgtaggttccttagaaaattgtcacaatgaggcatgataagtagtaagtttgtaaactttggagatatttagcatcatgagttttcttggtacttctcgggctctgtctggtattgcacttagggcatgttctaaacagatgttagaaacggatgattagtcacgcgcaaaacgagattgtgattagcatatgactgattgacataagaaaaacattttttaaaaaaaggcaacttctatatagaaaactttcgtacgggacacatcatttagcagtttgaaaagcgtgctaacagaaaacgaggaagtggccaagctgatccccactttagaacaggcccttagttgtgataatggaactgataatccagtccactaagtttcacaaaaagataatccaatccacacagatgataagaataaaatattgttctcaaagaaaatgtagcaaaatttgactgttggaaaaattccacagctgcctgtgttgctttgatgaaaagcacacacattgcagtaccataatcacaagctgaacttttattatgcagatttccttagtattgtcatttttcctactctatattgatatcaagcataatgctgtccatctattattgcctaacaactagttcatcacttatggactattgataattaaatcgtcctagacttctatttgcatatcttagtagcttacacttggtttaagtgatattcttgtcatttttgttttcacagttgtacttgaaagttaaaacatatagcttcttaaatgccacatcttaacagaattagttgctattttgcagattcaccactttatactgttgatgctgcttcccttcagcgatctgaacgtcagctaaatgaagttggcattggtgatgacatattcaactacataactcagttgcaaaaatcagaatctggtgttcaaccgactagtgaggcccacctggaaactcataaagagaaacaccaaggtaatgaaagtgacctccaaaagctcaagacaagcaatgtggttcctgaaattcagccagtaaatgaaaaggcatttcaaaggcacagtgaggaaaccctcaggaagaagaacagtcatgacagatcggcaagtacacagcctatgagggaaatggaaacaagatccagatatgtgcctccaaatcagtctaatcaatctgatagtgcaggttggtctgtggaaactctgaaggaaatcctgaatttcgcaccacatgagattacccaggccatatcagctacagagtataaccgatttttggcttccgtcatcattggttttctggtggttctttcaaattgggggctggacgttggtggcactatcaccaaagtattagttgctacaaggccaattctatttcttattgtaacgaacataaccattgtcttcactttgttgatggagaacaaggaccccaacgtgaggggtagaccagctggcagcaaccttggttctgctgataacttaggccaaatgctagagattgggttgctgctacagaaagccctgagcaccctcctgatagactgcagcgtttgcgctgtcatcatgatctgttttatttgattttgaggggtaccattgacagtattttacggaattgcttgtaagaacgccaggtaccattctgtctatcgttcgaatttggagccctttttgctttatgtatttatctactgttttctgcatatatgaatatgtataaaccttgtccaagagaacggacgcgtgacagagtgaggttggtatcagtctatcagaggaccaaatttctctgtagctaaggatctgataatttgatatgctgatgaatatgggaaattttccctgtaccttaatcatgccctgataagcatgcaactcgacttggcagtgcaggctacacacgcagatcacgcatggtctgcagaaatggatagctagacgttgcacagtttgatagctagacgatggtagggacttttggagtttagttgtgtgatgaggtgtgacctctgaactacattggtcttaaaatataatgcattttaatcatatggttatatgggtaaaatcctaataatataaatctggagatatatctcgtgtttatcacccggattgttcttgagttgttgttcctaatacttgggttgttcaaaattactgtattttagaacggaggaaatggtggtaaacactgtttggagttttgtgtggtgtgatacataggcagatcacgcatggtccgcataaatggatagctagacattgcacagttggatagctagaagatggtaaggacttttggagtttgtgaggtgtgacctctgtacgacggtgcgttagcgacaaaagagaagcccgcgtttgtttgcactgccaagtgtcgcgcacttatcaaccacgtgccgcccaaaccctcggaacggtgccgcactgccgccaactacgtggcgatatccagatgttcccagcagtgcatgcttatcacaacacagcaccgtaatgactatgtaaaatgatttcgacagcatcattcatcaaaacaaaagcacaaaacccatattaacagtgacatcttcgtctgcatcaaccaaacctagacacgacgttgccacgtcaaaccccattagtccttgacttagctaatcctaattaatgctgaaaaacctaaagcccaaaccgtgtgccgaccggagctctcaacagcctctgtttccggcaagtaggccgtccacggttatggatcagagagccccaagtgacaaacggtttgacagtactacttgcctatgttgtggtgtaggatataatgtacacgtcatcgcctaccccttgcttgtttcacttaatccaaagagttgcaaagaaagggggtgggtcgccgtcgccgacgctggtcaaggggtggtgatgtcatggatgctcttgcgcttggagtcgcgggcgccggcgttggcctgccggatgaagtacttctgcgcgtggctcgccacctgcgtcggcgtccgcgtcctcaccgagaaccgcgagatgttcctccagtctccccgcccgtacctgtccaacccctcgagaaacaacctgcacacacacgcatggtggagcaaaacgaagtgaatttacacgggaaaggcggttgcgattgagggggggtggctggcaggtgggggccatctgccagctgggaagagtttgttggtttctctcggctttgacgaagcaatgcggaaaagatcgcgagaaaaatcgagaagcctctggaacagagacgagcaggggaggaggagggaagggaaggagacgagggtttgaggtgtgcttccgtccgtacctgtgctcgtcttcggaccagggtacgccgcggcgccgctcctcgccgcggggcttgccgccgccgccgcggcggtcgttgccgtcgttatcgtcccaggacccgggggcgtcgacggcgccgcgcatgatgagatcgatgtcggcgacgagcacctggtagtgctccaaggcctcctgcggcgtgcgccctgggagctgcgccgcgacgagcgcccaccggtcggggacgtcctccgggcacagcaccagcgcgctctcgaacaccttgtcctccaccttgctccacggtcgcctcgccaccggtcccccgcccgccgccgcgccgtacaaatccatgccgagtgagtctcccctcctttcctccaagcctctcggtcccttcccgtggacgacacaaacacggacgatcgcggtgcgaagtgtggtacgctactgctgctacgagcgacgatgatggcgttgcgtgtgccggtgggtgtgtggatgggtgggcggcgccgtgtgttgttgggcttggttcgctgcggctacgcgtgggaaacggaatttataaagatttcgcttgggggtggggacggcgcgggtgaggtggatgacggggtgagctcgagagaatggaacggtgggttgggaatcccgtgggggttttttgtgatgctctggccgcgtggacgcacacgttttgggcgtgcggtcgggtgcgagtcggcggggccatgggccatcggggcatatcctttgtgcgcgcacgggcggcgccagggtcggtggacgcgtgcgcggagggccgaacggccgtcggctggcagaggcggtggcgtagcgcgcggacggggttgctttccgctggattctgggattctcgttgagttcgtttgggcacggagcgtcttacggtgggttgttgttttgtttcattctgtttttgaggtgtcacagtactcgtttggaccaacggaattgatattctaccgtcgcaggaaaattgaaggggaaagtttcgagtcgtcgtatccggtttgagattcgtgcacgcaataggtttaaaaaccaagcgcaagaacagggccggacattgcttggtggtacatcatgatttttattttactaggaaaatacccgtgcgttacaccgggtaatatcgcagttgatgaagttgaacttgacgatgtacctggtgttgtgattaacaaaaaaaattatttaaaataggtatttttatcatttttatcgtaataccgatgaataatcaggatggataaaaatacttttgggtatttatttatagcctcgtagtggtcacgcgtgttttctcgctttgtcaactctcgtgttgcaagcatgcgtcttagtttccaagatcatatgtggactcgcgtggagaccggtcacgtaacatatgatgattttgcgcaatttttttcacaatcgatattttttatatcaaacaattgttttttccttccttcgttttttttattttccggtttttcatacttttttatcatcttcttttctccgttttctccgtaagatgaagatgaagattaagtttttttatgcaaaacgaggtggtattaatgtatgattgattgagttttaattataacaaacttgaaaaatacattaatatgatattttagagaaacttttatataaaaagtttttgcttgaaacgcaccgtttagcaatttaaaaagcgtgccacgaaaattttaatcttcatcaacacttgttggagaaaagaacgagacctaaattattctgattttagataattacataattaaaaacagaataaagattagcgaggagataaatttgtgtggtatgtcgacatccttatcctatcactccctcactctatcgttctctctcccattttgtctgtcgcagtgtcgtgtccctctctctctcgtagaggtggccaaacgggccgggccaaaacgggcggcccgaggcacggcggaacctgtagccggcacggcctgctacagtaacgggccgtgccggcacggcacgagtagccgtgccgtgcttgggccgccggccgagcccgcgggccggcacggcacggcacggctactgtagtaagtccgcatctcatccttccgcaagtccgtatctcatccctcccaactgacggcccagcccgctagccgcctccgcaagtccgttgagcacccctcctagctgatggcccagcccgccagccacctccgcaagtccgcatcgcatccctccgcgccatttcggttcctgggccaaccgtgccccgtccacggcccatttttcattcacgggcccgtactgacacggcgggccacacgcatgccgtgccggcacgggcacggcccggccatccacgggccgtgcttgggccggcggctcggcacgtgggtcaggacggcacggcccgtttcatgagccgtgcctaacgggccgtgccgaaacgggccgtgccggacccgtgcccgtgccgtgccgggccgggccgcccgtttggccacctctactctctcgttactctccaagcagttcctctattgttctctctcccattctgtctctcactctctctcaatctctcgttactcaccaagggtccaaggtgaccgacagtggtgctcgcttggatcccgcggttctgccgtcgacggcgacgggccggtcagatccaccaccggcccaagccgtggttgctgcttcctcgcgtcgatccagccaccaccatgttcatctccatcgttggctggcggcggtgaggctggtgagcggcggttccggcggttgggaggctcgagggcggcgacgaggctggtgggcggtggattcggcgtagggaggcgaggcagtggactcccgtagccggcggttgcccagcggaggtggtggcggcggcggccgcgccctcccctccgctagatctggcaggaggggaggcagcgggctctcgcggccggcgcctacccggcggaggcggtagcggcgccggcggctgggccctcgatgggcggcgggttcccataggcggtggtgtcactttctccatgtttctcctcctcgtgctcaaatgctctcgatggatccgtcgccttcctccttctgctacttccttcctttcgttctttcctctcggttttctctcctctccttcgccactcagcgacgccctccttctccgccgatccccctcctcgaccacccaccgacggcgcctctccctctcctccgctccccttcctcgtccccccaccgagcccgccggcgacggatccaattcccccgagctcgctggcgatggatcggccttcgccgttgggtggcattcgtcatcgtaggatcgagctgccacaatggtccagttcggtgccgagcagattggggcggtctcgtcctttaggcggaggaagcggtcggagacgaggaggccgattgagtcgtggatgcaggatcctgtgggtttttcttgtctcgtaatgtcctccatgatcactatttggtctgattggtactccctcgtatgacgccgttgactttttgacaaacgtttgacctttcgtcttattcaaaaaatttatgtaattataatttattttattgtgatttgatttatcatcaaatgttctcatgacataagtatttttatatttgcacaaaaattttgaataagacgagtggtcaaatgatgattaaaaagttaacggcgtcataagtatttgttttgttggatgtctcaggatatggtgcagtggacgaatctggaggtggagttgtacaagcagagctgttcggtagtccggataggagggttcaaattgtcggacgaaggtggacctctatggattttccaacaaggatgctgctgtggccgccggatccagtgacaattgactcccccgcagtagaggtgcttgaactggtgagtttttttaagttgatttgagttttcactattttttttgtcataataattagatcagaccctagtttatttgatttgtttggtttgagtagatcaaccaagagcacatgtgtaggtggagtagtgtaacaatattgattaaaaacttgtcttgttactctatattggttgaatgcccgatgctttcatgtgatattttttgttgaaataggaaacaatggcatttcagcacatagagacaaatacatcttaactaatcaaagatgagattcagatctgtaattttcatcagtttcaggacacatgcagtatttgacactgtctaattctatgtcttccaactgacaccaaaacttttcttgcgggtcacaaatctaggttcactaaacccaaaggcttttgtagcaatgggatgccaggtgctagtggttacttgagcagctatgggggtgatggtgggtatggcagtacaccaggagcccaggaagaaaatatatggtcaataggtaagatatatggtaagttcaatccccacaccacctctaatcgttgcgcaatattgctggttatagattgattggtttatgactggtactatatcaaatatattactgtctttgatatgttatctctgtaggaatcagattactgtcatggttcttatattgtgcacttccacttactgctagctagcttgtatcctgtatattttagttagtcaagtaatagtagcatgaaaacaccaaaacattatatgtctaatctgaacaatcattttgagtagcctaattgattgcaagctcttgtgatgattttgctgtgtgcatgatttatgttctgcattcatgtgaatgtctgaattgaaggactcgtctggaacttccacgttgctacgtgccgctgaacaactgaaaaaattggttgttgctaacttgaaaaaattgactgttgctaactgttctacatcgacgggaaaaaaaccatacatagcattggttgtgcatatgaaaggctcagctaaacattctcttctgaaaacaaggctcatgtatgtctggttgacctctttaatttatgtataaaaacttcatgtatgtctggttgacctcttttattttatgatggtactgttagttcgaattcataagctgacttatcttatgaaattaaaattgtattcaggattgagttggttgataacctagaatcgacattgattggagattgcttgacgtcctagaggaagagccttgcgattaatattttcttgtgtgcttctattatttctatagcctgattgaaaggtggcttgatgtcctagaggaagagccttgtgatatatgttttcttgtctgcttctattatttatacttctacattatattgcctgtaatgtaatgtaatattaaattggagtaggaatcggtgtgggggatactgaacctgtgcgcgcaaactggattagaatcggtgttgtttttttttaaacttgggcttgcgggcttaatctggtagactggagtaggaatcggtatgggattttttttttgcgtgatttgctctagagtaggaatcggtggtgttcttatttttttgatggggtgggaaaagtagtgtcatattagattagatccgatcacaaatcggataacagaaatcgcagttgtgggggctgcggtggaaaaaacggaaaacacggacaaaaaaaagggttacggacgaaaaaaggggtttcggactaaaaaccgcgtggggtgaagatgtgacgaaaggaaaaatccaaatcttttaattattattaagatagggtactcttttttgttccaaaaaattaaacttgtgatataatgtgatctaacctaatacaacgaatctattcatattcaaattcgttatactaggttatatcatattgtatcataggttgagttattttagaatagtgaagtaatttatccgacctgtatatgcattgactggaaaagatgtcagttgttgtaacaaaggctgccaaatatgtctgttatatagttattacaatgtaatttaaaatgttattataattatattatatattttttaaggaaaagttacgataactatactttagatagtactctcccaaagtaaagctgtcgtcattcgtgggcaaagcatcgacccactgcatttgagcccgatacaggcattagcccatggaccgtatatacggcctgaatagctttcaccgggagcccaccatagcagcagcaaatattttctggacggttgacaagtgggcggcattttgtttccggtgggcggcttttggggattccggtagcgccgattccgccgacatccgatgcgggaccggcggggatacagaccgccatatgccgcggtacagcagccaaatgcacagcgcactccgactgaaaccgcggtgtttcccctggctttcctcccgccttttgcggattcgtctcaccgaaccgtgcaatgcgatgagcagcggcactgctgtgttcctggagcgtcctgttcttcccatcagcactcatcccgtctttaaagatttgatccagtcttatcctaaattagttggcaccccggcgtcttgccgcggcttcgtagttttattgtcaaacaaaaacaaaatcgtagttttattgtcaaacaaaaacaaaatcgtagttttaaatggttagatacaactctatatataaacaaaaacaaaatatatgataatatgtctttatatatatacattatgttactataatacaattcatgttttattttttcaaacgtcattgtatattgttataatatatgaatattattttcatgcacaatatgggtaccgttgtagttagacgatttgcatatctctgcttaattcaagctttttctaaaaattgatttaggtaacgatacctaataattatatactatctaatcatacataataaaacaaaacgcacaccttaaacaataatttgagttgtattcagaaaacatggtgttatgcacaaaataatataacagtgctatgtgtgactatgaggtggagcaaagggatgtgattgaataactaataaatgattgaattagatgaataggtagtttcttgatccaatggttgttatctttgtagacttgtagtaatgtattctgatggcttaaaattgttgatgatgtggcttcttgcttgtcttgctttataggagtaaatgctccttagtgagtactaactatatagtactccctccgtcccaaaatacagcagtctcatgtccagattcgttggcttaggatgggtctcatccaatactaagttgctatattttgggatggatggagtatgataggatatgaaacatttatacgattataattacccgataagattcttatttgaagaaaaaatgaatgttaattagagtacaatgttgttttttttcctgaatatgatctacccaaaaaactcttcttctgcacataatttgtatttgatgcactaaccaagtcgagttgtctatgaaagaatgatcggctacatgtagggttaagattggtttcagcaatggatcatggatgtttttttttaatttactagaaaaatgctcgtgcgttgcaacaggtaaatgctattttaattttattattgttatatggtttagctaagaaaaaattcattctgcgaattcccttggataattttttcataaaatcataagctgctattatgagtgtatttcatctcaagttagcatgcgagttttttttaaagagatttcttatacgattcctcttgtatttccaaaagaaaatgagcttaaaatctaactcaaagatggatatatatttttaaaagtgaacgaatttaaaaccgactcaaatatggatgacgtatcaaaataccaataaaaacatcttcgatttttataatagtaaagatttcattcaatatgttgatgtgaccatcaagtatatgcatacaaccaagcatgagaaatataaaatattgccaaagaatacatcggataaatggaggatctacaggatattaaagtccaatgagttttggaatccagttcggcctccggagacagcactgatttcaaacggacctagcgccttcatgccaactccgatttgggtgatcttggacttcgtggaaagcttatctcgctacctttcaaatgcatccagtctcacgtccaaattcatctcgagtctacgggaatcgccaaaacaagacagtactgttgctgaaaccgaacttaggccttagaccttgtaatagactaggcccatctcggaagtgtctccctccacctccacgaattagcacttaaccctagctttattttccgctataaatagctttgtacattctcaaaaacatttgggttttgtttagttgaattttgccaagtgccattcaccttgtctctagtcctcgctcgattagtcggcgactattgattcagagcccccaatagttggtgtgttgatttgccgggtcgattagatctaccacttcaatcgcaactatttctttgtgcttaatcacctattcgcaatatttagattgcatcttatcttgttcttgcagtgttctctcgtttgcattgcaggaatcatcaaccgcgcgtcacggttggtacgacatcgtttgtggtgtagcgattgcacggcgttctggacttgttctggttggtagccacgtcgcaaacgtcgcactcgatcaaagtgagagttatcccctcaccagaagatcgggccacgagagagagcatcatcagttggtatcagagcttcagttgcctggtgaggattttagttttgtaattttttcccatcatccactatacagccgcaccactttttcctttaccaaacattagttttgagccttgtaattttcattcaattttgctttattgagt

SEQ ID NO: 460 - DNA, 675 bp, Oryza sativa
tttcggtggtaagtgagtcttagcgtgtcatggaggatgaggacgcagcggtggatccggtggtcaccgaggcggaacgcggcgtggaagaggaggaggcggcgccggtggtcggagaggcgaggcggggcgcggcatggagaaagtggggatagcgagcgcggacgccttcccttctctctctgctgcttgatatccccctctttctctcccacttctgtgttcgaaagcagaacacccgcggttgtgttgcgtggaagagggggattaataagggagggaagcgaggctgtgaggggcacagcacagctttcctttgggctttaggcaactgggctatgcaggcttggtgggctggaatgctactaccaaatcggctcttaatccgtgctttgaggtttttgccttgtacacgaggacatgttcctttagacggagccggcggcgacgttaagcccgagtgactaataaaatatttttttcaagatcgattaattaattcttataggcgttgatggcgaacaacggagcggtagacctcgagtggttgcccaacccgcccgtgaggagactctggcactgggtttttataggtcgattcttaacgcatggttttataagtgttcaataagacctttttaaataggtcctaaaatttcaactattaaaaccaat

SEQ ID NO: 461 - DNA, 644 bp, Oryza sativa
ctttgctgtgttagggattaatatgattcttttcttatatatttaattttagaaaaacattttgcttagcagtttgaaaagtatgcgcacagaaaacagatgagtagaagttagaaatatgtactctccccatccaaaaaaaaaaatcaaatcctaactatgtatatgaacacacattgattatgtatttggacaacatgtatgtttgtccatatacacagccaagatttgttttttttttggaacgaaggaagtatagtatactccctccatacttataaaggaagtcgtttaggacaatatttaagtcaaaccttagtaatataaatcatgaataactctcaagtttttgagtttgaaaatataaaaattatatgaatagatttgtcttgaaaaatactttcataaaagtataagtttatatatataaaataaatatttttataaaaacaagaagtcaagttgtgttttggagactgcgttgctgtcctaaacgactttttttatgagtacggagggagtatatcacactcttaatggctatacatttttttttgaattgcatactatttttatttttattattttttggaaacgcatacccttattggattcttaaaaaaatacccattttggaattgctg

SEQ ID NO: 462 - DNA, 545 bp, Oryza sativa
tttgaccttttatcttattcaaaaaatttgtgcaaatataaaaaatgaaaagttgtgtttaaagtactttgtataataaattaagtaaaaaactaaataataattctaaaattttttgacgaatggtcaaacagtgcaagcaaaatattaaaatcccttatattagaagacatagggagtatataccaataacacatgggacccacatcatggtgaaggaatcttaccttagaggttgtttggtttgctcctaaaatttgccaaacgttgacacacctcatgttagacaagtttgaccaagttaatttattgtttggttcatagccacacttgtggcaagattccttcttatctattataaccccacgtgccattaactcaataaggtgtggcgcaatcctatttcgctagttaaggtgtgatttacttattgtaagccacaacttaaataagtgtgacataaaaataccgtgaatggtggcaaacttagtataacattcaaacagtcaaatctggctaacttgagttggacaatagtcaagcaa

SEQ ID NO: 463 - DNA, 1739 bp, Oryza sativa
tatgctttgaagaggcaggaagcacagtcacataacagacgggtaacacttgaggatcttgaagattcatgggatagaggtattcctggtatcaacactcttttccaaaaagaccgtcatactttggcatatgataaaggatggagagtgagaacagactttaagccgtaccaagtgctcaaacaaaatccattctggtggacacatcagagacatgatggaaaactatggaacctaaacaactataggactgatgtcatccaagctcttggtggtgttgagggtattttggaacacaccttgtttaaaggaacgtatttccctacttgggagggtctgttttgggagaaagcgtcaggttttgaggagtccatgaaatacaagaagctgacgaatgcacaacgttctggtctcaatcagatacccaaccgaagatttaccctgtggtggtcaccaaccatcaatcgtgcaaatgtgtatgttggtttccaggttcagctagatcttacgggcattttcatgcatgggaaaattccgaccctgaagatttctttaatccagatcttccgtgcgcatctgtggcagaagatccatgaaagtgttgttatggatctttgccaagttttggatcaagagctggatgcactggagattgagacagtgcagaaagagacaatacatccgaggaagagttacaagatgaacagctcctgtgcagatatcctcctttttgctgcacataggtggcagatgtctaaaccgagcttagtctctgagtcaaaggatgtctttgatcagaaagctagcaacaagtattggattgatgtgcaacttcgatggggagactatgattcacatgacattgagcgttatacaagggccaagttcatggactacactactgacaatatgtcgatatatccatctccaacaggtatgctttcaatatctatgaattgttttatcaactatctatttgtctgatttggttgtagctaattgatattttgttctacaggggtgatgattggaattgatctagcatataatttgcactctggttttggcaattggttccctgggtcaaagccccttcttcagcaagcaatgaacaagataatgaaggtaatataatcatgttaattgtaactactctatctttagcttgcataatgatctgtctgtatgttccagtatttccaatataactaacctgctggactgttttcatctataacagtcaaatcctgctctgtacgtgctgagggagagaataaggaagggtctacagctgtattcttcagaacccaatctgccgtatttgtcttcacagaactatggagagatattcagcaatcagatcatatggtttgtggatgacacaaatgtctatcgagttaccattcacaaaacatttgagggtaacttgaccactaaaccaatcaatggtgctatttttattttcaatccaagaactggtcaactatttctgaaggtatgttcattctcttctagctacagtcataattgtgacattactgtggagtgttgcaactttgaaggcttaaaatgaaaatggattgcaatatgcaggtcatccacacaagtgtatgggctggacaaaagcgtcttggacaactggccaagtggaaaacagctgaagaggttgctgcattagttcggtcgcttcctgtagaagagcagccaaagcaaatcattgtgacaaggaaaggtatgtt

SEQ ID NO: 464 - DNA, 545 bp, Oryza sativa
caggatgtatgggacactagtgacggacagtgtgttgtgatcctccagacaaaatttgagaagttcttcgaaaaaattgatctgacactgttgaacaggcttctgcggttggtcttggaccataatattgctgattatgtcactgcaaagaacaatgttgtgttgtcttacaaggatatgagtcatactaattcttatggtctcattcggggtctacagtttgcatcatttgttgtgcaatactatggtcttgtgctggatctccttctgctcggtttaacacgtgcaagtgagatcgctgggccacctacaatgcctaatgagttcctcacatatgctgataccaaagttgagacaaggcatcctatccggttgtactctcggtatattgataaggtgcatataatgttccgctttactcatgaggaagcacgtgatttaattcagcgttatttgacagagcatcctgatcctaataatgagaacatggtcggttacaacaacaagaaatgttggcctagagacgcaagaatgaggctcatgaa

SEQ ID NO: 465 - DNA, 6523 bp, Oryza sativa
  unsure (1)..(6523): unsure at all n locations
tatcatgaacgataattgcaacttgttttgcgcggagaaaaatgcccaaactatatagaggtgacaatagtgtaagcacgaggcgtgcaatggatttatagtaagtggttgtgtcaatttcaattgaatatggcaatataccgtgttgtgtttgtgagagtgtatttggtaaaaaaaggtatgaaattcatcagtgtgttatcttttaagtcaaaagctttaatgacaaatgtttcatcatacacatatagttaaccttgtgggtatgaaatgctaaattaactaatgcactaaaataagatcaataacaattcgtttggatttgtaaaattttgaccatcaattcaatattagagcaaccttatatagtgaacttatgatattattgataatatttttcaactcaaagctagacatcattttttcttattttaaaactaagcactcgagaagttaatgttggtcaaagctttaaaagtttaaccaaatattgttataaacatcaaataattaatgattgaacgaagtaactattataatctgtgaaatgttgccttgaaattttttgattttctgctatgagactaggcaatctacattttcagtcatttaaaccaagcaaaatcccctgatagattactttctgtatggtgcatacctagcattaatcaacaacttcatctccagggaattttggtgataggcatccatagctaaaataaatcttatagttgaagctagtataaagtatgatgttgtgtgggcccacattccatacttaaaagagacaaatgcttgaaccaatttgtttgtttacaaactccatgttatacatctacaggaaccgaacagcccacctctctaacaagcttgtagttacatagtagataagaccatagcttatgtatgtctcatagagtcatagagcgcaaggctaaccttaaaaggtctatagtttagtgatgatcaacatggaacatagccccctgttaaccttaaaaggtctatagataaaatgatagaaaaactaaacactaacgtcttcaaaaggagaattggcacttttgttttttatgaaagccaccctgttttcaaagtgatggcccctcctagttccctacttgagcctactacttattatgctggaataaaattgtatggtagctttgggtacttataattttataatcccatatttgatattgtaagccgttctagctatgtcccaagttaaagttagtttaacttaaacaaaacttatagaaaagtaattgatacacacaataccaaataaaatacaccagattacatgtttcaaggtggattttagagatactaatttaatgttgtagatgctagtatattatttctataatcttggtcaaagctagagatgttcgattcagcacaaaactaaaaacacctcataatagtatggaacagaaggtgtaatcttagcaactggtgaatgtattctgccaatgaattccttttcatatatttttttatgttgtcataggataaaactagaaaagtatattttcatcattccacaggaaaaagagaaaaaaaaagaagaaataaaactgaaagaggccgccaagcccattatctgctggacgacaaccaactcgacagataaaaatcaggcccagtaacctgacgcaacccggcccggcccatgaacccaccaaggtcggctccaatcctcgcgcgtcgccgccatagcctgcagccgagccccacctataaaaatcgcccgagccacccgatcccatcggcttcctccctctcccccttctttttttttcccctcccatttttttttttaatctcgacacctctaaaaccctcgcggcagcagcggccgacgggcctgcccgctttccccgtcgccgccgacgatgtggagcggcgggccgccgccgccgacgatgtggagcggggggccgccgcccgctccggcgatgggggccgggccgccgccaccgggcacgggcgctccgcctacgccgacgncggcgggcgggggcccgcccggtggcgttggcggcggcaagcccgtgacgccggcggagctcgaggcgcagctggtggagaaggcgaggaagtggcaccagctgaactccaagcggtacggcgacaagcgcaagttcggcttcgttgaggcgcagaaggaggacatgccacccgagcacgtccgcaaaatcatcaggtaaagtctccagatccgcgccgagttgttgcctgtggatgtgttttggtgttgtggtgctttgtgctgtagttgtttgtagcttaggacctagggggatgattgtggttgccctctcgattgaggctattttcgttactagtgtatgatttgatacgatgtttgaaatttatggctgtaactgtgttaagtatttaggcatggacttagctgtgatctgctgctttaccttatcatcatgttactgttgatatcagctgcttatgttctattgttactggagtatgaagagagtgaaaaaaaatcagcctgatcggtgcagccgctgctctctcgctagtagcaacgagcagctgcagtcagcagttccgttcacgtcctattaaactgctttcttacaacatttggaatgggatattggaagtcaagttttgatagttatgggaatgttatggtttttctaattaacccaactcaattatgattgtagatattgtgtaatctagttatggtggtgatttttttgatttgctaattgtcttggctgttaagatgaatctctttatggttggggtttgtgccatttgtgcctgatcctcagttattaggaatggtggcaagtgacatgttctgcttgaatttgctgtcatatatcccatcttcaccatcaactactgtagttcatgtgtatgttgcggacaatttatttatgattctatttattgctgatcagggaccatggtgacatgtcttcaaagaagtacaggcatgataagcgtgtatatcttggagcactcaaatttgtgcctcatgctgtttacaagctattggaaaatatgccaatgccctgggaacaggtatatttattgtgacactctttgatgtgaacattgatctagccaagtagctattggtgagattacttatacaatggcaatacagaatagaatgacggaactcttgttttcaggttcggcatgtaaagatcctttaccatatcactggtgcaataacctttgtaaatgagatcccatgggtagttgagcccatttaccttgcacaggtactgatctaaaacaccttatcttttttttttcttctttgccctgttctgggaacaatagctactgtacggatctgtcataattgataggcattatataacttaatctgatctttagctttgtacttcttatttttgtacttaaaccatctcaaacatgtgtgttccacagtggggcacgatgtggatcatgatgaggagggagaagagagataggcgacatttcaagagaatgcgctttcctccatttgatgatgaggaacctccattagactatgctgataatttgctggatgttgaaccactggaggctatacagttggagttggacgaggaggaagattcagctgtgcatgaatggttttatgatcataagccgcttgtgaagactaagcttataaatggccccagctaccggaaatggcatctatcgcttcccataatggcgacactctatcgtcttgctggccaacttttgtcggatttgattgatcgaaattatttctatttgtttgatatggagtctttctttaccgccaaagcactcaacatgtgtatcccaggtaaccttattgtgttcccttttataacttctaagttttttttactttaattcctttaattgtcatacatgattagcatagttgtagcattgatcttatggttatatcaaaatttataccacttggtatctgactgctggcaaaatgttgtggaaatttagcttgtgctaagaaatgggtttataccaaaacatttttttttttgcatttacgtgattttagtgcattaattgttactcaatatttgaagcatggaggaggtagtttatgtccatagctgttcatttttatggaacatctgtaactgtaacatggggatttatggtaatgaagtagttaatggctttattaattagatgatgcatgttgtatgggcgacagtgtgagaaggaattaagttttcctgcatacatatgtctgtgagcttggggctttgaaaattagcaagcaggttgggatgtaaaatctgccttctctactgttctattcaccccttctcctgtaagcacgaatttcctttttctttttttgcaactagctttatatatgcttccatatgagaatcttgcagttgattaatatttacactgaaacattttcaaaactgttgaatgggcatccaatggtagacataatttgttacattggaatgttttatgttattttttagctttgtacaaagattgtgacatgtaccttttgctgttgctgcatcataagctcttttaccatattaaatgctatgttgcaggaggtccgaagtttgagccattgtaccgtgatatggagaagggggatgaggactggaatgagtttaatgacatcaacaaactcatcatccgccaaccacttaggactgagtacagaattgcttttccacacttgtacaataacaggccaaggaaagtgaggcttggggtatatcatactccaatgataatgtatatcaaaacagaggatccagacttgcctgcattttactatgatcctttgataaatcctataacttcgactaacaaggttgatcgtcgggagaggagaacaactgaagaggatgaagatgaggacttccgtctcccggatggtgtggagcccctcttgaaaggaacagaactttacactgatacaacagcagctggcatttcattactctttgctccaaagccttttaatatgagatctggtagaacacgtcgtgctgaagatatccctcttgtatctgaatggtacaaggagcactggtgagtgccattatgacatcctttataccttttcatgatccccttttgccaatgttctgcctgatgcacttgaactttcaaagctaatcacatcaatctctcgtttgcagcccaccagcttatccagtgaaggtgcgtgtcagctatcagaagctactgaagtgttatgtgctcaatgaactacatcataggcctcccaaggcacagaagaagaagcacctgttccgttcactccaagctacaaagttttttcaaacaacagagcttgactgggcagaagcaggtttgcaagtttgcaaacagggttacaatatgttgaacttgttgatccacagaaagaaccttaactaccttcacttggactacaacttcaatttgaaacctgtgaagacactcacaacgaaggaaaggaaaaaatctcggtttggaaatgcatttcatttatgccgtgagatattacgacttactaagttagttgttgatgcaaacatccagttccgcttgggaaatgttgacgctttccagttagcagatggcttgcaatacatattctctcatgttggccagctgactggtatgtaccgctacaagtatcgtctgatgcggcaaatcaggatgtgcaaagatctgaagcacttgatatactacaggttcaacactggtcctgtaggaaaaggacctggctgtggattttgggctccaatgtggagggtgtggctgtttttcctgcggggtattgtgccactgcttgaaagatggttaggtaatttactggccaggcagtttgaaggtcgtcattcaaaaggagttgctaaaactgtaaccaaacaacgtgttgagtctcacttcgatcttgaacttcgagctgctgttatgcatgatgtccttgatgctatgcctgagggtatcaagcaaaacaaggcacggactatactgcagcatcttagtgaggcatggcggtgctggaaggcaaatatcccatggaaggtcccgggcctacctgttcctattgagaacatgatacttcgttatgtaaagtccaaggctgattggtggaccaatgttgctcactacaatcgtgagcgtatcaggcgtggtgctacggttgacaagactgtgtgccgtaagaatcttggaagattaactcgtttgtggctgaaggcagaacaggagaggcagcacaactatttgaaagatgggccatatgttacacctgaagaggcagttgctatttacacaacaacagttcattggcttgaatcaaggaagttctcgcctattccttttcctccactttcttacaagcatgacaccaaacttcttatactagctctggaaaggctaaaggagtcttacagcgtggctgtaaggttaaatcaactgcagcgggaggaacttggcttgattgagcaagcatatgataatcctcatgaggcgcttt

SEQ ID NO: 466 - DNA, 8573 bp, Oryza sativa
tatgtaggaaagcttcctcatcaaacaaatattactgacataaatgagtttcaaatgtgagaatatgagcatcactggcttcacttgtcaaaccaaatatgtactgaatgaacaaaaaagtaagatcaaaacctgctgtagatgtatcagtcaagcctatgcccaaaagatcctgtaggaaatcattaggtgctgtagtaggggcggaagtagtcgcaggagcatcgtcagaacttaaatcaagcaaatcagctagaggagccggtggtggctttgctacaccatttggaagcttaagcgagcttccaggagttgctgcagcagctaatttatctgatgaaatagttgcttgtgtggaagcagctctcttagccaagtaactagcttcatctatcacaggcatccgctcaagcaaagatgatctgttcatacaacagcatcctcaaggttaatctatcttacagaaacaaatatattagagaaagcacccacagcaatggcagaatctgtcacccactttatagactgatgcctctgtataatggagttgaattcaattgacctctgttgtagttcaagcacagtattccctttattctgtgcaactatttcctttatcctcctggcaataagataacagagtatggtgacaaaatgcaaaccatcttgagatagatatcacaaatcacgctacttatattaaaatatttgcaagaggatcaaaagaataccacacaaagactaacagaaacttcaaacaaagggttggtacattagctttgtttttccatcacaagcaaagttgtttggtgctaaaatcatatttgtatccatgtaaagaaaggtaaagtgaaatgaagagagatttgttaccaacaagtatggcaatcagctcgtgaacatttcaatgttattcagtatgttaattaacaagaaaccagttcataagaaactgagtgacctacaaaaatgtttgaaaacaaataaatatttccttcttcgtggcaagttttcattatataataagcacaggcagtttgtgctcatattaggacaaaatcagaatgggatgatcctgtggcaatagctgttctacctcagatcaatcaataacatgaaaccagaacgactgaaataattaagatagctatacaattcatttactactacaaggtcaagttaaatgataacttactctgaagtcggtgggaatcgggaagagagcttcaagagagatactagacacatagcccgagttgtcacgtctgcagagtatcgtttaagagagacctctacagcatccacggcatcagattctgttacctgaacaggttacacaaaaaaaccaagctgttttaaaatttttaaactggaaaagcaatggtactaaacgaaaaacatactgagaagcaccagcatacactggaaaagcattgaactaacaaactgacgaattctataaagcatttcgtggtgaaccatctacaaaagacatgtggataggtggaaatgatttatcatgtagcttttccttttgaccatcattacatatagcacttgtaattcggtaattccaagttgatcgttacaagaggtattatgagacacttttagtgtgtctaagagttatcacttatcagtcctaaaaataaactaagccaaattgaaagcatcacatgcctgaacaagaactgcagtaatgtttaattgcatcctgacttcttggcagaagcatgcagccaatgagaatggtggcaagaattgttaactcaccgtgattggttcctctatgtccagcataccaacattgttcaccagcatttcaccatactcaccaatgcaccatacagctaccctaaccaaactttcctaaataattcaatgtagaagagattcaggtatgtcagataagtagcaactcaatggtatagatcataaagaagactgactatttctccatacctgttcaccgcaagctagcaatgccttgtataatgatctcactgagtatccttggagttcagatgcattgcttattaagactattagagcatgccatacatcgtccttcacataatttccagcctgaggatgtacaaggtaacataattcaaacaaaatggatttttactgattgaacggtgcaagagaaaatatccccatagttgtgcttctgtacataccagagataaaaccttgaacatctggtctaagtaccaaagtttatcttgggaaaacctatttgaaatgctacattattattgtccataaatcaacaggagacagaaaggtataaatcaacaggagaaaaaaacaaaattgaacaaatataataaagggacaacacaggtaaatgtcgtaaaatgaaatacttgttttataggcttatagcctgttaactaaaccaatgcagaagatagtgtattatgttatgttgatctgacatgattattatcctcctgatagaactatgtgcaaatcctttgctatgtaaagaaaggttaggaatgatatgaaaaggaaggaactatgtattctcgttaaacaaattgtctacccttatttatatttccctttgctccacttggggtaggaaataatactgtaccgtatgtgaagtttcaccattaattgtataggatgagtatcctttttgattgtctgttacgtttcaaaatgcatgtaacaacaggatacaaaggacctttgaaacatttacagaatatgcaactaagagttcttacaaaactagtagagatgacatccacgaaaaattgaccctgaatcaagtcggtcagtaaaaaaaaagataaggagggggttatgctacgtcaagtcttacttttcaacaattgagcatatctttgctgtgaggtcgtccttgaagtcctgatcacttacttccaggtaatcaacaagctccttggtcaaagattttgcatttgcatcgttgacaagaaggtaaacaagttcaagggcccttttgcgaatagatacatcagcatcctggaaaaacatcagcagttacgaattattgaagtgtaaaagaaaaggaacaagaaatctggtaacaataaagtgaaagtgaatagtaggcacatcaacaacgcaaactgcagtagacataaaaactatggcaatgctgtttttttctttaaaatgatcatgcaatcatcatttactacgggatcaagcagaagaaattttccttaatgcactcggctaaacctgactagaaatgcaagaaaggaggatggtctgcacttgtcactagttatgattagctgtagtctcaagaagtgcggaaataaacagtatactttcaggaagctaccataggtgtgtctcagaattttacatacatgagcattattttacttccctagaggaatgagaataaatccagagcacattaactggagaatttaccttgacacactctaatattgttgctctatgcctctgcactgcttgcgtgtctacctccatggccttcataagcatgttcagagcaacatatctgaaagcacagtatgcacactgagaattatctctcatatggaagaatattttactagtcaaaacacctaaatcatacaaatgtgttattccctccatttcatattagaaggcattttaggtttgtcctaagtcaaacttcttgaagtctgaccaagtttataggaaaatgtagtaaaatctacaaaaccaaattagttccactaaatccaccattgaatatatttttgtagtatacttttttgggtacggaatgttgctacgttttcctatactagctgaatgcccatgcgttgcaacgggaattaaaagaagactttaaaacctcaaacattaaataaaatggtcccattgtaaatcattcacatcatatttttcatcattttgtatatcactttaaaataaattttccttgtgtgatggcttctggttggggaagggataaaagtccacctatctcactatttggggacccacaaggtagtggtggtaggtggtggcagattcaccactcaccaccacaattagggtcttttaaaggagtatagaaacttggtccaattcatagtacaacttactcctataatatgagggagtacaaaagtaatagtccaattcatagtcaatcataagcaccaagcagtagtaccttgaagtttggaacaatgctcagggtaagtaacccattgaattacaagaaaattaactagcaaacttttactttaaaccctttattcacaaaagttaagaggcttgaacatcagttgtccaagagaaaagagtgaattacctgatgttattatcacggttggacagaaatctacccaagatattgattgccagcacacgtaaaccactagtagcttcgatgcccattatagtctcaacacattcatataaaatagcatttcctgcgttcttatttgactcagtttttgttgcaacctggaaatgcaatgcaaataattcgatataagatacagagcacagctgcgggaaagaagacttcaacaaaaaacatggtttactaaaagaataattcaacaatgagaaaaacataatcatatcactgagttcttaatccaagagtaacaaactaacaatgctacaagacctaaataaatatctgggattagtaccactgaagacgctcatttcgatttacaatacattaataataatgcaatttgtgagggtgtaatgatcatgaactgtctacaaaatgatcagaacagatgtgatttgcatagtgaaatttctgttgtgtataaaataaaaacaaacaattcacctgagcaagaatatcattcacaaactcactgcaatctgcatctccttgacccaaaattcgcatgagcttaagcactctgatatgcaagaacggatccgtaattccagcaatgtcatattcaggagcatatgaactattggacacatctctcagtattctgaccaaaccatcaaggcagttctgtagaacgaaaattttatcagaagtactgccgcaaatgaatacattagtttgatatgatattgtaggtatcagcaaccaacaaagtgaacacactatgcgatagaacacaaaaaaatcctgcctctttcaatgaacatggtattgggtcaagtgtcacatacataaacaatgattaactattatactaatgcttttaaacgactctgtagtgtcaatggctcaatgcatcatcaaatgaattatgaggagcaggaattggggttgacagtttggaatatataggatgctaaataagcagggatttagccataggttattagtcccaagtcccaactgttaactagtctgatggatctgaaaattctatggtggtgattccaacctttagccggaataattcattattcagaagaaacgaataaaatcaccaaactctgcacttccagtattcggcaaacatcatctctagtcttcctatcaaccacgaccacaggaacttggggactgtactgcattcccagctttcccaccaaacatcataaaaccatcggacaaaggattttttgtacagttaaaagatatacagcaagtgtgtcaacgcctcaacagacacatcaccagaaaccctattatctactatttgtgcctacacatggatgtttggatgttcaaacatcataaataccacactgggaaagcaacaaatggttcaacaagactaaatcaacaatactcgtatgattttaacttgatacgttcaaaaaggtataagtttcaagtcagtaatttgggcatcggagacagtagagtggcagctggcagtaattagatatcaagaatctgatgattggtaagagcaaaaaaactgaaacaaataagacagtttggtattattccaagggctttactgaaagggtatgcgttaatatggaaagaggagatgaaaataagtaatttgttacatagtaactttgagaatgcaaacagaaggtaataggcagcattgtccaaggaaaaaatataacggttcctagaatgcatcgtaccttcctcaggtactccaatgcctctttgcttgctttacaaagttctgcgcagagctgaacagcagatatgagaaccccgtgatgtttttccttcagtagtgaaacagcagagcccatgaagttctctgccaaatctggaaccttccgtacgatccttatagagcataaggcagcctacaaaacagccaaacctgtacaattagtatgacaattcacctcaagtatttcagaaccaaaaacaacaaaggcaagacacctttgcagggtgaaacgacagggaaataaaaggctcgacatgtaataagctttgaataatgatggtatagacgacaacacccacaaaacaaagaatgattgtttgagttcaaattgacctttgctaacttacccagagcatatgctatgagctattaacctatcacattacattattacgatttacaagtactaataaacacagaacaagactcatggaatggacatactgacatcatgctaaaaacagacttcagtagaaactataacatcaagtctaaagtaaacatataccttcttcttggtatttggttccctactttgcaatagcctctccacctcaggtgacagatcacgcgccatttcagcggagcaaatgttgccaagagcacagagtgcaagccccacaatgaactggttcgagtggttaagatctctgtccgcgttaagtactaccaaatgctcaaagcagaacatagcattctaagaaaaatcaaaacagatatggagcataagtatagtatgggtggatactgcttgagcgagttggtgacgagcatgagcacctcctgccgctcgtcgagcagcagcatgaggccgaggtacccgatgcgcttctcggggaagcccgcggcggcgatgagcttgaggcactccatctggccgaagtgggtggggtacccgagcatgtggatgaacatgagcttggccatgttccggtggcggtagtcctggtccccctcgctgatggccgcccgtatcgccgcgcactcccgccgcaccaccgcccgctcctccgccgccgtcttgcacgcgcgtatcgcccgtatcatgtccctgcaccacaaccacgcgcgcggatctgaggaataggaggggatacgagaggagacgcgggtggtgatccatccgaggcgagggggagagggctaaccggaggcgggtgccggaggagaaggggttgatggcgaggtccatggcgaagtcctcgacgatcttctcgacggaatccagggtggggcgacgggggagggatctcgccgccgcggggcgtggggggcggcggcggcggcggcggcggccgggtggatctgggaggaggaggagtaggcggtggcgatggtggtggtggtggtggtggtgggaattgcgatttgcgaagaggcccctctcgctcgcgttggggttcgtttttttgaggattagttggggtgatttgggatctgatccccaccacgctgacctcactggctcactgacatgggtaattccaagtttccaacggtgtcgggaactcgggataatcaacgtggttcacttttcatctttagcattctttctagggactgtagcataagattttagtacccttcgattttatatgaaatcataggaaaattagggaattttaatcctaccgaaaaattcaaagcctttgaaaggattgaatcctatctactcgtgttgttttgaaattcctatggaacaagaaatcctataaaaaatttgaagaaaagttagcaagtggtccaactccttagaaaatttcccttgtgcatctctcattcgattcctacgttttttttcagcctaatcaaaataccatttatgtgtctttccagtgttccgtaatttttttttacacttccattcatttttttattccttcgttttttctaatcatatgcttcaaattagcaatcattcatgtattgtttccatgtgttttgcagtcatatttttcatacacttgcattcctatatttcttatccaattcccgcggtctactcaagcaaccatttatatatttttctcctcgattttgcaaacatatgttttatacttatattcctatcaacatcacgtacttctaattctctatgtttgtcagtcttgcgtttcaatggaatccttagtggtatatgaacttccttaggtgacattagatatatagtacttatactttgtattttgtatatcatgaacataattgcaacttgttttccacggataaaaatgcccaaactatatagaggtgacaatagtgtaagcacgaggcgtgcaatggatttatagtaagtggttgtgtcaatttcaattgaatatggcaatataccgtgttgtgtttgtgagagtgtatttggtaaaaaaaggtatgaaattcatcagtgtgttatcttttaagtcaaaagctttaatgacaaatgtttcatcatacacatatagttaaccttgtgggtatgaaatgctaaattacctaatgcactaaaataagatc

SEQ ID NO: 467 - DNA, 657 bp, Oryza sativa
taccttttttgcagaattataatatcacatcatggttaagtactcaattagtcacttacctagtacatacctcctccgttccatattacaagtcatttttagttttctcctaagtcaaacttctttaacttgcccgagcttatagaaaaatgcatcaacatccacaatatcaaattagtttcattaaatacatcatgaaatatgtcttgatagtatacttatttgttattgtggatattggtgcatttttctataaatttgattaaatttagaaaagttttgacttgggacaaaattaaaacgacttacagtatgtgatggagggagtaccaattttatctcgatactcagatcttgtggtgttgtatgggcattcatttcttagcctgttctgatgttttctgcgcaactgaactacccaaatggctgtgaaactggtcaggctgtctgtttatgctaatatttcgtggtacttatcaagttatcggttattttatatcaattttgatccaaatcagcagtatctataagaatgtacacaccatgaaacctttctggtctcttgtacatttttttaatgtaatctgacctttcctgttttcagagaactttgttccggaagcatttagattttggcagcttggcactgaactggag

SEQ ID NO: 468 - DNA, 1166 bp, Oryza sativa
ctggtcctggacagggatttaatgcacattcagcttagaaattctggtttgagaatttcggggcgtgacaagttggtatcagagccgaccttgaccgtaggacaagccaactggaaaccctaagagccctctgaacccctttttcatctgcatatgccctttttgcacctggaattgtttcgggaaaatttggagttttgcctctttggtttgcgggaaaaatcttgtcgttctttcgggtcggatttttttttttttaaaaaaaaaaaaattattagctcagcctagggctttagaaaaattttagttggagtttattcgacagtcagtcgggaatttattgggggttatgcattaggtcgtgtctatattcgatgggggcaatgttatgcgcatcattttccatgcaactagtctatgcattaatttattgtttagttgcattagtgtctttatttgagttcatgaaaaatgttctatgcataaaaatcatcctgctcggttatttatttgagtcttcttttgctttgtttaatttggatttgagcatgaattggttcctatcccttgtctactttagatgtcagtcctatccctcgtttgcaagcgccgccccgagcttcagagtcgccacccttagctttatcgccttcttagtctgtttgcttgctagttttcgtgtttaggtttgttgcttgtgggttagtcggcggtcgatatcatgtgtcagtggtatgactgcctcaattaggagttgcgtgcctctttttcagtgttttaatcaagattaagataattgcacttaaattcataagcaagattagtttctgagccccctgtttttcttccttttctcatatttctacctatccccttcagatggagataaggaatggttcacgcgactcgaacaacgccagtggcagcgaagagccgatcaatggagcacgtgccaacggtgcatctgacaacagtccgtccccaccgcccgagaacccaacaattgctcaggtgttggacaatcagactcagatgatgacaatgatgatgcaacagatgcagcaacagtaccatcaggtgttgcagcaggtgcagcggcaagcacagcagcaacaacagaacctgcagtttggtcctccacctcctcagtccaaactgttagaatt

SEQ ID NO: 469 - DNA, 1476 bp, Oryza sativa
ggtacggcccaggcacggccgggcctgggccgaggtcagttgggccggcacggcttgacgaacaagccgtgccgtgccgtaccagcccacgggctacaaccacggcctaggcacggcccaagtagcctcgggccgtgccgggctggcccgacggcccggctagcccattgtgcccgtgccggcctaggcacgccctggcaaaaaaaccccttcaaaggttcaattcaacacaacaaattgacataacacatcaaattcatgaaattcacatgtaattcatcaaataagtcaaagaatcacaaacaattcatcaagtcaccagttcatcaaatcatgcatacatcacgtcacagatttacaagcacagatttacaaacaaatgaacaattcttcaagtcaccaattcatcaagtgtaacgctccgcttttcgtgaggcgttaaaaactaattcggcaaaaatcctaattgcgaaaatttcgttctttgagtgttgagtctaagttgtgccaaggatctcaatttaatcccgttattccctctcatcgaaatcaaaaatcctcaacctcgaaattcctcttccgactcaagtctccaaatcaaactctgaaattctatccctctctttgaatcatcaccaaatacttccccagatccaaaatatccaaaaccccatcttgaatcctccgtctactccttcctctcatcgagatcccaatttcaaaatctaagtcaaattccaagttcaaattctcttcgaatcaatctcctccgaaaaagtctattttgcctccttctaaatttggatgggcctgatccccctcccctcggcccatctcctctctcagccgttcctcctctcccctctctccgcacgtgcgttgcgcgtgcgccgcgctcgagagaagagagcgcccactctcttctcacccacgctctctctctctccgtttctctctctctcccgtaaaagcttcccccaccggcgtcgatttcccgccgccgccgttcgaaatccgaccgcgccctcgcatccacgcgcgcgctcgtgcgtggccgaccgcccggtcgccgccgcgtcggccctgccgcgcctacgcctcccggccccgcctgcccgccgcccaaaacggaagggaagagttcccctttccaccgccctcttcgcctttttccccctcgggctcaaccgctcgctctctcgccctcgtccgcttgcgctcggaggcagagccgctgacggcagccgccagctcgccgcccccaccttgacccagcgccagctcgccccgagccagccggcgctgctcctcccgctcccgcggttcaaattccgccgcacgatccaccgccttcgccgcccaacacatccacgccgtcgccggcctccgtctcgccccctctccctttcctttatcccgaaacagcaagaacagagctcccttttcccccacctttttccttttgcccgacaccgc

SEQ ID NO: 470 - DNA, 1348 bp, Oryza sativa
aagttgtttaaggatcgtcgttctgttattattgatcgtctcaattctgctagctctattgctttgacatctgatatatggtctggtcatgctaaggaagattatttgagtgttgtagctcactttgttagttcttattggcaattagaaaagagggtcttgggtcttaggcttattgatgagtcacatactggtgctaatattgctgagcgtgtgattgctgttgctgaagaatatggtattactgataaggttttctctattacattagacaatgcttctgctaattctaaagctatggacacccttactcctgctctgtctggttatattggtgatttatttttgcatcaacgctgtgcatgtcatatcatcaatttgattgttaaggctggacttgacaagttcaagcccatgctaaatgacattagagctgccatttcattcttgaatgcatctaatcagcgcattgctacatataaaaatgtttgcattgctgcgggttatcgtcctcgtatgtttggtttggacatggatgttagatggaattcaacttatctaatgcttaagcatctcataccacatagggaaccattcacagtatttattagtacacaacatccttttgttaatgaccatccattactcacagacttacattgggcatgtgctgaatctgttttgtgtttccttgaacaattttatgattcaactgttgttttgtctggtgtttattatccaacatctccattaatcatgcatcacattttagagattgctggacatctaaacacatatggcaatgttcaaaaccttgcaaatgttgttggtcccatgaaaactaagtttatgaactactggtctaaaattccaattctttattcatttgcatttatcttggaccctagggccaagattagggggtttagtaaagtgcttcagattatggctcaactcattagtgatgattactctgcttatttaacaactgttagagcttcattgtctgatacttttgctaagtatgaaagaaagtttggttctgttagattgcatagttccactattccaggcccttccactggtaagaaaaggactgcatgggggaagatttttggttctgttgttgctgctgggcttggtgctggtaatgcaggtgccagtccaggtgctggtaatgctggtgccagtccaggtgctgggcttggtgctggtaatgctgatgccagtccaggtgctgggcttggtgctggttcattatccaggatgacatctgctactgctttgcttcaggcagcttcttcaactgctaatctcaatccttctgaactgtctgcatatcttgaca

SEQ ID NO: 471 - DNA, 3095 bp, Oryza sativa
gatggacgatggtgcatcaccaggaaatctcacctatggtcctcgtggtggcatagacgccgccgggtggtggtggtgctccgtccaccacgcaggtggcggcgccgggatcacgcccggcggtggtggaatgacacctggcggaggtggcggcggcgacagcggtcgtgacgagggcggtggcgctggcggctccccgctgagctcgggcgcacctggagcagaaggtgctgtcatcgtcggaggattccatgggccgtactccaatgcgttccccgccggctggtgcgtccattccggtaccggccaagctgccgtggccggagtcgagaaaccgatcgccgatgagtccaggagcatccaccgccccgcgcgctccgccaccgattcttgacggcgcgaggaggaagccgcggagatgtcctcgccccgccgcagcggcaaggccgtcagctggttggcggcgaactccgccgcgcacgctctggcatcctcccgcgctctcccgctgctcgtttcgttgagcagtcggaggcgctccgtagtggtacaccgtgtgcttggcgaagaactcgtgccgggcttgagcgatgccaggcagagcagccgcggcggcggctggagaagtcgtcggagaagaagcagacgactcggaatccgaagccaatggagggatgcaccttcggggcgcagctcgcgccctcctgtgcgggtctggaggtggagagcggatgcgcatcacagcaggggttggcatcttcttggaacccggcttctttcgaccacccatggcgtcaggcgaggcggctcttggtttcttggcgctctgtccggcgagcagcggaggcggcgagtgggttcttggtttcttggctcaccggcgaggggagaacggagggaggagagaagttcgttggccaaggttacggctcggcgctctcggcggcaaggcgggtgcaatttgaagggagttcaacccttcgctgacaggtggggccgcagtcccatgtccgctgacaggtgggcccacatgctcgatgacgtcatcctcgcctcgcgacgagaacctgttgccgctgcctgctgcttgcacaggctcacggccggcgagagtcagccacggcgtccacggctgccagcatcgtcgtcccggctacgtctcgccggtgataggtagaagcagaacaagaggctaacaactcgcaagcatctgaacgaacacctcatgtgcgagtagagcagcactgaggcgttcggagccgaactcgtcctatcaccggccgcggaggcagcgaacaccagtgtggattggagggccaagtctaacgcgatttggtgaaacatccaacccaacatgcatcgactgtcgctcggcggcggcgtcagttgctgttgctctgtgtgtgtccaacgccgcgacggccggcggtggcatccgccatgtgctgtcgacggctacgtggcgacgattggagtggcaccgccggtgaggaaggtatcggcgtcgacggggacacaactccagatcagatcagctcaagtgctgaactgatttttgttcagtttctgctccgaagtctgaaactattgatctccacaagatatgggctgccttttgctttagaaaagaccgaaatcaaaacgtaaacatttcacttctccaaatgtatggatgatcagtcatatatcatactccatcatacagacagcaatccaaatgaccgagggcggcaaattacctggaatttttatattttggtccttattgaaaacttattttacaaataggtccctggaaaaacttaaaccgggaatgtcctttttggggcgccagagtggttgacgccgtcctccaacatggcgccaccagccacaatggcgccgcggccgtgccaccgtggcaccagagcctacgagggcttgctgactcggcagagcggggcgccaaggaccaaaatataaaaatttcagggcaaattacatttattccaagaaagaatacgatatacttgtcatgcctttggctcggcctggcacgagtgtacgacacgaacctattaggctgttcctagactgttggtatagcccatggacaggcacgacacggctcggcgtgttgattaggccgtgtttggtcgtgctcgggcccaatggcctatttgaccatctatacttacttgtcagcagcacaattgaatcaaactccatcggtctctattctctaaatataagggattttggttggatgcgacacatccaagtatagcgaatctggacggaagcatatccagattctttatactaggatgtgtcacatcttatcaaaaccccttatatttagggacgaagagaatacatattaaacaagaaaacaatagcaaatcagtttaccctcccgtttatcgaaaaggaaggtaagtggaacgtggttctaaaatatttttaatttattttctttatataaccgacgtgggcattagagagattcattatctcttgacatttcaggtagaattgttgcgtctcattaagtttttatgttttccttaccaagttattgtaattgaacgaaagcactatgtagacgtcacaccggatgaattcttggggacgtttcactagggccgagtttagttcgaaactttttcttcaaactttcaactttttcatcacattaaaacttttttacacgcaaactttcaacttttccatcacatcgtttcaatttcaatcaaacttctaattttagcgtgaactcaacacaccataggatatataaaatcgtcgtttaaaccatccagagagatataaatgtacatggtttcgatagttgagaaagccttcttaatttggttttatggttaagtggccaaaattagacctggactatcattgaaagaggcaaaatggactttgtttatcccacataggaccaacgcgttgccggaaggcgtccaacccgatacggaatccttcaacaatcaataaatccgatttaatctcagaatcagatagggagatcgtccctataaaagtgagttatatatactgcagccttatcacagacaggtgctaggcttactcgtgaactggga

SEQ ID NO: 472 - DNA, 4024 bp, Oryza sativa
ggagccgaatccacgccgtcgagctcgtactccaccgccccctcctcgccaaagtcctaagcagggggaggcgctcgaaagggtcgaaagatccgcggtttcaccgatcgcgggcgatggaggagaacggcgagatggggagcgtcgcctcctcgtctacggcgacggcagcacgccccagggtgcgctccaagctgcgggcgcgctcttacgccacccacctgtcgtccctgacccggaatctccagcccaacgatggctggacgacgtggccaaattggtcatgacggcgcggcagcgcctagatgttggtgggcggtcctccgccaccaagacctctggtgctgctaccactggctccgcgtcgtcaagacgaagggcacgacgagcggcggccgctgttcgccgttcggtagccactccctcatcgactccttcgacccgagaagatctgcgtagggagcaggacgcccgcgccagcctcgagcgccggcgtaatgaccgaagtgctgcccacgcgatggaaggcgcttcctcgtccagagtgtcacctcgacacggacgcgggaatcagccctccgtgcccccggttggtggtgttggctgtagagccttcgtggcgagtcttcggaatgtccgttggcccccaaggttccggcccaccatcgccgaaaaatatgatggcagcgtcaaccccgccgagtttctccaggtctacacgaccgggattgaggccgccgggggtgacgacagggtcatggcgaatttctttcccatggccctgaaggggcaagcacggggttggctaatgaacttgccacccgcgtctgtccactcctgggaggatttgtgccagcagttcaccatgaacttccaaggcacgtatccgcgccccggtgaggaagcggacttgcacgctgtacagcgaagggacgatgagtcgcttcgatcgtacattcagcggttttgtcaagtccgcaataccataccatgcatccctgcacacgcagtaatctacgcgttcagggggggtgtgcggcacaaccgcatgctcgaaaagatcgcctcaaaagagccccagaccaccgcagagctttttcagctcgcggaccgagtggctcgcaaggaggaggcctggacttggaacccctccggttccggagtggcagcctcggccgcccccggatccgccgctcagccaggacggcgtgacaggaggaggaagaagaggtcagtccgttccgacgacgagggtcatgtcctcgccgtcgagggcacttcacgggccacccgaaaggggaggcctgcgagcgacaaaaagaaggaggccagcgtccccagcagggagcgccctaccggcaagtggtgcaccgtccacaatacctccctccatgaccttgcggactgtcgcgcagtcaaaagcttggctgagcgaacaaggaagtgggaggaggagaggaggcaggagcgccgggaaggcaagtccccggcggttccttccggccgtcggcgaagtgaggccaagcagaaggcccccgccgaggacatcgatgatgacgatgatgacctaggtttccaagaacctggggccaccattgccactgtcgatgggggagcgtgtgctcacgtctctcgccggagcctcaaggccatgaagcgagagcttctggccgcggcccctactcatgaggcgacgcgccgggcgcggtggtcggaggttgccctcactttcgaccagaccgaccacccaccgtgcgtcgcccggggagggcagattgcgatggtggtttcccccaccatctgcaacgtgaagttggggcgtgtcctcatagatgggggagcggccctcaacatcatttcccccgcggcttttgatgccatcaaggccccggggatggtgctccagccgtcccaaccgattatcggtgtgacgccggggcacacttggccgctaggtcatatcgacctcccggtcacctttggtggacccaccaatttccgcacggagcgggtaaacttcgatgtggcggacctcagtctgccctacaacgcggtcctggggaggcccgcgttggtgaagttcatggcggctgtccactacgcctacctccagatgaagatgccgggccccggtggccccatctctgtccatggcgacctgaaagtcgcgcttgcttgcatggagcagcgcgcggaccacctcgctgctgcgtctaagcccgagggtggtgacgagaggcttggcacctccgcccccactgccccgaggcagcggattgtcacatgcgccgaggtccccgtcaaggaggtcacactgggcgacggcccgtccaagaccacgcgaatcggtggtcttttggacggcaaataggaagacgcgctcgtctccttcctgcgggcaaacgctgacgtcttcgcatggagaccggcggatatgcccggggtccccagggaggtgattgagcaccgtctcgccgtgcggccgggcgcaaggccggtccggcagaaagtgcggcgccaggccccggaacgtcaagccttcatccgcgaggaggtggcgcgacttctggaggccggattcatccgcgaggtcatccaccgggagtggctggcgaacccggtggtcgttcccaaggcgaacggcaagcttcggatgtgcatcgactacaccgaccttaacaaggcatgtcctaaggatccttatcccttgcctcgcatagatcagattgtcgactccacagcggggtgcgaccttttgtgttttctagatgcatattctggttaccatcagattcgcatggctagggaagatgaggaaaaaactgcgttcattactcccataggaacttattgttatacgacaatgccctttgggttaaagaatgcaggtcctacttttcaacgtactactcgaatttctttgggtagccaattaggacgtaatgttgaggcttatgtcgatgacttggttgtaaaaacgcgcaaccaggaaacgttgctttcagatttagcggaaacttttgagagcctctgctccgcccgtataaaattgaaccccgataagtgtgtgtttggtgtacctgcgggcaagcttctcgggttcttggtctctgcccgaggcatcgaggccaaccccgagaagatacgagctatagagcgaatgcgcccccccagtaaacttagggatgtacaatgtgtcaccggttgcatggccgccctaagtcggttcatatcgaagctgggagagaaggcgttacccttatttaagctcctcaagcgctccgggccgtttacttggacggaggaagctgaacgcgccctcactcagttgaaagcatatctcagctctcctccggttctagtcgccccggagccaaacgagcctctgctactctacctagcggcgacccccaagtagttagtgcagcgttggttgtggagcgcgatgagggcaatcctcactccacgcacccccaccctgtgctgacttggcccgggagcgagcagggaggagaggcccccgagccgaacggtggcctaaggcccctggcgaccggagtcggccctctccccgctcgtcagatggtgctgggcgcccccgaccctcaggaaggccccgaggccactgcgggaaggctgcacctatcgccctctgaccccgaggctaaccctgtaccgattcgacccgggagggagcagggagaagaggcccccgagccgaacggtggcctaaggcccctgacgaccagagttggccctttgcccgcttgtccgacgacgccaggagcccccgacacccaggacggccgcgaggccactgtgggaaggccgcccctgttgtcctccgaccccgaggtcatcagcacagaagacgagtgcgccccgaggggccacttggacgaggagcgccccgggtatatggcccatagcgagggggatcggccccaccgaaaggtgcagcggcctgtctactttgttagtgaggccctccgggacgccaagacccgataccctcaggctagaa

SEQ ID NO: 473 - DNA, 6770 bp, Oryza sativa
tacactacaaaacatctcaattacttctttaatttgaagacttcatcttgttaattggtcacatcacatcaaaagcttcgcccagctgcatgcgggagttagtgagtgctgatcgatgctcccagctagagccatgcatatgcattcagctacacatatgcatgcggacttagtgagttgctagctactgatatactcctgcatctgttaattatttatcgagagagagattgaggggggagggggggggggcggtttcgatcagaggatgaggggtggcaggctgcggatacatgtgagatacgtccggataggtatcccgtacgtatccctcttttttctctttttcagataattaaaataaacaccgatactcttccgatacggtgggatgcggacctgatacgggggagccctaaatcgcgtaggaacaaaaccgcatctctctccccctccacccgcgccgcccctcgctctcacaactcacactgcccctctctcctcactaccccaatccccatcgcagcgccgccgcctacaccgtcgctgcgttgccttgccgccgtctctgatccgtcctccgctgtccgcttcgaccggcgcccagtgccgttgtcttccttcgatcccagcctccgatgacattgaggacttgaggtaaatgaaaatcccctccaagtttgatctgcatcgtgcatagtgttccagttccctttttcttagtacaattgctgtcgtctttgatagattcaatggattttgatgcatcgagactgctagaactgtcacttgatgagcctgaccctgagagactgctagatcttggtgcattggacatataaggtgatgggccttcatccacttcggttccaatggatgaaatcaacaatcaatttatctagtcttgctatctagttattgagttgaatttgaagtcatggacaagttaattctaattagtttagcactgtggttatgttctactattggtttatctactatgtgaaaaatgttgtctaccatctatttgaagaactatgttattttcatgatttcatctactgtgtagtcttgcacttatttatgcatgcctcttcagtgaatggtgagatgctgtgaatatgtcgtactgagatatatatcatatatatgatgatcggtgcattggtggtttgatgctgttgtgctgcctaatttttcagtccatattccacacttaatttattttgtatttttaattatatatatatatatacacgcgtatccccgtatccatgttttttagaagacggtgtatcccggtatcgccgtatcgcgtatccgtatcagcctatcagggtaacgtaggtgtcaggccctccccggcaccccccgtggcttcgccactgaggccagacgatgtgagactgagcacatgttagccatttacctttccatttcttgaatcaacaagaagagcatcccgatcatctccaactactgccagaagtttcctatcagggctcacagatgtgtgctgcataggagtagtaaggaagtcaaacaaggatggctggacataaaagcgttgtgtggatattgaagagagatgacttacatttactggccagttataactgaagtggttcaagagctgaaatgtttccatgtcaaattcacgaacaccacaatcattgttggacacggtaacacgcaagcttccactacatggacaattttagggctttagatttctgtaatgataggtacatcttcagccaaagatttaagctggtatatttttaccttgcagatctgtgtatatctatcgcatttgtgatagcattgtcgcttaaagttgtccttgtgcagaacttaacatcacggtctcccacaacctgtacaaagataaaaaatattgagcacgtaaacctgatatttaaggtttgccttttctatttaaaaaaacaatattcatggttgcctcttttattaagaaaaggtaaaggatccccaaacctgtagcaagactggcaaatactgagcatgtaagcctgatgatactcatggcttgcttttttttcattaaagcaggtacttattataaagcaaaagtaggggaaacagcaccttaccttgcaaattagttctccctgaaaaccaccagcaaccaataaaccctcattcactgaaagtgtgctaacttgaaccccgctaaacccttccagtaaactgccagggtgtttctgtgtgacaacattaatttcagaataattttacataaaaaaacaagagtaattgaacttgggagaaacatcactaataaaaaaaagatctttagttcaaataaacacaagcaggaaatgaaaaagaagaaaacctgcgcaggagcaacatgcccggagaaatcaagaacctctgatagattgtgagacaatgatgaccagtggcctactgtggaatttgacatgaagtagacatcatgcttcgacgttgcccataacaaattcctaagctacagaagcagttcgtcagtactgagcagccttgggactcatatgacaagacaaattcagatagctgctataaagaagaatggacctcataataatgaagacatcaaggcaaaagtgtttaagtttgcatcattgattatatccagtcatagttcaaaattcgcttgtatgaagaactttaaacttaatttttcactggcaagattgtgtaagccatgatttcatgtgtttaacagttccatgaaaacatccaagtatttagccactacagcattccctttgaaatatcccaaaacctttttaccaacataactgaaccagaatcctgcaaaacaattgaactaattctatgctctggaacagtagttttcttgtttagaggccaatttcacaatttgttaaaggttccctttccctaatgatcatacaacattttttatctttgtagttcttattgacatggccacatacgtaagacaagtaaatgaggtgtaacaactccgatgatacacaactaatgctaacagctaagaaaaatagcttatcccgcattaatctagtggaggattgataaaaaggagtatttgtcagctaagaaagaatgcaactcacctgaaagtggaggattgatggcttcactaatctagtgttgtagtgaaattcataatacttgctgatcttatccacttgcttgcatatctgaaaaatgtaagatgcattttttttcaggaatttggaacatccatagagcaaaaaaaacaaacattgatagataaaatttcatgataatagagaccttatccatgagctctcctgattgagggaagttttcgtagtttttgtactgtaccaacctagcttttctgtaatcgctcctggttatttgtaacctctcccatggtataccttgtatatcctttcctgctcttgcttcagctgctgatgtatcagttatcctagtgagctgcacagaaaaaaaaacactttgtttcaacctatttttatttcatatgcacaagaccatttaatgaacaatcacatctgaataatcctaaagattgaagcaaactcatcatgcttctgttcggatttcacagtacagaaaagaccaaaggaaaacacaagaagtttgaacaaaacagataatctttatccttgacaagctgttgcatccgattctccagcatcctgtgatctggcaattagataggcatgttgacccacatgggcactatcagttatcacatatgccaaaagacgggcccagctgagtcggcaattaattgaataggtgaactgatctaactttgatcaacaagaacaagacatgagtcctatttcctggtagaaaaccatatttgatactcattggtcttagccaattcaaaaggcactgaaaaacaatgcatccacaacgccgggccaagatgggcatagaaaaactatgcactataccccttttatgaaaacgacctaacagagagaatggtatgccatgccattattggctgaagataagcacaacctaggtagcaatctagagctgcatgattgggcagaaaaaatctactccacaaacaccgttgacatgaagtctctagttaacgaaaagaattcagcaaccaaggactaaatgggaaaaattgtccaaatgcagatctgccctattaatcaactaaaattaattacacatacacttgtttagagtacatcactgcactaaggctccccgtgcaatcgatgtgtttttgactaagtaaattccccacttatcatatataataactgtttatagatgccaacttagccttttctactttgtcataacaaaacaatcaactgcttaattttttaacttatttcctatgtgtccttttccacacgatgcatcctagcagcagcactgcaaaacattagaaaactaaccctgtatacctatgatagcgatcagcagggacctgattcggagcagaaggctatcctgtgtccatgaacaaccctagatactaagctccgacgcttatcgcgacatgctacccaccaaacgtaacccaatctcgaaggttaaaaaaaatgaaaaaaaaaagaaggaatggaaccctcagacaaatcaaacgagaaccaagccagaacagtgacacggcggcggctcagattcgcggcacgaaaaccaccaaggcagccaccaccagcagcaaggaaggcgttaccgaccagcgcgtactcgtcgtcgccgtcgccgccgtccctcctgtcgccgtcgcgcgcctgcgactcctcgccgcccacctccacgtccatatcgccgtcttccgaagccgccccgtcagggtcatcctccgccatgtaccccgccaccgccgctccgtcccgcacggccgccgccatcgccgcctcgccccccctgcacacacgcaaaccaaaaccaaaccaaacccaactcagatcacacaaacacaaacacaacaaaccacaaccagccatcagaacccgggattactagacctctcggctgaagcagataagaagcctcaagaggtagggttccgcgagctctgctccgccccccgcgtgtcggcggctgctgctgctgccgctgccgctgccgccgctacggatcggaagaggaggagagcgaaacgtgtggatgggaggggaggcgcacgggcggcgcgttcgcctttgcttgcctttttgcgccgtgcggcgatggcgaggcgcgtaggagaaggaaggcaaagctcgatccggaaaggataataggaaggtgaggagaggaaggaggatgggatgacagtgacggtggtgcggaatgggtgattaggatgtgttcggcactctgatttcccaactctcctctttcattttgacgtgtatgttttttaaacagctaaacgatgttttttttcactaaatatttctatatgaaagttgctttaaaaaatagctaatactgattactctcttcgtcctaataaaactcaacctagaacttggatgaaattcgtgcatactagaacttgtccctagaacttggatgaaacataatctaataaaataaatctggatagagaaaattcgtgctaatagaccgtttcacttttcgtgtatactgatcatgttgggaaccggctgaaacgaaagtactccctccgtttcaaaatatttgataccgttgactttttagtacatgtttgaccattcgtcttattaaaaaatttaagtaattatttattcttttcatattatttgattcattgttaaatatactttcaagtacacatatagttttacatatttcacaattttttttaataagacgaacggtcaaatatatgctaaaaagtcaactgcgttaaacattttgaaatagaggggtagtacagtacattagataggggccaaggtaagccaccgcgtgagatgtgatggggtgaggaaggggattaggacgaaggagatggatggctgggatatatataacctgggtagtctctagaagaagtggatttttgctacgtgcacagcggttaggtttctgtgtatcggtcttatatcaaaaattacgaaaaaaaaattataaaaaataagtcacgcataaaatatttttcatattttatcatctaatatttttttattactgaaagcgcatccatctatccattcccctcatctacattacgatcatacgcgtaatgctcctttctaaagaaacagaagaaccgttttcccaataagcaacgtgccctaaagctatagattgctacctaggttgctcttttaaaattaaaaatattcatattttatcatctaataaacaaacaaaatactaatcatataaaaattttaaataaggtggacggtcaagcgtttgacaaagaaacctacttgatggaatgagtaattttcttagctgagaatatctaacgttgttttattgttcacttgatggttttattgttcttgaggtatttttatatggaatggatttgatcattatctataataaattttgagtcgtgggtttaacatcttatatataatttcaaatagtcctttggcgactgtaacagataccatatacacaaaaaaaacgtagcaaacaactaaagaagcttgtcatttcactatgtcggtgacatgggaccgggagtatcatgactcgaggcttgaggcagacacaatcgcccacgtggcctggcaccctcgggggacgtcgggcccgagggtgatgtgtgcgcccacctcttggtcttcccgagggggggggggggg

SEQ ID NO: 474 - DNA, 4351 bp, Oryza sativa
tgctcggatagcaaaatcttgctcagatcctcaagacataattcatttatgggatgccataaccataggcagttttgccagatgcagtcaaatagctccattgttaagatcgtaaaacaaactttcattgttgtgttgtgtacatacatgttgaataagtaacaatgaagctacctacaaagagcaggctaagattgatgtgtctctgctaactggagttcttacaggttgttccatctttcttggaaaattacggagaacaaatatcaccattgtctgcttagtgttctgacaggttgttccatcttgcaaactgaagttctgacattgtctgcttagtgttagtgcctatatgttatctttagatcgcccgtcttttaagtcccgtaggtactgaacacgatgatcatcaattcctttgatgagaaaccatttaatcatggtagtgcaggttaccttgtctggtttgcatcgttgtaatttcattatatcaagaacatcccacatctccgccaagcaccccaccctcccaaacgcgtccaccaaacagttgaagaacacaatatccaacgttatgtcagaattctcaacgattctcaacactgtctttattttcttaacatccccagcccttccatatgctcgaaccaacgagcagagtgtaacacagttgggctttatacgctcagatttcatcaatctaaaaatatattccatctgttcaaggtccccagcccttccaaatgcatcaataactacattgtatgtgactattgtccaagaatagtaatacttctgcatgtattccatcacagctcccatcttctcatacattttagctttaccataggaatcaagtaaaatattgtaagtcttaatgtttggggagataccggaggcctggaacttctcataacagctttccatagtttcaatttgaccactgccaccgaaagctctgagagtagaattcattgtccatacatcaggcttgcaattttcagtcagcatctccagaagagttgattccatctcagcaaaccttaatcataaagcatcattagttcaatgaaatcgcatcaggagtaactacagatttggaaagaatcagaaatgcatttcaattacggtaatattcaaattctggctgttcttgaaattaagattctctgaagttctccgcataaagttaatcgcattttcaatagttatttgtatcaaatatgagaaaggcatgttcatattttaaagcatgaattttactatcaattaccttcctgctttcccataggcatcaattaatgtgttataagtcacgacattgggacggatacccgcccgcgccatatcttccatcaaatacttgacccgctcaaaatcataggcgtgcaagcatgacttgatgagaatggagtaggtctgcacatcaggtcggcaaccaggggtggccttcatctgctcgagcaaggagaaggccctgtcgaagcggccactcctgctgtacgcggagacgagggccgtgtaggactcgaggttgggagcgcagccttcgtccaccatggcctggaacagctcgtgcgccctctccggctgcttgcacttgcccagcatggtgatcagcttgacgtatatcccgacgtacggcctgtaccacacctggtcgcgcattagatcgaacacctggtcggcaatggacacggcgaggttagcgggagacacgggtataggctatgatgggatggaggcagtggtgagggtgaggaccttgagggcggagtcccagcggagggcggtgatgcgctcgtggagggcctcgagcacggtgcgggggagcaggcggcgggtgcccttgccgggcttgcgcttgtcgaggacggccttggtggcctcgcggcggaggatgacggagagcgccttccgggacgcgatcttacggttcacttcctcctttcgccgccgctccgcctcggcctcgacctcgccgccatcctcctcgcctcgccgcctcctcctctcccccgcggcgccagccaaggaggaggaggatcccctggtgcgagccggctcgcgccccgcggcggctggcggtgggagcagcgcgtcgtggcaccggcgcgcggcggtggaggccgcgatggtggtggaggaggaggaggaggagagcgccgggaatggggaggccaccggcgcggcggccattgcggcgcggctcggagtagccggaggcgagggcgagctcgcctcgctgcagttttgcgccggagagcggcgcgatttttcgtccgcgcggggaagaagaggatgaggctgtgcttagtgacgtggcaacgagagtagtcaagcgtaacaggacagggaggggcaccaagtgaccgttggatgagatagcgacgctccagatctctcctcttatggaagacaggcaaccagccagatttaacaccacaggtttagcagatttcacggacaattttgggtagatttggatttgatttatactaagggcccatttgaattgtaggattgaaaaaacggaggaataggaaaaacacgagattttggtaggattgcaagtgtaaaacagaggattacaaaacataggaaaaatataggaatgaccgtttgattagaccgcaggaaaaatgcaggaatcacatgagagatagactcaaggaaagttttccgaggttagagtggatgttaactttcctacgtttttgctctagaattgtaggaataggaaagtttcctacgtttttccttttctcgttcctacgaatcaaagacatgaatagtgtaggatttcaattcctttgtttttcctccatttttcctccaattcaaaggaggcctaactctttgtttttcgtcgagaagtaagagcccctttgaatcaaaggaattatgaaagaatttcatagaattgaaatcctacaggaaatttttctatgtaaccctttgatttaaaggattgaagttttccaaatcctacaaaattccgatggaatggcttgttgcatattgcatataggttttgaaggaaacttagcaagaggtccaacctcttggtaaaaatcctttgagtctatctctctcatccgattcctgtgttttcctgtggtccaatcaaacgatcattcctgtgtttttcctatgttttgcaattctctgttttacaaacacattcctgtcagaatcctatgtttttcctattcctcctttttcattcctacgattcaaagtagccctaaaattatactagtagttaacactctttgttttttgtcaagaagtaaaattatactagtagttaataacattattgatccatatttttcagacacaaaatactcttattcttctcagtcctctcttctcccctcttctcaaacacacttttaacacaattaaacagcgtacaacctttttttctctcccagcagttagcatgaaaaactataatccagatgatagaacttaaccgtaattaagtaataaaatagatttaggatttactacacttattatctcaactctcaagttgtcaaaagaacagtgcaattatcacgcatcagctcgaaattttcagcatctttggcgctcagttgggtagaacactagaaccaacaaccgaagatatagattacttctgcattattgcccagagagagtattggtccatacagtctatgatttactagctaactattcacaaggcaaggatcacgctgcacgcttgagcctttgactaaacatgcacttgaacaggcagatacattccctgaacacgcacatcagaatcgccaccgagatgggtggcctatcacatacagaaacaccacttttattccctctctacatgaacgagtcgaggtatccaaaggagtggaccattctgtagtgcagcaagctggcgtacacacggtcgcacactccgacgaacagtgactcgtcgtctgggctaagcgagatgccggagatctcgccgaagaaatctatctcctgcctcttcttgtagtccgcagcggcgctgtagacgtgcacgaagtcagcgggctccgagaagagcatgaactggccatccgaggagtagcggatgcaacggatagcgccaatgttgcccctaagtactgagagggaggttgacaggtttcgtacgtcccagacgcggcaggtcttgtcttggttaccggttgcgaaggtgcggccacagggtgccatgccgaagcaaacgaatagtccagatggccaactagggtagaggttacctgaagagaaggattcagcgttcaatgtcactatccagataaacaccagaacggaacaattctcaaataaagaaaatcaatct

SEQ ID NO: 475 - DNA, 3159 bp, Oryza sativa
tattccggtgtgccccctccctctcgaatcgtcgcgacaagctccggtgaactcggccgccgtccgccgtccatctcggcctccccttcttcctcctcccgccggcccgcgtggctaccacgtaggcgccacgtcggagtcacctcggccgcgaccgggtcagcacgaccagcctgccgcctccccctccctcaaccggtgcgcgcggtccacggagagccctatggctgcgcgtgggcccgccgcatctcggtccatccggcgcaccgcccgtgcgccatcttcaccaaaccctagcgccgcccccgcgtgaacccattcctccatgaacccagccgccgacaggtgggcccgtcccgggacccgcatggtggaccgcggtccacccggtcggtctcctccccctcccacgccccattgggccgccctcctcgcggccgtgccggcccattaggctcgcccgagctgcacaagtccctcgggccgcgccaatgccacccgagacaagtctgattgacatccctccatccttttctttttccagggatttaataaatcctttttcccttgtcccataaatcaattccttattccaaaattccataaaccatttcctttggtcccgcatgacagtgactgttaataatattcttgggaatattatttctacaaaccccataaaccatttctcgtattccagaaaattccgataaatcatttccttgaccagaaaatccaaattaaacttccaaaattcatatcttcccaaccgctcttccgtttgactccgttcaacttccagtaattccgtaaaatcgagatctatttaatggcactaataattagtctaaataggatctttcttttggtcttttgtttaggttttcaattgtttgcgtatagttgcggttatcggattttcgtcgatcgcgggttttctcgaagattcgtgaagcttcgtgaagaccttgagcaaggcaagtcaccctttgatcaattgctcctataattgaaaagtcattattattttgtttgcaacttgcattattagaatcacacacttaacttgcttggcctcggtttgcatgccaaatcgacggacctacccagtagtcgcactaatttccgtaggtcatactaccctgattccttgtcgctccacccttgtggtacctcggtattcgtgctctctgagcgcgtatacaaatatcccacatacaccgttgcttgtcgaaaacttgggaaatgggtttgtgaagccttcaaaacccgacatgtggtgtcggtgtgtttgaaaataaaatgaattgtgaaaactcgcgatgcgggggttgtgcctatgtggtactgtcccgtattcgcatataaggaccgattcctgtgggaaactcatcgaacataatcaaagtgcaaccacaaggtggaatgggacaccctggttaagtaactagacggttcagggaaacctcgcatgccaatagttgggaacgccggggcggggtcggacaaaccgggttcctggtaaggcaaggacgagaagcttgctcacttaccgatcaaggtggttggaatttgatttgtgcacgcctaaaatggcctatgtttatgtgaggatttgatccttccatgtggcatgaggtaaccctgggtcggctggggaaaggctttgttgcgaacctccgataccgacgggtgttcggaataagttcgtatcttgtgggtaaagtgtacccctctgcagaggttaactaactgttcgaacagccgtgcccacggtcatgggcggatgtgaggtggttcccgttgcgtagatttgtttgcctgtgctttgtgaaaagttgttgtggtgtgggaatcgtaaccagaatcagcctatgtggcagatggatgacctgagtggtcagaaacgaatctgtgtgattcgggatgtctgcgggcatcatagactaggcttcccgagtggaagcggattgttgtgctgctgggcagctggactctgggagtccgagaaaatgaaaaaggctctgggagccgattaatcaagtggaatggctctgggagccgagaagtaatgatctgacccgggaggtcggtacattactaaatgagttgttgaaaaacatctcttaaagtcgaatcgagacgcaagcctcttttcggcccaaacatagaaagaaataaatcacttagtgatttcaaaatgatttcaaacaaaagatttgcaaaacaaccttgcctctcttccaagctagcattaaacacctaaattcccgtgacttgctgagtacgaaagtactcacccttgctctatataaatatatataaatagttcctccgccctgaagagaagataaagtgaagtgaagattagggtttcgtcctggttcccagccgtcgcctgtggtgttgggtgttagaccgttggtttccgctgctgctgctgctgttggtgtttcctcgtccgcgtcgtcggttgtattctcgggctgtctgagctgcaacctaagttaaggtaaataagtcctctatttattttaaggattgctatgattcatatttgtcaccgtgggtaccagcactatgtcctgggactggtaccgagatcgcggtttcgtaggaagcggttcgcgccgttttccctacgacacgctcctgtcaggtgccgttgtacggcggtatcagattggggtatgacatcaagtcacagtctcacagatttacaatcagttcaaatcaattcatcaaatgcatacatcaagtcatctactattttccatcaagtccatcttagaattacaaacctcagaaagttagaatataaaaggggtttatataagctgtgattgtgcaatggctgcctcattaaaaacctttctaggtaaaaactcacacctcgtgagaaaaccctagaaaggaaaagagtacagcccatagctaaaatgttcatatcaattacaatcatccagttcaagggtttacatcaatttcatcatcaagatacatattctcataagcattttgaagctccacattctcagtagtatgctggcgttttgcatctgctagctcccagtccttgatcacggccagaatttcccccagcgtagggtttagacgcagcggacggtcctcgatgatcatgccagttaagctaaaagt

SEQ ID NO: 476 - DNA, 524 bp, Oryza sativa
tcaaatggacgttaagacagcttttcttaatggagagttggatgaggagatctatatggatcaacctgatgggtttgtagttgaaggtcaagaaggcaaagtgtgcaaattgttgaagtctttgtatggtctgaaacaggctcctaagcaatggcatgagaaatttgacaaaacattgacatctacaggctttgcagtcaatgaggcagataaatgtgtgtactatcgccatggtgggggagagggagttattctgtgcttgtatgttgatgacatactgatatttgggacaaaccttgaggtgataaatgaggttaaatcattcttgtctcaaaattttgatatgaaggatttgggagtagctgatgttatcttaaacattaagctaattagaggtgagaatgggattacactgttgtagttctattatgtggagaagatcttgaatcgctttggctacattgatagtaagccttctccaacaccttatgatcctagcttgttgcttcgcaagaacaagagaa

SEQ ID NO: 477 - DNA, 577 bp, Oryza sativa
gtaaaatatcgagttcgcacattttgttgtctgattattgatttttggcgaaaccatttgatcatatgacaagatgtgtatctaccttaacttaatgattttgataaaaatcattaggggattcatcagagcaaagcatgtaagtatgtcacatactcatccactagcaattattactattctagagtatctggaaacttatgtgcaagtatgacatatcatctagagtataatgttttagagctcaacatataatgatatcaaattatcttccttatatcatttctataatatttagggcctctttgactcgcaggattgaaaaaaacagagggatcagaaaaacacgggattctaataggaatataattcaagtataaaacagaggattgcaaaacgttgaaaaaacacaggaatgagtgttcgattggactgtaagaaaaacgaatttcataggatttggaaaaccgcaatcctttgaataaaatggtcacatagaaaaaattcctataggatttgaattatacgaaattccttcttaattaaaatcttttgattcaaaggacccttaacatat

SEQ ID NO: 478 - DNA, 542 bp, Oryza sativa
atgagcagaattagctctgaaaaagttttgcaaattgcaaacacaccatggaaatcagcatcaggaagccccggggcttctcctcggccacggcagccggccgtccaccgccggcgagtcgtcggaggcgagcaccggcagcttccccttgccttgccgcggccactgccaaatcttggacaccgagaagctgtcgcccttgctgccggcgccgatcttcttcccgtcggcggcggcggcggcgtcgttgccggccgggttggcgccggcgagccctctcagcctcgccctgccattgccgtcgccgtgcctccggtgtacggacacctgcaagctcgcctcggcgaggacgtactggtaggagcccatggagaagcaccgcctggcgtccaagctgctgctgctcgactcgccttcctctcgcgtgataatgccaccgccgacgccgacgccggcggcggcggcggcggcgtcttcccggtcgtggacggggccgaccgccctggagaggttcttgaacttgccgaggcggacggggaaca

SEQ ID NO: 479 - DNA, 540 bp, Oryza sativa
gggtagaaattaatgtgtgcgattcatttgccactctctggaaggagcaactggttttagcatgggtaccctgctcatctcaaagatcagggaggagtacccagacaggatgatgctgacattctctgagaagttttcccctcaccagaggtttctgatacactatggtggagcagcacactatctgtccatcagcttgttgagacttgagaacgctattgagtgcatggtcataatgagtatgtctggcacttgcattcagctacactgacgatactgctgaataaatgatctatctatacgtttgtctgtaaaatacatgtatggtctacagtacgtgttgatatggatacggtgttcttcatgaatcatgctgttctacctcgtttcatgtatgtgtttctatatgcatgattctgactctactttgtttctttccttctgcagttggtgatctgaaccatcttatttctgcaaccatgagtggtgtcacctgctgccagctcttcccggccggaacagcttaactctggcctccgg

SEQ ID NO: 480 - DNA, 591 bp, Oryza sativa
actgcttgttggttcctccccatcaaaatgcttggctcacttatgtcttactcaccttcagtggtatgttttagattcatatgcagtgatatatagttaaatctcttatgtagaacaagtatccaggtggaggtattattagtcatgtaaagataatcaaagagctgcgacttttcctttgtgcttagctgtgtcattcgctgatattcttatacttgagttttacttttttggtttaggattcaaagacggagaacactgatgagttaattgcgactggtgttcttgctagtctgcagaatttcatccgcaaatgcattgtagctgtcctctcgtatggcccaatgcctaagcatattgcatttattatggatggtaaccgtagatatgctaaattcaggagtatccaggaaggctctggtcacagggtgggcttctctgctctcattgccagcctgctctactgctatgaaatgggcgtgaagtatatcacggtgtatgcatttagcatcgataattataagcgagattcgactgaggggaaatccttgatggagttaatggaagaaaagatcaatgaactgctagaaa

SEQ ID NO: 481 - DNA, 877 bp, Oryza sativa
  unsure (1)..(877): unsure at all n locations
tggcctattatgccgccgttgttgggcgtctgcgtttttccccgccgggcttgctttcgcccccgccgtctggtgtttccgcctgccggcctggcctattatccccccgttgtggggcgtctaggtcttcaccgaccgggtttgctttggcttgcctttccgctgcggctggtgtttccgcctgcacggctggcctattatgccgccgttgttgggcgtctacgtcttcactgaccggcttgccttcgccgccgccgactggtgtttccgcctgcacggctggcctattatgccgccgttgttgggcgtctacgtcttcaccgaccggcttgcctttgccgccgccgactggtgtttccgcctgcacggctggcctttatgccgccgttgttgggcgtctacgtcttcaccgaccggcttgccttcgccgctgccgactggtgtttccgcctgcacggctggcctttatgccgccgttgttgggcgtctacgtcttcaccgaccggcttgccttctccgccgccgactggtgtttccgcctgcacggctggcctttatgccgccgttgttgggcgtctacgtcttcaccgaccggcttgcctttgccgccgccgactggtgtttccgcctgcacggctggcctttatgccgccgttgttgggcgtctacgtcttcaccgaccggcttgccttcgtcgccgccgactggtgtcctcgcctgcacggctggcctttatgccgccggttgttgggcgcctacgtctttcaccgaccggccttgcctttgtcgttcgccgaccacttgtccttcgcctgcacggctggcctttatgccgccgttgntgggcgtttacgtcttcaccgaccggcttgccttc

SEQ ID NO: 482 - DNA, 598 bp, Oryza sativa
gagcaagcaaacgcgagtagcaaatcaagaaccccgaggaggagcaagcggagcgcacagagaatgagagagagagagatccacacctgcgtggctcaggaggcggcggcggctggtgtggtgagtagcagcggtagaggtaggagatcggggtggcgctgtttctttcttccccctttatagccgccgctccgcactcacgcagccaaacaccccagtccacccccagcgagcgcgacggaagaggaggactcggaggaggggggaaagggaaagaccgcgacgcgccgcgccacgaccacgaggcgcctcgcctcgcatccccgtcgcgaagattctctttgtttgggtcttgacgtctcctttttttatgtcgacttgtgtgcctcctggtggctgctggcggtggtggtgctcgccccgcgggcgcgccaccggcacttccttggctcgcgcccgcgcccgggcgcgcgccagtgaaaagtactagtaaaaaatactagtggcgaaaccggcggttgtgcggaaagccccccgcgggtgtggaacaagatgggtgggtgcgttttcgtgacggcggcgccaagcttggttcgtt

SEQ ID NO: 483 - DNA, 661 bp, Oryza sativa
attttgaatccaaatgggcaaagagatatacatgaatcaatttgtcaaagtacgttaggattattacaaccacaaatgggattattgagggaacaacttgaattatatgcaaagcaaatggctgtagaagctgaatcgcaatttgaaagttttgaagctaatattcaaacacaaataaacgatttattagcatttgatttagatacaacacttatcaatcaattgaaagataaacatcaacaactgaaaactattttatattaagaaagaaggaacgttttaaatgccaaataaaatattacttgtagatggtatggcgctattatttagacatttctatgctacaagtcttcataaacaatttatgtacaattcacaaggtgtacctacaaatggaatacaaggatttgtgcgtcatatctttacggcaatacatgaaatacgccctacacatgtagctgtatgttgggatatgggacaatcaacttttagaaatgatatgtttgatggttataagcaaaatcgttctgcaccaccagaagaattgataccacaatttgattatgttaaagaaatttcagagcaatttggctttgtaaatattggcgttaaaaactatgaagcggatgatgttataggtacatgtgcacaacgtaagggc

SEQ ID NO: 484 - DNA, 4111 bp, Oryza sativa
aaggggttatgaacagtatactctccccattactccgcaaatgtgtgttggtgtttgtcaacgatattcttatatacagtaagaccctacaggagcatgtgcagcaccttcagcaggtttttcacattttgtcaaagcatcagttacaagttaagcgcagtaaatgttcctttgctcaacagcgtttggcttatcttggacatattatcacccccaacggagtttccactgatgatgacaagattaaagtggtgcagtagtggccgacccctcaatctgtcaaagaactgcgcagtttctttggcttggctggctattaccgcaagttcgtccgacactatggtatcatcagtaagcccctcactaacttgttgcgcaaaggtcagttatatttgtggaattctgacaccgagcaagcatttcaaactctgaaacatgctcttgtcactgccccggtgttggctatgccaaattttgatgaaacatttgtggtcgaaactgatgcttccgacaaaggcattggggctgttctaattcaaaaaggtcacccgattgccttcttaagcagagctttgggtcctcgtcatcagggtctgtccacgtatgacaaggagagcttggctattatgttagcagttgaacattggcgaccttatttacaacatgctgagttcctcattcgaacagaccatcgcagcttgtccttcttggatgatcaacgtctcactactccgtggcagcacaaggctttgactaagttgcttgggctgcggtataaaatcatctataagaagggttgtgacaatggtgtagcggatgccctttctcgtcaccctttacctgattctttggaactctcggccctgtcagtggttattcccgattggattcaagaagtggttgctggttatgcttctgacccggatgcttgcagtaaagttcaaacattgtgtatcagtgtaggagctgttcctaatttcactttgaaagatggtgtgttgtattttaaagatcgcatgtggattggtcataacaaggctgttcagcagaaaatcattgctaatttgcataccgcagctattgggggccattcgggtataaatgtcacttatcaacagattaagcaattgtttgcttggcctcaattacgagctacagtcacagaatttgtgtcggcctgttcagtttgtcaacaagccaaatctgaacatgtgaagtaccctggtctgttgcaaactctaccagttcctgagcactcttggcaaatggtttcattggattttatcgaaggattgcctcgatcagcttcctttaattgcatattggtggtagtggataaattctccaaatatgcccactttgctcccaccatttttccgtgcggtctgacttacggaccgcatggaaacaaaatggagcggcgtccagaaaaatcaatcctgtaatagtgttattgacatgtggatcccactgttttattttactatgtgccatatggaacgaggaaccagtcaaactagacaacgtcacagccgaaaccgctattcaaaccgtcttgggactaattttgtatcggttttaggagttgaacaatacattatatctagtattggttcggggataatttcacattgtaggcggctcctgaataaaattcgactggctttgagtgaagaatatcttttcttaaagggctagaattaattacaaatgttgaacccaatcattggttgtcgttatttttatcacatgttgcaactcacggacaatttgtaattagtctcacaaaatattggacaaaatttggttaatataaatgtgttgaaatagaatcaggtctaaacacagcctaactctacaattaggaatggcaatggggaccggaaccagatctaaacacagcctaactctacaattaggaatgacaatggggacccgaacccagatctccgttgggtaaaacatccattagaggccacagttattaaaaccagaccggaccggtggttgtgttagttgtaactcacgagactaagtactccctccatttctaaatatatttgataccgttgactttttagcacatattagactgttcgtcttattcgaaaacttttgtgaaatatatatgtaaaactatatgtctacataaaaatatatttaacaatgaatcaaatgataggaaaagaatcaataattacttaaatttttttaataagatgaacgatcaaatatatttaaaaaagttaacggcgtcaaatatttagaaacgaagggagtatataagatttgctctggtctggtctagtaaaagttcatatcttgtggagatcaatagtttcaaactttggagcaaaactttaaaaaaatcagttcagcacttgagcatgatctggagttgtgtcctcgtcgacgccgataccttcctcaccggcggtgccactgccatcgacggaacgtggcggatgccagcaccgccaccgccatctgtgctcgcttaattcgtctcgtttccgtgcacagcagcacaggcaataagatggccaaaacgagcagccggagagcgcgcgcggcgagttcgccgccaacccgccgacggccttgccgccacggcggcgcgaggacatcaccgcgcgcggcttcctcctcacgccgaagtgtccctgtgcaccatgagcgcgtctcagtccgtgcacgcggcgtgggcgaggcggcgtacgtgcacatacatcgggcgcgaacggctgtagtccaatttttcgagaggcgagaatccgatttgatgacatgacgtacttacggatgttagattcgggattatcaaaaaacaaaaagtactaaaaaaagaatatgttagattcggacaaggatcatcctttcctataaaagtcttgcttgttttagttacagggaattcgcttgctatcgatggcttgtgcgagcgcgggaaaacgtgatatgatgaatcagccgggacatggtggtgatgtgcccgtggccaagcggcggcggtgcgtcgaacccaccggcgccgccgcggccggcatcccggaagacattgtggaggaaatcctcctccgcctccctgtcaagtccatcctgcggttcagatccgtgtgcaagtcgtggcgcgccatggtcgccgacccgcgcttcgtgcgcctccagctacaccactccaccacggcggcgcgccattacccaccgtccatgctcatcctggcagactggtgtttgccagagcaacggaggggagcgatcgacttctttagctatccgggccatggcgtcgccgcggactccgcgcttgggatgacatggtcctcgaagtcgaccgtcgccgccgccgcagacgggtacgctgggctgatggggacgccgtggacgtcgggaacgccgacgacaacttggacgccgccgtcgacgacgggaacgccgccgcggactgggacgacgacgacgactgggacatcgacgttggcgccatcggctgggccttgcatctgcactgcaacgggctcgtgtatagttggccatatgggccgcccggcacggtacggcccaggcacggccgggcctgggccgaggtcagttgggccggcacggcttgacgaacaagccgtgccgtgccgtaccagcccacgggctacaaccacggcctaggcacggcccaagtagcctcgggccgtgccgggctggcccgacggcccggctagcccattgtgcccgtgccggcctaggcacgccctggcaaaaaaaccccttcaaaggttcaattcaacacaacaaattgacataacacatcaaattcatgaaattcacatgtaattcatcaaataagtcaaagaatcacaaacaattcatcaagtcaccagttcatcaaatcatgcatacatcacgtcacagatttacaagcacagatttacaaacaaatgaacaattcttcaagtcaccaattcatcaagtgtaacgctccgcttttcgtgaggcgttaaaaactaattcggcaaaaatcctaattgcgaaaatttcgttctttgagtgttgagtctaagttgtgccaaggatctcaatttaatcccgttattccctctcatcgagggcgcaggaa

SEQ ID NO: 485 - DNA, 696 bp, Oryza sativa
gccctccaatgacagaatagtactcttcctctttctgccattagctatgccatgaaagaaagcagtgttggcatcaccttctagaagccatttctcaccacttcttccttgccagtagatttcttcctctaaatagatcttactcaattcatcttctaattgatatctttgagcccactcatctgaattcagttgtctcatatcagcttcagtatcaattttctgtatctgactcaaaagcttctcttttgttctccttagattgcttatgttattcatgctccatcctctcattttcctccttagaacagtcccctgacacttccaatgatccaaaatcttgtcttttcttctttcaggcccgtgtttgattacccattccttaaagccatcctgggtcaaccaagctcggtcaaacctaaaaaccctctgtgtttgtatatgtccttgtctctccaataagaccatgattgggttatgatctgagcccactctagttaaagttttaaccacagcatatgggaacaaagaatcccaattaggagacaccaggaccctatctaagacctcacagatgggattcacctgtttatttgtccacgtaaacttgcatcccactctatgtaactctctcaactctgcatctgcaatgaacctattgaattttccatccatctcctgttaacatgaccatta

SEQ ID NO: 486 - DNA, 512 bp, Oryza sativa
ctggtttcctctaaagtattaaactttttgaagatgtcctctcctgtccagtaacttgttagctcatttttacttattttgtgtcctccaggaaacaagctacacaacaagaacaaagattttttctcatccccttcaagatggttgtaactggattccaagggcatgtatatcttttgcaacacttcggccttctcaagagggtaggaactctcaagctctgacaatgcacactcccagtacctcttgtcctttccacacaggactgtcccgattacatctagtgcaagaggtaaacggccacatcttttcgctatttttccttccacggtttctgttccagatatgtcaggaactcctgctttgaatttgcaaagttcccatgattctttctcagttaagaagttcaccgaaatctctacttgtgcttccatgtactagcaaacttcgattttttgtgtagtgacaattactttgcattcctcgactggtatgcccatcttccagaggtc

SEQ ID NO: 487 - DNA, 564 bp, Oryza sativa
tcttgtgtaggagacataccacatcgtttcatcgtatccatcatctgaattagccttcacttgctggatatggctgatcttgttccactcaggacctgtatctcccatggctatggaactaagaagctcaaagctgcagtccacgaacaaattcctcatgcttacttgctgcaaataaccagggagtgtttcaatactatagtccttaagtgtgaggattctgagttctggcacattctccaatacttccattttggggcagaacataatgtcaagcttccgcaatttgggaaaattagatatcctctgcagatcagggttgtcatccacactgagctcaacaacacaagcgaagttatcaagagacttgaggttctggacctcacatatccatagtttcttcagagcccttgcatggaaggcaaggccaggaggaaggcacctcaatttgcaacgctcaagtaaaaagctcctccaagacaagcattgcttgcacttgttcctcccacttccacttcttccattccaccatccccacgaagaatagcacttgcaatcttggaa

SEQ ID NO: 488 - DNA, 649 bp, Oryza sativa
gcactgagagatcccctcataatttccccaaaacgtaaccatgtgtgaatagattttgagtaagcagggttgcagccacgagtgagtcttcccttgttattgtgtagccagaatgccgcaaaacttccatgcctaagcgaactgttgagagtacgtttcgatttctgactgtgttagcctggaagtgcttgtcccaaccttgtttctgagcatgaacgcccgcaagccaacatgttagttgaagcatcagggcgattagcagcatgatatcaaaacgctctgagctgctcgttcggctatggcgtaggcctagtccgtaggcaggacttttcaagtctcggaaggtttcttcaatctgcattcgcttcgaatagatattaacaagttgtttgggtgttcgaatttcaacaggtaagttagttgctagaatccatggctcctttgccgacgctgagtagattttaggtgacgggtggtgacaatgagtccgtgtcgagcgctgattttttcggcctttagagcgagatttatacaatagaatttggcatgagattggattgtttttagtcagcctcttatagcctaaagtctttgagtgatagatgacatatcatgtaagttgctgataggtttccagttttccgctcct

SEQ ID NO: 489 - DNA, 1428 bp, Oryza sativa
ttcctgcaccctctcagaactcaaatccccaccctcgaactcaaaattttccaaggaattcataggaactgcatgagtttcgaacgtacccttgcccggagttgggatcagggtggtgaccacccccgatgccctcctccggaaattttgtggaatgccgtggccactggtccatttgccatcgccctccgctgcggtggggtgagcagcaagcggcggtgtgggcagcaacggcgccttcctttcctcgtccgtcaacggaactcgaggggaagacgtcgtcggagaggcttgtttcgtcttgccgacgaggtccagctgctggcggagatctcccacctcctcccgcagttcctggattgccgactccacttggggtttccatccgccgaaccccgcgtccagcttgttcacgatcgcttgcgtctccgtttgcttgttgttcaacgccaccagcgactcatggatgtcgccgaggattttgccgaaatcgaggttctgcttttccattgcctcaacctgtgactgcaaacgagatgtataccttggcttctccaggatcgatgctctgataccaaatttttcgggagaatagctactgtagttcctaatgtttcactctagggtcagtttagtccccgaatctttcaaatggtccaaagaaacccttaaattttgtcatatggctcagaaatagttattggatcaaccgaaatcgccatatatacatgccatgtcattattcatgtaaaatccatgatgaattgttcaatttatccttaagtatgtcatagaaaaataaatgtaagtgtgaattagtcataatcataggaaaaaaataatttccctttttttcacccttctgacatatatttttgctcttatatataccatatttttttaaaaaaaaattgcctattgttttttattttactatgatatatgtaagcgaaaattgcacaaatcattatgattttttcatttttgcataggagggtgattttgcataggagacgtacgaagcgcgtgttggcgaccatggcacgccacgacttgcacaaggacctgaacctcaggatggacttgactggaggtggacaaggatctgcgagccaagaccggcgcggacgacataggatgccggagatcggtggagtcgccgagaaggtcctggtcgattccgcttcactactccatccatcccatcgccacctagttagcagcagatcgaccgttccccgccgctgctgcgaccggccgcttcaccgcgttggcatctaccttggcgaccccatctcgctgccacagcggagaagagaacgagaagaagcatcgaaaaagaaaaagagaatgaaagaaaagaaaaggaaggtgggacattacgtatattttttattttaaattggatacttattgacatatggatct

SEQ ID NO: 490 - DNA, 1012 bp, Oryza sativa
attcctggttcttctctcacttgtttccaagatacggatcggtttctccacataggtcaaatcctcttggacttctatctgctcaatattagcttcttcggtaggtacccttaaacactttttcaattgcgacacatggaacacattatgtactcctgccaaagattgaggtaactccaactgataagcgacctctcctcttctactgacaatcttataaggtcccacaaaacgcggtgccaattttcccttggtatgaaaacgatgaactcctcgtaaaggcgtgacacgaagatacacataatctccctcttcaaaactcaaatctctgcggcgattgtcggcataactcttatgacgagactgagccacacgcaatctttcttgaatgatctttaccttttcttccgcttcccttaggatatccgtcccgaaaacctgacgttctcccgtttgatcccacaaaagcggagtgcggcacttccgaccatacagtgcttcgtaaggagccatctgaagactagcttgataactgttgttgtacgaaaattctgcataaggtagattcttatcccaacttccaccgaaatctagagcacaagctctcaacatgtcttccaaaatttgattcaccctttcggtttgtccgtctgtctgcggatgataagcagtactaaagttcagcttagaacccatctcttcctgaagtttcttccaaaagtttgaagtaaactgactgcctcgatcagacactattttcttagggacgccatgcaaacacacaatccttgccatatacaattctgctaagcgacttccggaataagttgtctttaccggaataaaatgagccactttggtaagtctgtcgactatcacccaaatagagtcatggcctgatgatgttctgggtaaaccagtaataaaatccataccaatttcttcccatttccattcaggaatcttcaaaggttgcaacaaaccggcgggtttctgatgttctgccttgact

SEQ ID NO: 491 - DNA, 11883 bp, Oryza sativa
  unsure (1)..(11883): unsure at all n locations
tcctgcagcccgaatagtgttttgtttttaattcgcagacacatttgtgcgagataatttagaaacagttccaaatcgttttgcatagactgcccttttagggagaggactatgacacgaacgcccaattttattcaaatcattgaacggcaaataaatgtttcacatgtttgagcaatcgatgaaaaatgtttcaataaaaactgtttcctgtcttcctgatgtttcattactcagtcaataaatgttttatcacttaatccaaagatgttccaatcatatatacaacatccgaaaatgctgactgcaatagacaaaatctataagtgcaacatccgaagaaaaccgactgcaatataaaaaacaaatggtgcaacattcaaaagagagaaattgcaacatccaattcattgtctacattcatggtttgcaacatctttgctagctcttcaccagcctcactttcacctgtgctggctcctacctatccaccacctcaaacagcagtgagcaacaccaagaaggagacggtgactgcaggaaaccctaacctgaagcaatctcccaatcttcgtccccctctccagtctccatggcggccctcccctagatccgatactctaaagttgtgggtggctagatctgctcggaggagatcccgtgaagattagggagaagaggtacgagaggagagggaacgattagagaggagaacaatgagggaaatgccctagatggcggtgacagggatagaataaagagaactgagcgagaggggaaggaagcgggcaagatgggtgcggctacaagcataagatggattctgtcacatcggatggtcgatctgaagccccccccccaacacacaccccccccccggcccctagtggtgtctgtacaaagaaatcttcttttacacatatttatcacatttgtggctttgtgggtgtggtcttcccttgtgctgttgatggtatctatagatttgaaatgaggtttcgcccacaataagatccaatcatagtgtttcatgtacatcgaagcaacttatttgtagtagtaagtagtaactcatgtgcatagcttctcaaaatttaggatcattaaaaataggctttcgtgcatttaagcacaatacatcacagtagtcttttatttatatataatcatatataaaccacatacatatgtagcgaatgtagcacaacacataaatgtatacagcatgagagaaacataacggggcactagtgaggtaaacttttgggcctaggccacatacacatgcacactatatatgtataggtatatagagtgattgaaagaaatgtcacccttaggacttaggtcttgtgcgattcatccccaaaagagagattggaggggaggtgtagaattaatctcctacaaatctccttcaacctcttgtgtgagggattatacaaacaagactttaggggtgaatttatcatgagcactgatccaacatatatccaattggatatattcatatgtagatgacatatatcatatgtggacataaactccgatagagtccacaagtgcgcccgagcgaccaaagaaaccaaccacactgccgctctgcagcgggaggctaaaagcagttccaccaccttgtccaaaattataagtggtgacattggtgacaanntttgaagggttttttttgggttttcccaccgaaaccgttttttttggnggnttaaaanaaattggtttttttccggagattcccttcacgaattcctgagatccaagtgtaatctatatgcaaggatgtgcgaaatatcatcattaattgatttaattccaccagtgaatgaacttgaataatactcctttattttctttatatatgatgctagttagttttaacactaagcaatgtcatatataaaaagaaagataggaacatgtaataacggcagcaatcataatattcacgaagaatattaatgggcagcaatcataatattcagttttacctgtgctagctagctaactactggcactacgtgttgtttaaggtcaatatatatgacatgcatctacacgtatactccctccaattttataattcttaatattttgaacaaagttgagtcaaacttttataactttaattatcaatgacattaaaaatatttagtttaatttgaagtcgcttgaacaacatatatagaaactagtcctaaaaattactataaacaaaagtaaataatttatttattatatatattataacagaaaattatagttaaaaatattttttggagaccatatcgttgtttaaaacgtcaagaattatataactaggagagtagctagctacggggtttacatttttttctcaacaatgtaaattaactgctaccttcgtccctgaaagactatttttaagtataaatccaaattcacgattgaaaacagagccttttgtgaaactaaaaacacaatattttatatgtaccgtagttggatttccaccaccaccaccccaaggacctgcaagatgttcattcccgtccgtgccaacgtatgtaaaggcaatagcatcaatggctgctccactacggatcgtcacgttcttcaggctatttgggggtacagatatgtctacagaacctcctccatttccaccccatggaccaatcttaacaagctttgtgctctgcaaacaaacacatcacatatcaaacataaaattaattgaattatatcatatatataatactacagcgaacatttttgcaggcaaatcataacggatgcaattaaaacatgggcatgcgtttcggaaaaaaaaagtgtattgaagcaaacgagatgaggactacttaataattaactaaccattttaatttgtagccttaatttctgccctatatatctgtgattacttgtagggagctatagttctttgcgtggataggccagccagggaatgccgatcctatttatagtgctggatttgtttaacaaagcaaaatttgtttatcaacttggtttgtaaattctactataagcaacgttttcttttataagcaacttgctttgtttgcttcatgatgggtgaggaaatgttcatcctaagaaaatgttgctttataagattaaattctttcttagaagcaaaatttgctcacccgttattagaagcaaacatttgtctcgcccacgacttttttagtgttgtgatacaatataatgtgaccttacttgtcgtcctctgtggctagcttaatttgttcataaaagctgcaacacgtccatatattatacaaagattctgctacattttggactaatgtctgctcttgaatatgtttgatgagattattcacaagagcgtgtcacactctatcaagttgtcttttttatataggtatgaaattgtcatttgtgaaatatcccattggtcctcccaccaacaattgtaaaattgaaaaaaaaaactaaatgtactctcatccactatgcgtacctaaacaatagaaaaacaaaattagagttcatgtaaaatgccaaagttttcctgataattaacaagtttccaaccctcatttattttcgaataaatttaactttgggtcaccttttattgccggtgtttcattttggaccactattcaactaatgtttcactttggactagataattttaccttatgatactttggaccaacctcaacttttttatccatctacatccaatttatcataagtcaaaaaaaaggtctacttatagctgagtaagtttactgacgaataggagccatcatactcgaggttgttcatatgcttgatgagtgagttgggggtggtccaaagtgaaacaaaggcaaaattaccagcccaaagtaaaaaaaaaaataagaggtgaactaaagtgaaacattaataataaaagatggtcaaaaatgaaatttactcatagtttttccttggataaaagcatctccaaccgaatgatcaaattaaactctccaaatacttatatagccggttctccaactgatttaaagagtcaaactcgttacttactccaatagtctattcatctacactattttaagtctatgacaatgagacccacatgtcagcctcttctttttcctcctcctccttctcttcttcatctttctccagcatccatcgccgagctcctcttgagcaacggcgatggcggaaccgtgcgcacgcgaggcgacgatgagaggggagaagccggcagcggcaatccgtgcacacacgagtcgacgacgatggtgtgtggcatcttggcccaattaggatatggtttgtgtggcccatgagagttttgtgcatacctccttgttagtttagcaagagtggaaccaacttataagggtttatcctttcaaccatgtcactcccgaattaactcttttacacaaagcgaggacgaaagtgtaagtggagtgatatgtgtaagtggagagctatttaaccattctcttcgagatctctaaggacgacttgctagtagcagctaagataggagtactagcaaataaaacgacaaaaaaagggcttaggccaatagcccagcccatggctcgtggcgtgtccgataaacgagaccatgaagaacgtcgcgggcaccgtcacggctgccggccactggcgccatgccgccatccagcatccatatctttcctctctagaaataaagccatagagttattctagtgtaccgtgttgtgattgggcaggcgcgattaagcttcatggaccaacacggtttggattgggaagcgaaccatccaattttgattggttcttctagcccactcactgtaatgggatgggtatttggccttggaataagttcactttgggtccctctatttgtcgctcagtccgattttcgtcccttggtcgcaaaaccggttacgacgggtcccccaactttcgaaaccgtttaaatgaggtccctcggcagtattgcatctagtttttgctaaggtggcacctacgtggcttcttttgactagttctttgttcaacgtgtcaatgacgtggcaattagatccgcaaaaaataatagtacacgtgggacccacatgttagtcgcacacaactaataaaaaatggtgggcccatgaggacccacacgtcatcctctctatccctcttctatcgctctcttgccggcggaacgggatgggtggcggccggagcgggcgatggcggggcggagcggcggcggaggcagagcggggcggagccgaggggcgaagcggggtggagcgggggcgagcggatgtcgtcgagccgtcgccatctcgccgcggcggacgccgtgaacgatgacgtgctcgcgcgggtggtcttcaactcgggggtgtccgacccggggaagggaggaggggggggggctcctggcgccgtggttggaggacgccgaccgcacccaacgacgacgagcgtgcggagaaggattaggcggcggaggctgtggttttcatcaacggggaggacgacgaggcgacgatctgtccgggttcaggggcctggttcttgatctctcttataggtgacctcaacgacctcaacttgatccgacgatatcatccaaagttgcaaactattttgtttatgatagaccaaaatttgcagtgatcgtgttagaaagagatgaaaacaatttgaaggaattttgcatttttacctcgaaatataaccaggcctgtgaacgttgtctgctggaagcgcgcaatttgtttggaattcatggcgaaggttagattctctgcttccaaaatcatttttaacttcaccatcagttattcaaagttcattatttgatccaaaaacatgcaacagcagcgctcagaggggcagagcagacggcggcgatggcgggagcttggcgcttcgacggcgtcggttcttaaccccgtagccaacaacggcgaggagcacgacggcggtttggaagacgtagtgacgacgacgacgccgtcaccagcagtagcctccgccgccgcccacggccgtgctgccccgcgtccccctcgaggaggggaccgacctcgccgctgtcgtcacgcacgagggctccggctactacgtcctcaccgtcctccgccgcgccctccgtcctcgccggaagcaggaaaggtgccgccagggtcgtcatgcgcgccgcccattctctccatcggccgccgctcgtcggtcgtcctccccattggtcgccgcccatcttggcgccccttctccccgccggtcgccgcccatcccggccccttctccccgtcagtcgccgcccgtcgcgcattctcctcgccgacagtcacccatctcttcgctgcctgtcacgccgtccaccccgccggccgctgctcgtctcggtgccctggctgcatctcctcctcctccggcagccaccgccgcacactgccccttctccccgctggccaccgcccgtcggccgtcgcgcccgagaaaggaggggagggagagagacggagagaggggagatggggagtgaggagtaagaagaggggagtgagattgacatatgtgggccccaccttttttaattattgttttgtgtagctgacatgtgggtcccacgggtattttttttccaaatcgaattgccacgtaagcgccacgtcaatgccacgtggatggagacctagtcaaaccagccacgtaggcgccacgtcagccaaaaccgctacccaaaccgccttaggaccttatgtgtccggttttcgtaagttggggggcggttcgtacccggttttgtggttcaaggacgaaaatcggactggacgacaaatagagggacttgagtgaacttattcctttggccttgcaaagaagaaatggccagataagctttgggatagggaataaatctattttggttccctcatcttttgcggtgggtcaaatcgcatccctcaaccacatcctcgtcccaagcgatcgttaacctccttggtgctcatcatcttcccacagaacatatggctgaggtcgtacgaaggggtgtaagtgggtcaaccacgaaccacttatagatcaaaataagcggattcacggcttattttagcctataagtaaattttacgggctagccacgtacaccttagccgtacgtgaggcagcagcctgaggtaggtggcacaaatgatgttcttggagtcccacatctgctgggttagcttgggaaccgtgagggcgcggtactgctgggtccccttagggtgtgtgtcacgcccggaatttctatccaaaattccaaacgcttacatgtgtgtgaaccctcgtccaggaatcagccgaggcacacaataacaaattgataatagagtacaaatattactctaattaataagcgaataaaatgtcattacagaggtagatagttcctctcaatcaataaagttctaagcagcggaaaataaataaacggcgcagacggctccactccacaggcagcttgaccaaggctacacctaatcctccacaccatcagcctcattgtagaactcttcctctgatgaatgattgcaaggtgagtatatgacatactcagcaagccacgcagcaaatatgcaagtgcacaggataacaaaggatggcataatagggtttcttttgcaaaagcagcatttagcaaacatttgagaatttgataaaacagttaagtaattaaacaatattaagccaacgctatacaacatgccctattgtataggcccaaccattctgaacaaccaccccggctgcacagttctatctccaaaccaggaatgtaccattccaaaccaggagctaatcaaattattaccagttatagcatcttttactatgatgagaggtgtgagactaatcacgaaagacattgttagacccgcccataaccgcgggcacggctattcgaatagttttactctgatcagaggtgtaccactgtacccacaagacacaaccccacatcatgtcaccatgtgcctcaataccaccacggtatctcggaaaggagttgtgacaatacccctcgcataacacaatccactgcagcgcaccttcctggatcataatcaccccctcataaacaaggcatggactccccagcgacccccgtgggcttatctccgccacttctcagtctggtgccccgcaatgaaccatgctatacaaaagataaagccgttgcccatgctggcttgtggttggcacgataaatgtttcacaaccgaaactcgtgaaccggtccttaattgccatgagcacgaccatcaaaaccatgtgctcacaacccaccattaccaggttttagttggcacattaattaattaactaatcacgatcgaccatcgtgaactatcaataagccatcatgaaataatagtgaatcattagttatcccataagtgtactaatgtttctaagcagggctaagcaattgtatctaatatctagttgaaccaatataaataaagctcaactagtcaaattaatataacccaaggtatcaaggaataaggtaatcaagtacgaaagggccatagcaatcaataggttaattccacccaatgacattcgaaaatagatgcaatagttgaatagaaacaatagctttaaataggatcaacatgctcaaagggttgtttgggatctgtgtgacttgccttgctggccttggaactcttcaaactcttctccggcgaaaacggactctccggaaacgacggaatctaagcaaaaagaagcaaaatcaccaaaacagcacataaacaagcatgaacagtacatgtggatatttttaatgtgtagatctcaattttagaaaaatttagagacttgaaccaactaaatcggagctaagatgaattagttatgaatttttaaagattaaaccggattaaaacacttaaatcggtttaaattgaattatgacgcaataatgaattatttttgaaaaggaaaagagggtttattgcgtcagcgggctagggtttggtggaccgggcgcacgggcgacggttcacgcgaacggacggccgagattgatccgatccaaatcggacggccgagatcgaacgagtccacggcggctcacgggagaggggcttgatgacgccagcgatgacgtcaccgacggcggcggcagctcggcaaagaagacggctcgggcggcggactctcgccggcgaacggcggcactaggacgcaaacggaggacaccaacgggtagcggacggcacggcgaactcaccggcgaccaaagcgacggcggaggaccaacggacggcgacagcgacgaggttgaaacggcggcggtcttcggcttgacgacggcgacgatgcttcggcggtctccgacggcagcgaaggggcggacgaggacggcggcgacttggcgatgacgacggcggtcttcccgagtggcggcgacggctggaacgacggcggcgcacggctgaagcggcggcggcgacggcgaagctagggcacacggtgctagggctactccggcgacgagaggcgaaggcgagggtggcggcggaaagagaagaacacggggatccttttaaaggggctcggaggcgacggcggaggcccacggcgacggcaacggcgaaggaaacttgcggcttggagaggaagaaaaccaaaccgaatcgaactcgattcaaagctttccaaagcgattcaaccgacgattccaaaggagaaaaggtagaggagatcccggagattgtttcccctcaaccaattcgaccggagaaggaaagagacggccggatttggaagggaaacggcggcggcggcgctagggtttgcgggcgacggcagccgaaggaggacgaaggatctgacaggtgggacccacctgtcagcgtccgaacgcgcgcgcgcgcgggcggctgcggactgggccggactgggccgaaggaaagagagagagaagaggggttttgggccgactttcggcccaaagccaaaagaagactttttaaaaccttttcaatttaaattatttcttaaatgcaattccatttattaaaaatacttccttagctcaaataaatcccagaaaaatctaggaattatagaattaagcaaagtatttaatgaaattttatctggccactttttatattggaatttattaattaaacttagattttcttttcaagacttttaaaataaattctagaaattccatttaaacaacaatttatatattttgaattttcagggtgtgacagtgtgtttagttcacgtcaaaattgaaagtttgattgaaattaaaacgatgtgatggaaaagttaaaagtttgtgtgtgtaggaaagttttgatgtgatgaaaaagtttgaagtttgaagaaaaagtttgaaactaaactcagcctaagctagccgaccatgaagagatggagacgcgggaacggaattgaatcaaggtgtctgcaaagcttccggaggccagagttaagctgttccggccgggaagagctggcagcaggtgacaccactcatggttgcagaaataagatggttcagatcaccaactgcagaaggaaagaaacaaagtagagtcagaatcatgcatatagaaacacatacatgaaacgaggtagaacagcatgattcatgaagaacaccgtatccatatcaacacgtactgtagaccatacatgtattttacagacaaacgtatagatagatcatttattcagcagtatcgtcagtgtagctgaatgcaagtgccagacatactcattatgaccatgcactcaatagcgttctcaagtctcaacaagctgatggacagatagtgtgctgctccaccatagtgtatcagaaacctctggtgaggggaaaacttctcagagaatgtcagcatcatcctgtctgggtactcctccctgatctttgagatgagcagggtacccatgctaaaaccagttgctccttccagagagtggcaaatgaatcgcacacattaatttctacccaattttcagttgattatgaacacaaactgcaacacatcagtgtgaatcataagcacttcgctcgaggcaccaccagtgaactactgatgcgacgatgtgacagaaatcacataacaaacttattcttcatggtgatgtcaaaacctccaacgtacttcttgacgagaactatgccgcaattttggtgccaactgacgaggcccaatttgtcaccttggtgcaaggaacctgcgggtacctagatcttgagtacatgcagacctgccaactgacagataagagtgatgcatatagctttggtgtgcgccatcctcgcttcgccactgccggagtgagccgtcggtaagctgtggcgagacggcgagctgggacggctacagcggggcaacacctagggtgaggtaacaggttgtggtgaaggtggagtctggtgaggcgctgggaggtccatgatggccagcgaggagcggcgtggtgcatcaaggcggcggtcgacgaggagcagtgggcacatgaaggtggccatcggcgaggcggcacggctagatccggcgtttcctcgcttggatggcgcctcctggcctcgtttcgccatctggtcggagtggaaccgtcatcgaggaggcagggtggagctcgccggcgcatacggagcggaggtggctagccaggtagttggggagcggccggcgaggaggctggttggagctcggcggtgcagatggagggttagctgcagcgacaagactccgtggtaacgagaaaattgcatatctaccatcgcataagtttggattcgctgaaataccatcccttgatcaggcttcgctagaataccatcctcaacca

SEQ ID NO: 492 - DNA, 609 bp, Oryza sativa
gtagagccaaacactaagtatcatgctacttttactgtgtctgtagatattaatgaatgtgatgttaacaatccacctccatgccctggccgttgcaagaacatacctggcagttttacttgttcaagcccctcacaatccagaacggtgatactagctgttagtaagttgtcgttccctaatcttatagattttttggcacacaactgagtttgcaataacaaaaaattgataaattaatatgcaggcctaagtgttggaattgttgccatggcaatgatcgtcacctgctcatacttggtccgtgaacggaagaaactggccaatatcaagaagaagtatttccaacagcacgggggccatgcttctgctgcaggagataggcttaaagcaagggcagagcactgccttcacaatcttcactgaagcagaactcatagaagcgacgaacaagttcgaggacaagaacgtgcttggccgcggtggccatggcactgtctacaggggcatgcttaaggacagccgtctgattgccatcaaacgatgcatgtcgatgattgacgacagggcaaaaaaggagtttgggaaggagatgctcatcctgtccca

SEQ ID NO: 493 - DNA, 680 bp, Oryza sativa
ttcctgcagccttgctagctgtatgatatgacatatgattcatcatccatacatttgcagaagtttttttctacagcaaaaggtgtacatgaatcaaactcggcacaacgtgaagggaatccaagtagactctttgccatccgggagctagccaacaactcgtggccggcccaaacactttttttttctttgaaaccgtagccaggctaagttggagttatattaaggagaatagaaagtatttaatatcaccaaggaaggtgaaagagagaaaaaaaaagaaacatgaagaaaaatagaaaagaaacacacactaaatgaaataaaaatctaagcggatattctcgcaatattttttgccccacacatgctccatagcttgagatttcgtctttaaattattttttttggagccccgcaaaggagttgcggtatggtcttatcttgattttggaacacccttctatttcgttcacaacatattttccataccaccaacaagtggattgacttgagtgctttagccttagttttcccaccttgagatgttcttctgatccacgaatccaacaatgctttattttcgtcacgtgggtgttctacgtcgctgcagttcagtttacttatttaggaatggaataagtttacttatgtccctcaatttgatgcagtgtctgaaa

SEQ ID NO: 494 - DNA, 4388 bp, Oryza sativa
  unsure (1)..(4388): unsure at all n locations
ctgagatgacgtgaccaaggaatttcacttcagacaaccaaaattcacacttgctaaacttagcatacagttgatgttctcgtagcttctccaatgcaaggcgaagatgttcctcatgctcttctttgattcgagagtagataggaatatcatctataaagaccaccacgaacttgtctaagtattccataaacaccttattcatcaagttcatgaagaaagcaggggcattggtaagtccaaaagacataacagtacattcgaacaacccatacctagtggtaaaagctgtcttaggtatatcttcctctttgattctcaactgatgataccctgatcgaagatctatcttggagaaaacagtggctcctttaagctgatcaaacaaatcatcaatcctgggtaatggatacttattcttaatagtcacatcgtttagtgcacgatagtccacacacattctctgagtatggtctttcttttccacaaaaataaccggagctccccatggtgatgaactcggtctgatgtatcctttctgtagcaattcatctacttgcctcttaacttctgccaactcattggctgccattcgataaggtctcttatggatcggagttgttccaggtaccaaatctattctgaactctatatcccttttaggcggcataccaggtaaatcatctgggaacacatcaggatactcccggactataggaatctcttccaaagttatctggttcagtcttgaccttaaagactcagatgacaatgcatgaacagttacaactcgaccatcatagctgttgagagttacttttctgttggcacagtctatcacacctttatgtctggctaaccagtccatccctaggatgacatcaaggtctttggattctaacaagataagattggccagaaatggtactccttgaatttctattctgacagaggggctacgttgcaaagagagtgcttgattacttggggtactaaccatcaaaggacgtctaagatcttctacttccatcccatgatttcccgcaaaactcatagataagaatgaatgtgtagcaccagaatcgaaaagtactgttgcaggaactgagttaacaaggaacgtacccaaaatcacatctggagcatcttgagcttctgcagcagcaacatgattgacacgggcctttgatgctggtacagcagagttattctgagcaggaacaaccttcacgcgtcggggcttcggacacttgtcagcataatgtcctggatctccacagttgaaacacaccacgggcttgttgccttgctccctcttggcaggctgttgctgtgctggaactgcaacaggacgtggagcttgattacggatgttgttgccagcattgttgttgaagaactgacgttgcggacgaacaacagacgaagaacctccctgtggcatgggctggggtcctaaagtaagacgcggcttctgattatttccctgttgtgtcttgaattgagcaatccgacgtttcttctgctccatgcgattgtacttgtcctcctgacgaatggccttatccactaatttctggaaatcaggataatctccaaccatgagtaggtaagaaagctcatcattaagtcctcccaaaaacttctcctggcgctcttcatcattgcgcacatcttccggagcataacgagcaagacgattgaactcgtgcagatactccgtaacagagcgagatccctgggaaagcgacctgaactccttcttcttgagagacactactcccgatggtatatgcgtcttccggaaagcagcggtgaattcaagccaagtgataggttcagcagtagtcctgttaaggcggaagtgatcccaccattcagaggcagggccatgcaactgatgtgatgcaaatgagaccttctcctgatcagtacactgaagtaaatccaacttcttctctatggcatgcagccaatcactagcttcaacaggattagtggtactagagaaaacaggcggcctcacacgaagaaattctgctaacttgttctgtggaggtgcatgattattcccttggttttgctgattctgaaattgctgcatcatcatgttcataagctgtgtctgttgagcaagaacttgggccagagtgggattctctccattgttgttgctattggggttgttgggaccattcccattgctacgagtgttcaccatctggcatgggcaggataagaagagaaaacgggggaaactacttaggacagagaattactttaacttttattgatcttaactgagtttcattattacaaactgaagactctcacaccactaaactcaccaacttcctaacactcagaagcaaacaaacacatgcaattacatcccaccactgatgtaaatcacatgcaagacccacacacacgaacaaacttaaaacaagcaaactaacacaacgatctaagacaacgacttaacaagtcactctagttcttccgagcataggagatcgatcgaaggctcgttcggctcatcttcctcatctttgatagctacccactcaaacttggaattgttgcgcttgggttcttcttcttcatcactacttatgatgatgacgggaggatttgctggggcaacttctttctccaccacgcggatctttggcgccaattgataacgagggacaaacaaagctctcttccttgcggtgagacgaatcctggccttctgcggcggtgcttctcccttcaatgcggctaattccttctccaagcgatccaccttgtcttctaacttgcaaatcttaccacgattccgatcttcacgatcttgagctgctaacacagtctccgcacgactttcatccatagcccacaacatctcaaccaaatgtcttgtggtaacatcattctcaattccttcagtctcaaggtaactgccacggtcacttccctgaggttggcgaggatgatagcgatactcagtgtcggccaactgatcactgtagctatcacggagttctcctgtggcgatccttgccacttcctgacatgcatggatgtagtttcttcctccagcttcaaacatcactgaggggacctcttcactattgctgttcaaggtgactttgactcggcacttctcttcatgacgatcatgacgaatctgggcataaaaaggggcagtcccaaatccaatgacaaaggacatcgtacgcaactcctggacaaaaccctcaacaccaaacaggtactcaggcttgtaacgcggcatctaaagacaagtgaaaggagggagttaagacctttatccaattaatagcacaagttntnntnntngnngnanntntnanatnntntgannataaagttntagaaatcaaagtagaagggaagtaaataaagtaaaccaagctttgcaagataagttaaaacagttggaaatgaggtcacaaattttgtaattttgaataactggtttcaaaagaaagttataaaatcaacatactaaatttattttattgcagcaagattaaataaaacagtattgtaaaacttttgctgaaaaatgagccattagtacagtaatggatgtacagtactaataatactggaataaattttcgaatgagaaccattaaaagagatttaagaagtgcatgtgccattagtttggtttaattaaaagagaaagggaggagaacagttctacttttccaatatttttcagagggcttctatgggtaaccatttggcataacctagggtcaaagatgctctgataccaacttgtcacgcccggaatttctatccaaaattccaaacgcttacatgtgtgtgaaccctcgtccaggaatcagccgaggcacacaataacaaattgataatagagtacaaatattactctaattaataagcgaataaaatgtcattacagaggtagatagttcctctcaatcaataaagttctaagcagcggaaaataaataaacggcgcagacggctccactccacaggcagcttgaccaaggctacacctaatcctccacaccatcagcctcattgtagaactcttcctctgatgaatgattgcaaggtgagtatatgacatactcagcaagccacgcagcaaatatgcaagtgcacaggataacaaaggatggcataatagggtttcttttgcaaaagcagcatttagcaaacatttgagaatttgataaaacagttaagtaattaaacaatattaagccaacgctatacaacatgccctattgtataggcccaaccattctgaacaaccaccccggctgcacagttctatctccaaaccaggaatgtaccattccaaaccaggagctaatcaaattattaccagttat

SEQ ID NO: 495 - DNA, 13075 bp, Oryza sativa
cagcctagaaacatgaatatgccaatttgtagctgggcatgccaatttgtagctaatcgcagaaagctggctgcttaggcctttgggtgggtataatcagagcaacgtttagccagctcggggatggaactaggctactggcagaatttccgaccaaacacgcgcggcacagccagctttcccaatcactctcctctccaccgtagcaacacaggggaacacccaacatcccgcggattcacggattcgagtacgaaccgaggtgcgtgttgacgcagtaatccgtgccgcggatggactcgccgcagacggggcacgccacccaccccgccgcgccggcggcgtcgccccctcccgacgaagaaccacccgccgcggcttccctctccgcatcggccgcatcatcctggagaacacagaaggagccggagcagaagcggtgagaacggtggaaccggcgatgccgcgggtgggtgagttcgccgcgccgcgcgaggtttgaccaaacctgaagggagcgggaggggggcacggcgagggcgagggcggcggggagaggggagcggcggcgccgcccgatgaggcggacaaggctctcccgcccggtcagcatggcctccttcgccgccgccgcgggggagacgaggtggcggcgcggcgagcccgggaaggaatggaagtggtcgagagagccgcggcgcgcggttttttttcttttttttttttttttttggaattgctataaaacttctgcaagttttttttctaataaaacttttaaatttatgattatcgaattatctcgagatatgtacatgaaattaaaatactagaaaaaattttcgcacaaatcatgtgtaagatatcggtgctaaccaaccaatccatagttgatatatcgtatttatggtgtaattataagggcatccacaatgtatcatatgaatgagctataaaactttatgactagccatatatattgcagcactagccataagacattaaatgctaaaactagccatagacttatggttcaaccttaagaaataaaataatgagaaaaacacacctgcaatgcagttataatatagttattgggtaattacagtataattatattttaatcataattaattatattatgagtgtatttcaaatataattacatttaattataatatgtatgacagttttataaacctaccgcagtttttaaattatttttatttggaattctgtttttcgcggggtagggtggttttggtacatggaggggtgcaccgtggcagagattgttacgaaagattgcaggtttcgtgcacgttgtttttgactttgagccagctatgagctaacccttgtccttcagagggaaaagagagatcatcagtactgaagcttgtacgataccacacaactttcttgtgtacattgaaatttatgctatggtatttgtatatagttttcttgttgaaatggtttgtcttagagattttacaaggaccacattttttatcatcaaaagaatttttgtagttaaatatatcaaataaatatttgtgtataccatccactatgctttggagtttagtatgtcatattgtcacgaacaatataaatccagatttatttgtgtttcacatttagggttcagcatttaacttggacattgaaactacatgttacgaaaaaaatatatatagataaatatagtatggatttgttgtgacatatatgggtgagcgattgtttgacttggctatatcaatttgcatatgtgaaggtttaacatgcgaaaaaagtttataaaaatataaacaatataaagtgttgtcttaactgagaaatctgattttatccccgttacttaaaagcgcatacatctatccattctcctcccctatattacagtcacacgaacaatgctccttctaaagaaaaacagaaaaatcgtttcccttagaaacaacgtgctctaaaaaagctctacatgcaaccgttaactcatagaaaactaaaccattgatcaatttccatcatattacaacacacgttcaaggagtctttagtaataagaagagcacaaaacattttactacaagaaacttaatgaagaaaatgcaagagctatatatcgtgaataagaccatcaataacacatgaaatttgcccctttcaaccaaaacctttctttctttaggatatatatatatatatatatatatatatatatatatatatatatatatatatatatatatatatcatattttgcttcacacctaaaataaaagctacacaatattatctcacttatagtgtgacggagctcgtggcccctcaccgggaggccgcacaggcccccctttgccggttcggccgggggctcagggtgagatctcaagctctctcggtacgtggaaagatcgccacctctcaagaacgcgagacacgggcgatgtatacaggttcgggccgctgagaagcgtaataccctactcctgtgtttttggtggatctgtgtatgaaggagctacaaagtgcgagccgacctctcctttgttctaaactctgaatcttcagagaatcaaccccccaccacctatggcaaggtcctccttttatacttcaaggggataccacatgcacccctccctttccaaactggacttttcttcttttcataaatggacggagatttgcacggtcgtcctccgaacatccttctgatgggacggcacatacctacctccacttctgactgaggcgggcacgttgcgggaaggcggctgtgtactgacggcatgagcagtgtcagaccggtcacaaatcggtcattcttgtccaccacacgccggctcagcaacgtgcatgtttgccctttttcaaacaacatcttgcttgtaatggttaggatgaagcctggcatatatcgatcggggctaacgtgtcatctctgggacgtaacacgctagctccagccggggacgagtgcctaggagctctcgtctagacaggatggggcgaagcatgcgtctgaccgcctgtcgccacctaacccgcgatttgaccggtctgtgactggtcacagaccggataatcgagtgcactgcactgcatttcgtgcggcgtgacacgcttagccgtggtgcaataaatgcggttaggtgagccccgctgtgctcacctaacccatacacgtggagtaaaaaacgcgaggggtcggggcgcctccaccctcgggggcgaggctggagtggcccgccccccccccctcgggaagaccaagaggtgggcgcacacatcaccctcgggcccgacgtcccccgagggtgccaggccacgtgggcgattgtgtctgcctcaagcctcgagtcatgatactcccggtcccatgtcaccgacagtagcccccggcgttacgcctgggcgatcgtccttcttatggggagcggccgggcgtgacgccattcctaaagcctggtgacaggtgggaccggtctccatggttgggcaaaaacccaacggtctcaaaccatgcacaccagtaatggtaatttggctgtcaataatgggcggtctcttcaagactgccacatcaactgagtggcgcacgaatctgggcgagctgatttgcctcgcctggagatacgggaatgtcgcttcggtcggcgagcgtaattaacgcgcgcacgatacgatctatctcgactgccgcaaccgcatatccatctcacgcgccataggcgggcgaatgggattagtggaagcgtgggcgcgagaaacgagggggcgaaataatgggcgcgagaaacgaggagccgggcgcagcgtttggcaagggtataaaagcactgaggatgggatttgtctctttcctttcgccatcatttcccttgccttcgccgcttgcgtcctaactccttcttccctgcgcccttctttcgccgcacgcgctcgctcttcatcttctcttcgtccggcgccatggcacggggctccgcactgcttgatggtagcgtgctgccgccttctcgcattgtgagcgagaagcaggctgggttgccgcgccgcttcatgccggaatccgcctccggccgtgagatagtaatgctgggtgagggacgcccggcgccagactacccggggcggtccgtcttctttctccccttcgcaatggcggggctggttccgccattttcttctttcttcatggatgtcctggagttctgcgatctccagatggcgcaccttacccccaacgcagtgatgacattgggcatcttcgcacacctgtgcgagatgttcattggggtgcgcccatctctccggctgttccggtggttctttaccgtgcagtcggtatcgccaccgtcggtggtcggcggctgctatttcctgccgcgggggccggtgttgaaccgctacatcccctgcgtcctccgtaaaaagtgggatgactggaagagcgactggttctacacccccctcgccgacgaagcgcgcctccgacttccaagtcagcccccggcgcaggcctccagctggcgggcgccggtagatctgggggatggctatgacgccgtccttgaccgcctcgcgggcctgcgatcccaggggctcaccggggccatggtgtacggcgactacctccgtcgtcggattgcgccgctccagcggcgcgctcgggccgcctgggagtacaccgggtccgaagactacatgcggactcaccagggagccagatgggattgggcccccgaggacttcaagatactggtccaacgggtgctaaatctcaactccgtggaggcgtcccttatcccccacggtatcctccccctctgcagcgacccagatcgcacctccatcttgaccattatgacggcggtcggggcctcagaggagcaggctcctaagggccatgacggcgcaggtggaagccgccggggggatcaatctacccccggagggggtcgtgcttctgggccccgcgttgggggctcggggagcaaccgccctaccgacgcccgggggaagaggaaattgggaggaacacctcccccatctcctccccgagggggcggggcggtgcgtgccagcagcaggcgcccggagggggccgcgccaacatcgcagcccgagggggagcgcaagaagaagcggctgcgcaagatgggggagacagaaccatcccggggaaacctaatttcccctccaaggtggtcatttaaccgaccccctcgcaggttcgtcccacgctcattgcgaccgtcttttcttctatcccaaaagcaagttttctcttacccatcttgtttgccttctggtttttctttctgcttcagtgatatcccatcgcgttcctcccaccatcccaagtccggccagtccgaggccgaagatccggcggctacagaggcacggaggcgggaatctgaccggcgggaggccgcagaccgcctacgggaagctgaagaggccgcccgggaagccgcccgggcccgccaggctaaggataccgctcgggaggaggccgcccgggcccgccaagccgaggaagccgctcgggaggaggccgcccgggttcgcctggccgaagaagccgctcgggaggaggccgcccgggcccgccaagccgaggaagccgctcgggaggaggccgcccgggaggaggccgcccgggaagccgcccgggaggaggccgcccgggttcgccgggctgaggcgatggcggcttccgaggcagttcacgatgaggccgtggacgcctcgcttgggcccaccccttcgggcgacgcccaagaccaaacaggtccgggggtggcccgcgatgaagccggcgcgtccatgggcgggttgagccacgcggcgtcttcttcaaggcagctcttccccacgccttccgccgccccgctgagcgcagagccccttctgcaggccttagccgccgccaataccgcggtgttggacgggctcaatgcccaggtggtggccctgcaggcggagcgcgcggagctcgacgccgcatgggcgcgtgtcgaggaggggcggcgctcggtggaggccatggtagaagcgggccgcaaggcacaccgccggcacgtctcagatcttgagacccgcaagacggcactggcggagatcgcccgagaggtggaggaggagcggggggctgccctcatcgccacctctgtgatgatcgaggcgcaggactccctcctccttcagcacgggaactgggaggcggagctgaagaaaaagctcgacgccgcccagggggttcttgatgccgccgctgcccgagagcagcgagcgacggagaccgaagcggcgctccggcggcgcgaagaggtcctcgaggcgcgcgccatggcgctggaggagcgcgcctgcgtcgcggagaaagtcctggcggaccgcgagaccgccgtcacctcccgggaggcaacgctggcggcgcacgagtctgcctgcgccgaagaggagtccgcactccgcctccgcgaagacgcgcttgccgagcgggagcgagctctcgaagaggccgaggccgaagcgcaacggttggcggactccctgtccctccgtgaggcggcgctgacggaacaggcgcgccgtaatctagaatgtgtccgcgccgagagggccgcactggaccagcgggccgctgacctcgaggcgcgggagaaggaggtggacgcgagggcgcgcagcggcggggtggccgcaggcgaaagcgagttaactgcccgcctcgcagctgccgaacacaccatcgccgatctgcagggcgcgctggactcgtccgccggggaggccgaggccctccgcctggcaagcgaggtagggcccggcatgcttcgggacgccgtctcccgtctagaccgcgccggtcggcaggcgggcctctggggcaggcggactgcgaagtacgccgccaaccaggggggcctcgcccagcgcctttcggagatagccgggactctccaacggctccccgaggagctcgagaggacgattaagtcatcctcgagggacctcgcccaaggagcggtggaactcgttctagcgagttaccaggccaggaaccccaacttctccccatggatggcgctggatgaattccctcccgggaccgaggacgacgcgcgcgcgcgggtccgggatgccgccgaccacatcgtccacagcttcgaggggtcggcccctcggctcgcgttcgcccccaactccgacgaggagggcgatctcagcggtgcagacgaccgtgacgacgaggccgacgacccgggcgcatcggactgagcccccaggcccccgccagtcttcaattttcttcttttttctttcttctaaggcccttgggcctgttttttgtataaatcatcttacaatctgcaatcaaaaatgatgaaaaaactctttatgttaattttattttgctatgcgaatgagatgaggatgatctgtgccgtgatcctctttttgtgtcttagcttgatttaagggcccgtgcccaagtcccagtcctcgaaaagcgcgggtcggggctagtgcctggggagatccgcatgtcgagactggccaggccgggaacgtggcgaccgagggttatgggtgacccgattgtgggtttttgccgattcccccccggagttcaccacgccccggggcacggctcggttttgggccccgtttggcgattttagctgaccgacccgagcccccgagggcaaggttgagcacgagtgaccttatttcaagtcaaaattcttcaaaaggaaaaaacggcacagacacaaccttcaggaaattgaaactgcttttattgaaatactgaaaagagagaaatgagaatgtgcatgcgtggtagcccccggccaaccctgcacacccgagggggggtgcggggttggcccgagcccgaaacctgacacccgacccccccctcctcaggggtagaaacgacgaaggtgttcgatgttccatgggttaggcagctcagtgccgtcgcccgtggccagccgtacggagcccggccgggggacaccgatcactcgatacggaccctcccacattggtgagagcttgctcaatccagcacgcgtttggacgcggcgtaggacgaggtcgtcgacgcagagtgatcgggcccggacgtggcgctgatggtagcgccgcaggctctgctggtagcgcgcggctcggagggccgcgcgccttcttcgctcttccaagtagtcgaggtcatctctgcgaagctgatcttgatcagcttcgcagtacatggtggcccgaggagacctcagggtgagctcggatgggagaaccgcttctgcgccgtagacgaggaagaagggcgtttccccggttgctcggcttggtgtggttcggtgtcacgccccgaaattctcaaaccagaatttctaagctgaatgtgcattaaatccctgtccaggaccagccagggtacacaaacgacaattgttgacatacagatccacgtcttacaaaaatagaaaagattacaaatgcagcggaaaagataaaagcgagctaaaccgggaagcttgacttcagcagcgggcgactccactccacaggcaatccttgacggcagcgacgaaaccaactttgacaaaacagctccaactaggaagatcttcagctctggtgtgggggaaaagagagcaagactgagtactacccactgtactcagcaagtcataccggaagaggaggtatgttgcaggatataacccaaggaggctagaggttcttttgcataaagctagcatttaaaagcagtagttgaaagcagtaaaacagctgtagtaattaatcaatattaaccaaacactgtccaacgctacaccacgttgcaacaggcccaaccaacctcctgaactacaccagttcattaagctaaactaggggtgagactaatcacggtgaatctggttgatcgcccataaccgcgggcacggctattcgaatagttttactctggccagaggtgtacaactgtacccacaagacacgattccacacatgtcgccatgccccgaagtatcaccatgatactgcaaagggggaaatcgtgacaagaccctccacataaccctcccctaaccatccacaccacgctaaggtttcacccccacccctcaaaaggcagtgggcggtcccctcttgcgccgcggtgaatccggcagctggacaaccggacaccccggccgacccaactccatcacgcccaccctcgccaccggtgcctaggaaagggtcgagctatacttcagatcaagcagttacccactcccgcttgtggtaagcacggtaagtctcccagggtttcccgtgaaccggtccttaactgccatgggtgcgaccagcaaaaccatgcacccacagcccaccattcagtgtattttaattaactaacaccattgcggtggcaccaatctaaagctatgccaatagacaaagtctatgtaataaggtgatccccatttgtgtgctagttgaactaagcatggctaagcatttcctaaccaacatctagtcattttgatacccaggttatcaatggcataaggtaaacaataaatggctgagtattaggacccatcccacatgatattgtaaaagaatgcaacatttaatagaaatgcgggatatttgtaaattgggtacaatatgatcaaacgtaaagcatgacttgccttgctctcgcactgatgagatcacagcaacgtcttcgagaaactgcggatcgacgaaacggccgaaacctacgcgacaaacaaagcacacaagcaaaacatgctataagactactgaaacaggaaacaaaaccatttttaatggattctttgcatttttcttgatttactgagacttgaatggacttaaacggagctcggatgaattacttatgaattttagaagataaactgtgtttttactaataaagaaaagtccttaattaattattgcgcaataaagcccagggctgacgtcagcgaggggaggggcgggcgccgacaggcgggccccactggtcagcgacactaagagagggaaaggagggtggctggcaagcgggccgtactggcagcggcacaaggggaaaggagagggaggcgccggcatgtgggccccacgggcagtggctcaagggggagggagtgggcggcggcatgctcggcacggctcaagccggccggccatggcgaggcgacgacggcgcacgaccgccggcggtgaccggcggcgcggggagacggcggcggccggcgcgaaggcggcggcggcagccgaagacgacggcgcacgcgcggagggcggcggcgctcacgggggagaggaaaggaaggaggaaaagggattcctcaccgaggcgatggcggcgaccggcgtgggaagagacgagcggcgatgaccggcgacgcggaggcacggacgggcggcggcgacaccctaggagaagatggagaggcgttaggagaggagacgacgaccacggcggcttgaattgccggccggagatggaggggagggaaaaactcaccggctcgcgaggggagaggtgctccggtgggattccggcgacgcgaggcggcggccgggaaagctcttgcggcggcgaagctaacggcggcggcggtttggcgcggcgggactctagcggcggcggctcgcggccgaaggcggcggccagcggcggagctcgggtgcgacggcgcgagggcggtagacggcacgggagagcgcggcgagtgcgaaaaacgagagaggaagacgcggggaacgatttataggcggagggggaggcggacgtggccgggaacccatcctattgcgccggcgacgtgggaaggtgggggagagagagaggggtgggattcaaattcgaatcccgcccatttgcgaggcgcgcgagggcgggagacgcgggggagaggcggcgacgtgggagggggacgcgggagcggcgcggcgtgggcgcgggaagagcggaggaggcggcgacgtggcggattcggcggcggttgccgtcggaggcgggtggctggaggaaggggacgacctgacaggtgggccccacctgtcagcgtcccggagagagggggaaggggaacgggccggcccaaaggaaaagaggccgagcgcgggagatgtgggccgacggcccaatagagaaaaaaagaaggaaaagaaaaggaaaaagaagaaaggatttttcctgggattaaaaattgcactttggtgatttttaattggttaaaattatttccaaggctctgaaaattccactaaaaatcctgttaatatattgtgacatgtagaatccaagaaaaattccacatgccgattccgattattatttgcatttattaattagggaattagctctaggttaattaagataatttcttcggacgatttatttagtcaattttttttaaagcaagcaaaagggggaaaacttcagggcgtgacattcggtttgcccagagcaccgctggcaactcctcgatccacgaatcgccatgcttcttgagaatattgaaggtcttggttttaaggcctttgaggatttctgcattggcgcgctccacttggccattgcttctggggtgggcaggtgaggcgaagcagagcttgatgcccatgtcttcgcagtagtcgccgaagagttcactagtgaattgggtgccattatccgtaataatacggttaggcactccaaaacgggccgtgatgcccttaatgaatttaagtgcagagtgcttatcgatcttgacgaccggataagcctcgggccacttagtgaacttgtcgatcgcgacatacaggtactcaaacccgcccggggcccgcttaaacggtcccaggatatcgagcccccagacagcaaatggccacgaaagtggtatgatctgcagggcctgggccggctgatggatttgcttggcgtgaaactgacacgctttgcatcgccggaccaaatcaactgcatcattgagagctgtcggccaatagaacccttgacgaaaggccttgccaaccaaggtgcgcgaggcggaatgggctccgcactcgccttcatggatgtcggcaagaagctcaacgccttgttcctgaggaatgcacttcaggaggattccgttggccgcgcgccgatagagggtcccttctaccagcacgtagcgtttggaaatgcgttggacgcgttcactcccttcacggtcctcaggtagagtcttatctgcgaggtatgcttggatctcagagatccaagcaatcaatctaagggagcttggagcgctcccttcgggtcccgaggcctggactccgacgggcctcgggggccggtcaggcgcatccgtctcccctaaggggtcgggtcgcgccgacggctgggtaagcctttcttcaaaggcgcccggtggggtctgggctcgcgaggacgcgagccgtgagagttcgtcggcaaccatgttatcccgtctgggtacatgccgaagctctatcccgtcaaaatggcgctccatacgccgcacttggcgtacgtaagcgtccatctgtgggtcagagcaccggtactccttacagacctggttaacgaccagctgggagtcgcctaacaccaagaggcggcggatccccagtccagctgccactctgagtccggcaaggagtccctcgtactctgccatattattagtcgctcgaaagtcgagacggaccaagtatctgaggaagtctccgttcggagaggtcaacatgacccccgcaccggcgccctggagagacagcgaaccgtcgaactgcatcacccagtgggcggcgtgaggcagctgagaggggtccgtgccggcctcggggattgagacggtctctggagccggggtccactctgccacaaaatcggcgagggcctggctcttgatagcgtggcgtggttcaaagtgcagatcgaactcagaaagctcgattgcccattttaccactcgtcctgtaccctctcgattatgcaagatttgaccgaggcggggctgcagga

SEQ ID NO: 496 - DNA, 2372 bp, Oryza sativa
aaagaagaaaggatttttcctgggattaaaaattgcactttggtgatttttaattggttaaaattatttccaaggctctgaaaattccactaaaaatcctgttaatatattgtgacatgtagaatccaagaaaaattccacatgccgattccgattattatttgcatttattaattagggaattagctctaggttaattaagataatttcttcggacgatttatttagccaatttttttaaagcaagcaaaagggggaaaacttcagggcgtgacaaacctaccccccttaaacggaatctcgaccccgagattcggaagagctggcgaagaggtgcgggtgggtggccttcaactcatcttctctttcccaagtggcctcttcctctgagtggtggctccactgaaccttgcagaatcttattactttgtttctggtctttctctcgctggtttcgaggatacgagttggcttctccacatacgtcaagtcttcctggatttcgatttgatccggacttgcctgttcctcaggaactctcaaacatttcttcaactgggagacgtggaacacattatggatgccaagcatgttggagggaagctcgagctggtaagcaacttcacctctacgttccaaaatccgatatggtcccacaaagcgtggtgccaactttcctttggtttggaagcgatgtactcccctgagcggagtgacacggagatacacataatcccctgtttcgaaagcgagctcccttcggcggttgtctgcatagcttttctgccgagactgcgcgattctcaatctttccctaacagctctgactttctcttctgcctcatttaaaacttctgtaccaaacaactggcgttcccctgtctgatcccagaagagtggagtacgacaccttcgtccatacagtgcttcaaacggtgccatctgcagactagcttggtaactgttgttgtacgagaactcagcatacggcaagcttttgtcccatgccccaccaaagtcaagcgcacaggctctcaacatatcctctagtatttgattgactcgctcggtctggccatctgtttgtggatggtaagcggtgctgaaattcaaccgggttcccaattcttcttgtaatttctgccagaactttgaagtgaattggcttcctcgatcagacacgatcttcttaggtacaccatgtaaacacataattcttgccagatagagttctgctaatttcttccctgagtaggtagtgtgcaccggaatgaagtgggccactttggtgagtcggtcaacgactacccaaatagaatcatgccccgatgatgtcctgggcaaaccggtgatgaaatccattccgatttcttcccacttccattctggaatctgaagtggctgtagcaaacctgctggcctttggtgttctgcctttactcgttgacagacgtcacagagtgctacgaactcagctatttcccttctcatgctgacccaccaaaacttctctttgaggtcttggtacatcttagtactaccgggataatggaatattgagtttgatgagcctcggttagtatcaggtcttttaattccttgttttcgggtacacacaatctttctccatccagattgttccttgttcatcctcaacaaaacctcgggcttttccgaccctcatgttctttttgagctctgctatttcaggatcacttgcttgagctatgcgaacctgctccaccagtgtgggctgtgcctctagggcagccacgaatccgtgctcaactataccaaggttcagatgttccaaatcgcgttgaacctcacaacatagttgctctacccatgcaacattgcagtagctcttcctgctcaaggcatctgcaaccacattagccttgccgggatgataatgtattcccatatcataatccttgatcagctccaaccatcttcgctgtctgagattcaaatcaggttgagtaaagatgtactttagacttttgtgatctgtatatacctcacaacggttaccgatgagatagtgccgccaaatctttaaagcatgaacaactgcggctaattccagatcatgcgtcgggtagttgccttcatgaggacgcaactgccgtgaagcataagaaaccactttgccatcctgcatcaacacacatcctagcccctggcgagatgcatcacaatagacctggaaatctttcgtctgatcaggcaggattaagactggtgcagacaccaaccgtcgtttgagttctacaaaactcctattgcattcagcagaccagataaacttttcttccttcttcaatagctgtgtcatggcttagcaattttagagaagttctcaatga

SEQ ID NO: 497 - DNA, 9782 bp, Oryza sativa
gtgcttaggttacagagaaaggagaaagaaaagaaaaaaaaggagaagaagaaaaagaaaaagaaaaagaaaaaatgaatatatattttgagagtttaggaaccaagatgacatatctctataagtttaaagacaacctgtgcactttactaaaataaatacttcctccatttcaaaatattataatctagaacaagatttgatccattctaggatgaatctagtatatagttttgtccagattataacttaatataatacttacatgtatcccagtccggctacctactcattgtttgcaccgtacttgataaaaaccgtggaaaaataaatgaaattaactaaaaaaaattataagtagacttttatatgtatgtttctagcaatttaaaagatactgttaaaaaattaatctgttctgaaaattcttataactaacttttaatcaagttctaaaatttagattttaggtacgggcgtacggctcataagcaatcaagcaaagctttggacagggagcatcatgcactgtgcgcgggggtagcagccgcagcgaaccaagcaatgggagacaacacacgaggtcgagctctgcctggaaccctgcaaacatcatgaactgtctggatcgagtaaggcagtaagcaggtagagtatgaactaaagggattcaaatattcagagatgttccccaaaaaaaaaaaaagatattcagagatgtttcagggtttcagagataatagggttttagggattcagaaattcagagttttgtcgtctgaaaaaggagttccagggttccaattaagagacgttaatcagtcgttcgacacctcttttttttcccgcaactgggattggaaccataaaaacactgtagtaccaaaggaacaaaaacatttcaacatacacaaatatcctctcaaaagaaaatatacatactcatgttacgaatcgacgattagatattgcatgatatgacgctgcgaattattccctgacatacgcccatctttcatttgactttatgcatgctgctttacctctagaatctggaccggaaagacagccattccatcaccacttggtaaacagccagattctcaatctcctttctacagtaatacataactagaggtaaaaaaaataaattaagtggtcacagtgacttgagtagcattttaaggtcctgaatttaaatctccgtaggagtgaatttcagattgggttatttgaggagttaagtttccgatttaaaaggttgcatatattcggttggatgtagagaccgaataaaaaatatccttctctaaaaaggttaaaaaaaaggtacaaaaatctgtctcaaaagctatttttaaggttgcatatattcagttgaatgtagagaccggataaaaaaaatatcctcctctaaaaaaagttttaaaaaatctgtctcaaaagctatttttaggccattcatctgcgcaagaaatacttgtgcaaatcatagatgggcctcaaagaacacacttgctttgcatgtatggcattttctacttggaggtaggggtcagagtttaatactccgactgcggccccagttctctcaattctctcgcatcttctcatggcatccatctctgaagaaaattaagaacttgctatcaatcattctgcaaaccatacatcatagctgaatgttcaggagtatacaaactggtagtctttgcaagaagataaaatttaccacaggacatctaaaaatcatgtaattaattagaagacacccaaaaaacacgacactttcaatggatactacaaaatttgtgtaattagctgtaggacacccgaggtaatattttattattttcggtgaaaaagaggagagagaaatttcaaaaggacggaaatgcccttagcctcagtacctgaaatccccatccaacttcaactgcggcggcgaactccggcgaaggcaccacgccgccgccgtggtgcgtcgtgcatgccagctgcatggacaaaaacccgagctcttccaaatggagaatcctaagctctctcgccgcccataaatcctttacccagcacagcgtcctccgccttcctcgcgagctctcgccttgccatggcgtcgttaggcgacgccgcgccgttctgctgctggtggtggtggtgctcgtcgcgggcgcggtggcggcggcggccgacatggcgggcgaccgcgcggcgctgctggcgctgcgggacgcggtgggggggcggcacctgccgtgggacccgtccgcgcccacgccgtgcggcggcgcgtagcacggcgtcgggtgctccactgctccgccgccggcgaccgcgtcaccgagctccggctccccgggaagagcctgagaggagcggtgcccgtgggcacggtcggcaacctcaccgcgctgcggacgctgtcgctccggacgaacgcgatatccggcggggtccccgcggacatcggcggctgcgtccagctccggtcgctgaacctctccgggaaccggctcgccggcaggttgccggaggggctcttctcgctggcgctgctcgagaaggtggacctctccgggaaccgcctcaacggcggcgtctcgccggagttcagccggctcgcgagcctgaccacgctgaacctcgaccgcaacggcttcaatggcacgctccccggtaacctgatgctgccgaagctcgcgcagttcaacgtgtcgtacaatggccagctcggtggcgccgtgccggcgtcgctcaccgggatgccggcgagcgccttcctcggcacggcgctctgcggcggcccgctcgccccgtgcgccaacccctcgccgccgtcgcccgggggcagcaagggcgtacgtgaggaagaagaggataggagagagaggtgtggaccccacttatgattagcaaatagtaatctctctactaattacgaataaattagtccatgactcatgggcccaggaggttaaaaacctattaaaaattagattaaacataggctgtccgtgacatgtgggacccaccggtatttaaagaaggaaagagaaagggcaatccaagcatttagataaatatctcacctttttttacccagaaataataaaataatgcgaccggtgttctacagtcaattatatgttttttttttccatgagccgtgtcacattttcgcggtgtctctcagctaattacatgttttttttgcgtgttctggggcaaattttgtcttgcaagaatcatacttcataattacctagtagagatagctgctgattagttcatctatgcatccaaccagcacaggccggatgatgtgataacaaagagcagagtttttgtggtggtggtgatgactgacgaattgtgttctgatggtctcttccagatgccatgaaaaatgcaattgcaggatgaggcctgaagagacgcagagttgcagagccaagtttcagaatcgccttgcagctttcaacaggcaccacatgaactaactctggagttcaacgagcaaaaatgggtggagttcaacatgctggctaatatgtaaaatgaacgttggatggttcagttacgcgccgaacacttccagggatgatgcaacttggaacaaaaagtttcctgcagaagttcatttacagccagattcttcattccagggatgatggaacttgcgataacttctgcaaacaatatgcactttacagtcagattcttcatttatttttcattattgccttgtaggtatttttgatcattcatctgccagacaaaaatttgtgaaaaatgcaaatcatagatgggcctcaagaacacacttgctctggtatggccttttctacctggagcggggttcggagtttgattctccgaacccctgttttctcaatatcctagcttctttccttggcagcatgaaggttagctgcaacgaaaatcacctcaaatgttcacccaagatttatgcattagttttgggtaccatcaccctgatttgtgagaaaattcaattatgatacagagcttctcatcggaacatctgacatcatcagctatcaacttgcggcacaaccgagggataatatgtaataattctctaccattgtttatgtcttagatctaatcagtttctgctttctccagtagtcataagttcatgtgttcagagaaattttcttcagatcagatgatcgacttgatgctgatgacatgctttttagagcaggtacaatagcaagttattagccagctacaaacatattttaatgagataaagataagagagaagagtagcgggctacagatttgtagccagctgcagcacggactccaagatgcaatgtgtgtatgacatatgagaccatatattaatagtatagtaagcaactattatatgaattggctattagattagctatatataaattggagctagtagtgggctatactattaaacttgctcttaggagcgtaaaatttggaaatcttcagtgaactgcgatgatactgacatggatacagtcagggaagctttagctagctgctgcagagaactaggattaacctgaatatacaggcttgaccatgaacattcgataatcagcttattctcccagagcagtacgccatgtagcaatgaacagatgcttgtatcctaactcctaagtagattttgaaatgaagctgctgtgaattcctgcctgagctatgatgccaatcttttttttgagatgtaattcagatagttccaatcttcactgagatgtacagcattgtttgtctacatggaggtgtgggtcggagtttaaaattccgacccccagttttctcaaaatccttcgcttctcttcgtggcaacatcaaggtagccgtaacacaaaaacacctctaaacaagaacattcattggtgtcaggatccattgcttttggatgcagggtgcagcctgactgcctgggcgatgcatagtctcacagccataaccataagtagatcgttggagctacagccatagtcgcacaggcaaatctgcaatgctgcatgggcttgaattgcaaccgtgcgcgcaagcggaaattcagatcgcatgattcgcgtcaatctcgtcaaaaaaaaaaaaaaagagaacaatcaagaactgcagtatctccgatggtcatctgttctggtgctatgagaagatttctttatagcagatgctctgcattagcgcctgatactgaattcctgatgttgatactgcgttgctgaagtgcctgagtatacaaattggcagcctatgcaataacctgaatcacacctacgtacataatttctttcatttcatattataagtcgtttcgactttattctatatcgaacttctataataagttagatcaaatatattttaatagcacttttgtacaaattggcttaataataatatgaaagaggatgtagtagagatcagatagctgctgattagttcatgtatacatccaatccaactagcacaggccacacaacaagataggagtaggatcgataacaaaaaagagcatttgcagtggttttgtggcggtgacacagaaggtctcttccagacagcctggagagacgccgagttccagagccaagcttcagaatatatgagtgcaactttcaacaggtatcacacgaactaactccggagttccaaaaaacttctgcagtattaatgtgcatatctcaattgcactgcaaacaatatgcactttataaccaccactgaaacaattacccaacacacgttcacttgatgatttcaagaaatgtgcagggtggggctaccgatttgcaaaatcagagttgttgctcaccaatactgaccactgtgaactgagtggtgatcactgatacgaattggtgtttactaaaagcataggaattcaagaacacacaacattattcctaaaatagccaatgaaatttaagtacagatcaaacataacaatgcctgacagccatttactaacagaacacacagccaaataggaacgaacgcatctttctcacatcccaagttctttaaaaaagaaagaagcaggcaaagttcaaggcttcaacagttcagctcaatccagccacattaacaagatttttcgtatttaacaggtaacccttagcaaagacccacagatacgcaaattttctactccctccgtttcacaatgtaacaaaaattatcaaggtgatatggacattactacaaaacaacatgcatacattatgcagaggggaagagtactactgatagaggtgaggaaagttacttcttcaagtaacagccgtctactaagtaatttacattagaaaccgcagcctagtgacaaagcttggtacttgacaaacggcacgattcacaacgcaaggacgaacacaagcacagatttgaattagtcacaattgatagaagataaaagagggtaaacattaagcaaaattaagtcacgagctcatatcatatctcaaacttaacatgcggcataataagactaagcacttttgagttcgatccaaatcacacgagcatcgagctcacacgctacaaaagattggttcccccttcttgttttcttgcatatagcacttaaaaggaaactactaccaagaacaaacgggacatcaccggcggagcggcccggcgcgtctacttctcggaggagttgggcccgcgcttcttgccgaatccgacgacggcggtgacgaagcggcggttgtactgcatcctcttgtgggcgcggccgcggggcttcttcttcttgtcctgcttcgccaccttgggcgtctggccgcgcaccttcccggcgcgagcgagcgatccgtgcaccttacctgcggccgaatcccatcagcaaaaggcgcgagggggtagggagagaaagagaggcgatcgagaggacacttacccatgtcgacggcggcgaggctgcggcggcggcggcggcttcgagggcgcggaggaggagcggcggcggcggcgagcgcggagacgggagaggaaaccctaggcgagggtaagggcttttatagacgtggggttgggtgcggattgggttggattttcgtgggccttgaggcttcaaatttggcccagtagtttcggcccaaggttactcttgtggacccaatgtactgggccgtactctaatctgggccgcgcattttaatccagtaaaggaaaaaggaaaaagtccacttagactcccttaattgttaatcgaatctaattcgtgacccttaactagaaaaccgggtagactgactcccccaattactaaaaccagtacaaattgaatcccttggcggttttgaatagttgtttcgctgacgtggcatctacatggcaatgttgacttggtctgcagttgacgtgacgcttaggtggcattataactaaaaacatacacgtgggacccattcgtcattcacatagaagaagaattcgtggggccacatgtcagtctatcccttcctcatcctccccaatctccccccttatctctctctccctcccaattcagcaagcgggggccggcgccagcggtgacggcaagcgaggggcagcgccggcgacggcaggcagggggcggcggccgctgagctccgcatctgggcgacgccgagcttcgctctcgagcctcggtcaggtctgggcggtagcgggcgcgacctcaacgaggaagttgggctgcgcgccatgtcggactcccagacgcggtcgtcggggtagcggacggggtcggtgggagggggtgccgaagttgatgcgggtggcgagggagaggaagaaggcaccctcgaagataaaggggtgaccggtggtggcgttgatgaggcagtcggagaggaaggcccagggttgagccagcgccaccagcttcgagcacagcggcggctggatacacgcgctgctggaggaggccgagaacgagcggatgcacctcatgaccttcatggaggcggtcaagccgaggtggtacgagcgcacgctcgtgctcgccgtccagcgcgtcttcttcaacgcctacttcctcggctacctcctctcccccaagctcgcgcaccgcgtcgtcggctacctcgaggaggaggccatccacccctacaccgagtacctcaaggacatcgaggccggcaagatcgagaacgtccccgcaccgccgatcgccattgactactggcggctccccgccggcgccacgctcaaggacgttgtcatcgtccgcgccgacgaggcgcaccaccgcgacgtcaaccatttcgcatcggtacgtgcgtgcgtgtgaattcccaagcttgatgtgtgctttgtgtaggtttgtgatgactgaattatttttacttgtgatgtgcatgcaggatgtccatttccgggggatggatctcaaggatacgcctgccccgctcgattatcactgatgataaattttcaaaagaagattatcactgatgaaatcttgcggcggcttgtgtcctgctcagctctgcagttgttaccaggaaacacgagttgctgttgatctgttgtatcctctctcggcctccccgccaggcggacgcgcgacgggtgcagcgtctcggcgacaaggttgcgccggaggatttgccacatgggcccgcatctgcagcgcgtgatggtgtagccgttctctccgaggagcgagcgcgccacctccaggcggtcggcgagagtggtgccgcgctccacaagggtggcgtgcgcgacgcagcagtcggccacgaaggatgaggaggagggcgacgaggcaaagcggtgccacagacaaccatcactatcgccatccaccgctgccgcccgcaccaccgccatcgccatcgccggcggcggcgattgctctgctgttttttttttaagatagagggagaagagggccctgacaagctggccctacgtttttttatatttttccctaatcaattgcatgtgggcctcatgactgggttgacacgtcagcataatgggccaagtcagcatgccacatcagcaaaaccgccctctaaaaccgctgagagattcaatttgtactggttttagtaattgagggagtcatcctgcctggttttgtagttaagggtcacgaattagattcggtaaacaattaagggagtcaaagtggactttttccaaggaaaaagtacaccaaagttccctcaacttgtcgtcgggattaaaaaacgtcctcgaaccgtaaaaccagatatggggtcccttaactatacaaaaccggtcacccgaaatcctttggtggttttgaccccggttttatctacgtggcggttgagtcagcatgaaacctacgtgggccccacatatcatttgtccacgtcaccctctctttcccctcttctctccctcatctttctctctctttcccctctctctctctcgcgcgcacatggaacgccaggaagtagtggcggaagcccttctgccaccccgcccacaggaagaacgggagcgcgagcggcggcggcggtggcgggcgagcgctggggacctcggcgacgagctcgggagccacgcggcggagcttggagaggtccgtgacgacgggcgggccccagcgttggtggcggcggaacgtgttgaggaggaaccgcgcgagcggggagaggcggcgggcggccgcggtggcggaaggcgaaggcggggaggaggaggaggaggaggaggagggaggaggcccctaccgcctctgcttgggaggaggcaccggtggcgtggaggtc

SEQ ID NO: 498 - DNA, 5462 bp, Oryza sativa
gcggcgcggtggccagcgtcctcctcctcctccgccgccgcatcgacggcgtgcgctgcttctccttcccggccgcctccgcggcgtcgtccatgccgggctcctgcatcccactagcgagctcctgcatcagccccgcctcctccagcctcttcgcatgctgcatcatcgttttcatcagctcgtgattaatctcagctaattaattacactcttagttcagttcgttgccaattcgccatcgccattgttgccaactcgccaatgccaataatgatgaattgatgatgcagatatatgtggagagcgagcttgccgccggtgagcttgccggtgaccggcgagttgactgactgacctcgtggccgtcgttggcggagtcgcggcggacgatgccggcggcgcgtggctgcttcatcccgaaccggatggctgcaggtgcgtcggcacgcagtcgatgacatcgccgtcggggctgccgcgtcgccatgtttcccgctgcggccgccgctgccgccgggtgccggccgccgtcctctctcccgcctcgcctgctggcctctggccctctgcacccgcgcgccgctttgcctcgcccagaaagagagaagagaagaaaaagggagggtgatgacgtggattaccctgatatgtggggcccacgtaggtcccatgctgactcagcagccacttaggacaaaatcgggatcaaaaccgttgagggaccttctgttttttagtttgaggatgattttatatctttgatgacaagttgagggacgttgggtgtactttttccatccagtaaatgggttttccattcaagggcttgaattggagtgtactgtgtacgtgatccgcttacaataacagcccattccaatcaaacaaagtttcggaagagaactcgggataacgaaggggcaatattttcgggacattaaactatttttttgaaacctaaaaaagaaaacaaaatttgaaacctagacattttactattcgtcactcttaaatttagccttaaccatttagcactaatacgtcaatgaaatgtgagtctcatatgttaattaccgcatgcgaggacagataacaatggctaattaccacatctaagtgataaatagttaaatattcttatattttcggaacatttctaaattttcgcgcgaatttctggcaaaatttaccgccgccaccgggcaaggccgccggcggcagaccagaggcggcggcgccgccgcgcgtcggcagggacgattcgtccatatccccatctgtttcctctctctcttttattaagatttttttttctcgcggtgcggcagccaagatgggatcgaaaagttcgaaccatattccacctgtccctcgccttcaagaatccgcatctcgtcttcatcattcgcgtcctccgccattgatgccgatggagagcacatgcttcgcttcgcgtgccctcacgatagcagcgaatcttgctgccgctgtcgctgccgttcttgctgattctttccattaattgctgacgccgatgaaattgtttcactgtgatttttaagcatccgtgttgttaatggttaattagccgtctgattagattagctcaacgcagtggctgaatggtttggtttacctatcttttaactactagccgttcgagcgtcacaagtggatcgaatcgattgaattaaaagtagtgcaaattaggtggagttcacgcgtaattgcagctgaaaaccagcctaaaccacactgttgtagcgcatcaccaatccattatgtcaaccttgtagagttgttatctaattatctgtaaccatcagaaggggcaatcaaatagaagaagagcattatgcatccacttgtactgtcactctgtcactagtgtagatttggcatcccccacatgggcagcaaagagtaatctaattgcttagctgcaggctcagctcagctcaggccttgacactttcttgcatgattcagtaattgacaattaaattatcatcatcatcttgtgcaggccccagatccaagcttggaatttcttaattaccgtgatagagatctgagagatattagtaaaacatctcacagtgcttgtggctgattgttgaaatgtcatttcattaacctggtcacagtttttaactggtctttgcagtctcagccaaagttcagaacgagacgaaactggtggtgaggcctttctgacacttggcaatttggttgccaggtttacgttgcaagggtagcgtaagcacaaggctatagagctcatagcctttaaatcgaagacaacgactttgcataaatttcacagaaacgacatgtatcggtgctactaggttgtatagacttcagtaatttgtttttgcaagacgagaagaacatgaaaaaacatgttttttttttcatggatcaaagctttgtacagagaaaagacaaaggagaagtcaaattctcctttttgcaagtaatactactcgttgggaaattagttcttgtctgagggtctttgaggtcctgaccacgtaaaggtaatacatgaatgaccatctcaaatatttgaccattgaatttttcaaggaaaaatcatcaaaatttgaacaccaagaaaaaaaaattaccttgaattttcgaagtaaaaaaacagaacaggagcacatgtgaacccatgccgcagaagaccacaagattcagtcttgtgatcacagaagaacagaataatcttacttagctaccttgttcataccgccaagaacttggtagctttctccatgaacaagccaactttacagatcaactattaaaaaaaattatgataatttgccttcagaaactatgccattggaatcatacaccagtaaggctcaagcataatacagaggccgaattaacagctaataatatcaattaaacctttccatttcagccactgtttcttttggacaaattaataacctgacagtaggtagcaggaactaatatttacatgcatatatttgaaacttgtcagtcaaaacaggcactgaattacgaggttaattagactgcaaaaaagagagaaaaaaaaccaaagaaagtgatcaagaacaggtgggaagaaacacaaagcgagcgagaagaagaagctggttagtcttcaactccactcacaaacaattgattttttgctttgatttctctctcccgccgatcgatctgcgagcctcgtcgtgtccaagaacaaattgaggttacttgcctttgcgaatccgctccgaattttggtttttgaatttgaatttgatagaagttggagattgcccgccttggtgctaggccttgacgacggtcatcatgcgcttgaactcctcgaagctgaccatgccgtcgccgtcgctgtcgacgaggcggatcatgtcgcggcactcggcgacggcggggcggccgccgtgctggcggaggccgagggactcgagcacggtgccgagctcctcggcggagatgaggccgtccttgttgccgtcgaacacgtcgaacgcctccctcaggtccctctcctcctcctctgcttcatactcctcgtcagcggcggcggcttcctcgtcggcggcggcggtggaggggagcgggtgctgctggtggctcttgcgccgcttggggatggagtcgtagagctcgcggaactcgtggatatcgatgagcccgtcgctgttggcgtcgacgcgggccaccagggcggcggcctcggcggcggacgacacggcgatgccgaggcgcttcagggactcctccagctccgccgccgtgatgaagccgtcgccgtcgtggtcgaacgtggagaacacgatcccgaggtcggcgtccgggtcaggccgccgcggctcctcctccggcctcttcttggccaccaccaccacctcctccccctcctcctctctccgcttcttggcatcgccgcacttcttggtcgctggcgaggaggaggcgagggagaagagggcgcagaggccgccgaggaggaagaggaggaggagaggcgccatgggtggtggttggggttggcagcgagtgaatgtgaatgggagaagtggaggagacagggaggttaatatatgcggaggttggaagcgatggtgctggcgaagaagaagaagaggaggcagtcgcagtcgtcagttgccgatcgtgcgacctggtggtggtagtagatcgatgggtaattttcacttgcgtccttgtgtgatgctaatattacagtttaagaacttgggagaatagtactcccttcgcttcgtattataagcagcgaattaaatttgaaaatataatgttcatttattttatttatagaaatatccgggattcaaaacttttacaaaaatataccgtcgatctcgcacaaccattgcacgaaagtgacatgggcgtgacgtcgcgggcggtctcgcgcagggaaagcgcgagaccgcgcggtctcatgaaatggaagagcggtctcgcttaaccaatcagcgataccggatttcaaaatagttaattagtgattaattaccataattagtgattaattaattattatttaatcactaattattattagttaaataattaattaggtcattagtcactaaccaaatgcagtttaggacggtgtcgctctctgcttgagcgagaccgctcgtccatcctgcgctctcgcaccgtcgctgcgcaagactgcgccgtctcgcgctttctccgcacgatatcgctcacccttgcgttattttcgctcaacggttgtgcaagatcgatggtatatttctgcaataaaatttatatcctgaatattcttgaaaataaattgaataaacaatatatttttaaatttaattctataaatagcttacactttttaaagtcaaattgcttgaaactttaacaaaatttatagaaaaatatagcaatatttataatattaaattagttttgttaaatgtaagtatgtaacattgaatatattttaatagtttatttgttttatgttgataatattgctatatttgtttataaacttatacaaagctagagaaggttgattaataaaaaagtcaaatcgatttataatatggaatgatgttgtatccaaaagtggctagtactattggttgaggttaccgaccaattttaaattttaatttttaattagatatgtaataataaaaaaaaggtggctagcttgtatccggtgttttatgaaacattccgaaactttgattttatgaaacatattgcaaatcataggatggtatgaaacatatttaatcttcatataactacgagtttatttattactagtttcttttgtcaggaaattatcacgtacatttaacattttcctttctgataataaaaggaataaacaggacatgtactgatgtactattatctaaaaaatgtactgatgtacttacatagtactgtactgt

SEQ ID NO: 499 - DNA, 2375 bp, Oryza sativa
cgtggtacggaggggtagctttgtaacggcaggtaggcgcatcagcggttatgttggtgtagtacttgggcttgcttttcactagcttttggacggtcagtggagtggacggagagactagtaaggccttgtttatagtttctaaacaaaaactttttatccatcacatcgtatatttgacacatacatagagtattaaatataaaaaaaatcaattacatagtttacgtgtaaattacgagacaaatattttaagcataattgcgtcatgatttgacaatgtggtgttacattaaatatttgctaataatggattaattaggcttaataaaatcatctcgcagattcctggcggaatctataatttgttttgttattagattgtatttaataatttaaatgtatgcacgtatatccgatgtgacaaccaaaccaaaaaaaatttccccaactaaacaagccctaagattttctaaggttgcacccaggataacgagtgggtcgacccacgaacccacttatagataaaattagtgagtaatccacgaatcaattattaatttaacatataaatagatttatgggttggtccacatccttagataaaaataaaccggaccacgacattgccagttactatttggcatataaacgggttggcgggtgagcttgtttgcatctctggactctagttgtgtcgtacggagtgtactagtatttggcttcggcaccccgtggagtgcgtgcgtacctcccacggtgtggtgtgatacgtgtgatttgtgccgttaaacgtgacacatggacctttttttttctgagaaacacacatggaccttgttgatagtagtatttttctagttttgccgttgtcactctaggcaacccacaaattcacaagatttggcatgaaaaattaaatcttcacaagtaaatttcattttgggtcactttcattactgttttggtttagaccacactttaagaaatatttttattttgaactaagtaaatttaactttgtggcattttagaccaccctaaactatttttatccatttgtatctacttgtcatatcaaagcaatagtctacgtataatttaactatttttagtctatgtaaggttcattgacaagcaaaagtcgtcgtactcgaaattgttcatatgcttgataagagagtcaggtagtctaaagtaaagtaaaggtaaaattatccaatccaaaataaatacgtttgttaaaagttaatccaaaacaaaatatcggtaataaaagacaacccaaagagaaattaactcaatattcacagctatacctttggctttcaccggttaggttacgactacaagaggaacacgactgcaacataaaatcacatcgatcccatgctcccttgtcgtcaagcagcagcagcaacaatccaagcacacattaccgtagaaaaaaagccactggaacacgtagacagatggacggctgattgagcgaacagcaaacaaaggagacgtttggggcacacataaactcaggaaaacaacacggcagcagctagcaacagggcgtaccacctattttttctacaagatacacgagcgaccacgtattgctcggacctggagttttatcaaatgcggtatatatgcgtcgtatataccccgggccctctttaactccgacaaatatgtgttcagaagaacaagtcgttgctctgtaataataagtgaagcaatcactggcttaaatagtttcctgacctgttcatcaccttccacctgagataatgaacagagaaatcagatgcagacaggtggcagattagtagatgttagagacttgttagttgcctgcgcatcagggcggaaggcttgtgattatcctttttttttctttccttttctttacaaatgttcactacacttttccaggatctttgaacaattttttagaccaaaggatatttcttctttttcctaagataatctctagtgctgcttgcgtcatttgtgccaacttttattgtttgttataagcccgaaatggacctaccaaagtaccacatataagctgaaccacttgcccttcaaaatggttgcaacacgcagaaactgagctagtggaatggaacagtttttcttataagttggaaccccaaattatctggacatatacatattgtttcaacagatcataaaagcttttgtgactaattaattgcacacattgcacgagttattctcaccaggttagtgttccctccacaaaacgtaaagtccacctttctcccaaatccaaccaagagtcacaggaaacaaggggggaaaatagaacaaaattcttggcatgcaatgatgcaactaaggggctgcaggaa

SEQ ID NO: 500 - DNA, 1871 bp, Oryza sativa
aaagagatcatgattgaagcagccaacatatgaattagtaaaagtgagcaggtccagattattacacttaagttccatggctgcctgccccagatctgatatctcacgatatgagatactgctcattcgaaaccatggccctacaagaaattttaggtgtttataagtatgtgaactacctaaggaacacaggcattaaaagtctagaggcaattgtggatcattacgaattaaatgagaagatcaacagatgcatcaatttatacagaaatgtagcaaacccaaggtaattattgtagtatagtaatacacaatataaaatccctagaactcatagattaatcatgtaagacttaatcactttcaagaggtaagaaagctgcgcagagaacatttcaaagttaatgagtggatagtctaggcaatcaagtagcacagctagccccttctgaaaatagtgctcccaaattcatgctgcacatctgctatttatgtaaaaataaatatgtaatcaagaatgaagtaaaatgagcatctcagttattacttgatgccgatatagcaaccttttcgagtgtagatcctaacaaagagcctttgtccatcatctggtaacaactgaaaagagtctgttgaggataagaacagagtcctcgatgagtactttctaattcacaaatataagatatatatagtggggaggaaataagaaacaacctaaaaatgacttttccttgtcactaaaaaggtgtgaatggtttgccatcacatctgttatcatcgaactaaaatttgtctggtatctcgtactgctaggttgcagcaaatttccatttccaacagcacatatgaaattttcccataagaactgtggatgcttcagatcatcatatgtctcattttcatctgtatatttctggcacttaagctggatgggaacatgatcaagttgttgttcaggcacgccaaccacacatccctaacaaaaaaagaataattagaagttgaatggttattaacttggtagtacagagtcacagaaaaagaaacattacatccttcctaaagtaaataaagtgaatagttatttccaccaaaattaatacaactgataaagtgaccaccaaataatttcaagaagaaatagaaatgcgggggttaggtgaaataacatcgtcccaacgctccgactggaatgagtcgcttaaagagaaggacaagctagagagcatgacagtagcatataaagtaatatctgattatgaagctgtcatatctaatgcatgcattaacatcagggaccattagcgaagatggcatggggtgagatactgagatttcaaagataatctaatgcacaggtcaatgttggttcccttaccacctataggatagtaaagtagaacttgaagggaaacatagcaatagctgcagtttcatcagtgtaatgcattctacataaatacaacacttatatccaacagaatatgttaattcaacaaggtaacctaatgacagcggttctgctgcgatatacaaagaagtaagctcacctcgcattcaatgtagtgtctgtccagtagaggagccaaaactttagccagctctcgaggtaagtatccaagcatctgttcacattcatagcctgcataaagcacctatgcatggtgttaagaaaaaaatgtccacagaagaggcatatcacaggaatttatttagacaaaatggaaaaccttgatagcgtcagggtcctttgcattctgaggatctcggagaagagtaatgctcgcaccttcttgcaattctatgttttcatggaacctcctgcccactatgacagtgtcaactactaccgaattgctagaatctgt

SEQ ID NO: 501 - DNA, 583 bp, Oryza sativa
aatgattgctcaataaaagctgtagttttccaagttgttccatggtatgttaaggtttattatcacagcttacaaattttcattgatgggaacagtaaggctatttcagaagtagttgagaagattcatgtcactccttcagaagacaaacatttacctggtactctagagatgctactaagattaccttgcagtatggaatcagctaccctgtcgctggactttgacaaggtttgttctgctacttaaatttacttgtttcccctttgtgttttatttagtgatatatagaactaaatgttgaccttggtcttatatttacatgaatgcatatttcaggggtttctgcatatcgatgaatatcctcctgatgctaatcaaagatttgacatcccatcagctttggtaacattttctgagttcaattctagccgaagttatcctgaaagtgatacattatttgtgtcacctttgctacaaacgttcaaagtatatcttgtgacttgacttatagtataggaaccaaagccaaaagacttccatgtgaactgaaatgacatgcttcaatacttactgattgcga

SEQ ID NO: 502 - DNA, 617 bp, Oryza sativa
atcacggagtgtattcattgccgccgctctgttaggtacatcgttccagccacgtagggtggagcatctgaaacgatggggtatccattgtacaatgggttctgtgtaaggaaatacatgtcggagctgtcaatcctgaagttatgtagaactaatgcacaatgtatgatcttggtatggtcgtcactcctaaggaaataaggtatttccctcaggattctcactggcttttgataactccaaatgtcctttccactatgttacgctacgaactgtgcatttagttaaaagtatcttcctttccatggggcaaggctgctcccttattacccgcaaattcatccaagtggtaccaaacatgtgggtaaagtggtaggaatctataccggctagcatatcccgagtccacaaggaaatatttccctgcaccaacaaattagcgaagtgattatttctggaaaatggacactaacatttgcaatgtttgaacctaaaattcaaaacataccccatggtagcctttgggaaacaaaacggatagccccgtactggttttggtaagttgatcatgcacagaccctatccacccaacatcttgaaaaatgacacggtcgtcc

SEQ ID NO: 503 - DNA, 668 bp, Oryza sativa
  unsure (1)..(668): unsure at all n locations
tgccgggaagcagaaatggttcgttttaatgaaactgttctatgctgtccgcctgtccgtgcttgctcacggtagagtccccaaacaaatatgtaccgagaaacaacaaaaagtagtgcagcagcagagtagaagagaatgcgggtgggggaccttccagacgagcgggcggacggcggcgccgccgtccggcacgccgaggcaggcgagcctccgcagctcccccatgttcaccaccttcttcgacagctgcaaaccccaacaacacacgatcagaaaatggaaattccaaacaccccccaattcgtacttcaccgcgaaattccaatcccctcatccaaaccaaaacccccccttccctcgtcaccacccacccacccaccgtgagcttgaagtcggcgagcaggtgcgcccggagcgcgggcccacccccgaccttcccatccttcttctcctcctcctcccaccccgcttgcttctcgcccttcttgacgaccccaccgnctgctcgtacgacgggggcgggacggtcggcggcggcttgggcggaggaggcgggggcggggagaggtcagcgccgtaagggtcggggggcacgggcggcgacggcgacaaagactaaggcggcggggccgaccaagagcggcttgtgagccacttcggcaccg

SEQ ID NO: 504 - DNA, 4572 bp, Oryza sativa
cattcaaaagaaggcacgaaaccaaatcttgtcacataatagagttggagagccatgaccatataaactttctatagtacttgccttctaaatatgtaggtaccttgcatctacatcctaaaattggtgaaagctccaactaaccttgctgtcaattgacctctctctgtaatttcccacagctttattgaactgcacactcgtgcaagcaaaatccacacatagggatgctaatctctctcaaagatgcagttcaagaaagctgtggaagaccacaaagaggaccatcttcttttgcaggtgcacagctaataacatgcaataattcatgtcaagaagctggcaagaaactgtggctagctaagctagttgttcacttctttgtatagttcaggtgctcatgtagctgaagaagagttgaaatgaaggaagaaggcacaagaagcagctagttcttgtaagcttcagcttagggaggtggagggagaaagaggggagagttagggctatttataccagcaaggtgaggaggaggccaagcatggggttggtgagaggttaaggaccccaatcccaagaagaatatggaggccttcctcattcactttctccctctctcaactctgatgaactctgaagaaaaaggagaatttttggctcatcaatccaagggaggctgtaaatcagacaggagacagagccaatttctttacttgacacacttgtagccaaatgtgccactggcttcttagaaaaaaagattggcatttcactttgttttctttctgttggtggttttgatatgtgggttgcacaaaacatgcaaagagatgttgctgaaagcagtgaaaagatggagctttttctgcctttctggttgagttgagtaagctattgcacaccctacaggcaggtcagcactgagcaggtgtgatcagtgagctaagtggggtacagatcaccagtgggtataatgtgccaatattttcaagaacaattctaaagtaagatttccatggggtctccagtgattctatacttgattgtatcccttaaaaaatggatgaaatggtcttgtctgtttatcacttgatttagaattgtgatcttgtttcaaaacaaatatttttttgaaaggaaatatcaaaacaaatataaaggtgactgttattgtcggtcccatagtttaaccgtctatagttaggttgagttcaggttcgaaactacagaatttctctgaaaaaaggggtctgtaactatagttcatctaaatgtaatttttgttttgcctatatttcaatattaatttcggttcacaattttgagccgaaattttgggtactggtaaggatgtgcttttggctgaatttttttttccttaaaaaaaggaaaatttgttcaaactcagtaataaagtttcccaacttttccctaaaatttccaaaatgttggatgtcaccccctctgaaatgtttttgttttttaaaatagttaaaatcctagttttaatcgtattatcgtttttcactagctacatgaaaagtcaaaggtatgttggtagcattagatgtggtgtttcaacattaccaaaattttggcacattttagtgttgctatgttggtagcattagatgtggtgtttcgttttaaagcctcatattttagtgttgtcaatttttttagcgttggatgtggtgtttggtgtatattgttgccaaatgattttagtagagtttttaagagcaaaaacttccgtaattacctcacttgataaggtaacaatgataagaatatgttcgatttgttgccttatcaaaatttggtgggattgaaagtggttgtccagagagtgattttggttgataacctgtgcttgacacctgaattaacaacccggtccatgttgaagcgtagaaaaagggggaaagcatgcgccaggttctcgcgcaaaggtcataccgatctgacatgcgtgaacagaggcctgcctgccaatgccaatgctttctcttctctattgcttggggccatcaagcaagcagtagttattaattagttaattataaatttataatcagttgagcaatctcagaaggagaagctaggtagaggagatctcggggcaaaacacacaccaatgctagtagcttctctgaacaaatttaattttactaaattcaacatcatcgctagctgtcccgacacgatcgaccggactgtccaatgctggctcaaatggagcaagaacctgaatttcctcttgtgccagatgataactacacccggatgcagacatgcagtcaaagcatggctgtgaaatttctgaatccagagatctgaagccttctcgggtgatcagtcgacgacggccacgtacgtttagtaactactagcatgctgtaaaagtgtaaattatgattttttttaaattacacagtacaacacagacactcacaacgcacgcacactcacccctaagaacgcatgcacgcgaaccctacccctatgagcatcttcgaagactaggccggtaaatccatcctggagattgatcaagtcagcacaggcacctcgctgtcgatgagtatatcgtctaccactgaaagcacaaaactgttaaatcctgaaaaattcgttcccatgagaagttgaacccaggatctgaggtgctactggggctctggtaaaagtgtgaattaagtagtggtaattacgcagatcgatgctgtaatattatgatgagatactagtaatagagaattcaggtaaatttgcaggttcgatgcttctctgacatgcgtccggtgtcaggccggcgtcagagcgctcccggatcagacggcgccctgcgcgctgcatcgcctgcacgcgcgcatggcttccgcgagcttcttccattatcccaaggctaattacgttcttgatgatcaggtacttaccggtgatcggtcggtgtggcgttgtttggaagcaaatggaggtagtagcttgcttgctgtcagactggctgtcagtcaagagtgtcagtgagtgagtgaagcacgcgtgtttcgatcactagctagctgaagctgattaattctgcttaattagcttgcatgctttgaccagattcatgcatatcagcagaaatgcagaggcaatggctgggtggtggggtgcttggaatttggacggatcaacctgaattatgcagaggcagcgcggcatgggggggaggccgtgcgcgcgtgcggcgtgtggggagcagggcgagcgaggcggagacatcctgctcgcgcgcggccgcgagggcgccatcgatcttcgaagctgagactgagagctgcccgagatgtgactcggcaaccggcggcatattattcacttgctttagtttgccttggactaaacctagggtccatttgaaacgcggaataggaaaaacgaatagaaaaaacgtaggaattaaagttgtatgtttttctaattctataggaattgaaaacacaagaaatgaagagaagagtcctttgattacaccataggatacactcaacaaaggaaagtttcacaagaggtctaacctcttgcttattttcctatggaattgatcataggaatgcaatcctatggaagttttcctatcctcttcctatgaatcaaagggctctataggaaaaaatccttatgaaaatgaatcctctaaaattcctttgctaattcaaaggggcccttagacgggtacgtgtgtctaaatttatagtatgagaacttttataatgagagaaaaattttataatgagaggagtgtatatctctactattataaaaactaggtgggtggcccgcgcaattgcgcggctagcacccaagcaaatcatatatttttagtatgattttactaaaaatttattaaatagctatctcattgtcttaagaatttgaaagaccaaaccttatcatcccgtgtttctaattatatagtttttaaaagtcacatcagttgctaccccttatgtcatcttcttctttatttgcttgctcgatctaccactatttcaattcattctccttgtaacctttaaaaattggaacttaagtttttagagtttattgtaacgttgggtttcgtttttataatttgtagacgtcccgtcaagcattgccattatgctcctctatagcatgttcattgtcttttctctttactgtcattgagattttaaaaatcgaacatgattatcgttgggttcatttttactttttagaagtcccgccaaaccttcagcggttttaccattgtacttctctacggctcgtccgctgcctcctttctttattgtcattgagattttaaaatcgagcatgattatcattgtttttttattttttagaagttacgaacctttaaaaattggacattgtagtttttatagtttattatcttgttgggttttatttttttataatttcagaagtttcgtcaaacgatgccactatgctcctctacggcccgtccgccgcctactctttattgtcattgtgattctaacaacaaacataactatcattgtaattcatattttattt

SEQ ID NO: 505 - DNA, 2760 bp, Oryza sativa
  unsure (1)..(2760): unsure at all n locations
caaaccaactaaaccaatgaagagctcatttaaaatgtacgaaatttacagcaaacatatcagtttcccccattactaaaccggagagctcccacatttcaaatggggcctagagttccaaccaattgcagcaagagcagtaacgacagcgaaggacgcataccatgggatcccggtgaggttatgaaatccgtcgaggatgtcaatcagcgagctgacagcgaaccccgacgcgcttccgccatctcctgcggcggctactccggctgcatccgccgacgccgcgctggtggcgaccacttccccgaaatcagcaccacccgcgtcgtgcaggtacgcgccttccccctcggcgcgcacgtcctcctcgggagccttctccgccgcggcggggccggccggcggcggcgagcgggggtaccaggagaagcttcgcgcggggacggcagcgaaagggactagcagcggcggcaagcgagggggtgacgggagcagcggcgcgcgggtggtggggcttggatccgaggcggagaggtggtggtggtggagcacggccagcggccgcgggaggcgccgaccgccgccgccgccgccgccggcgaggcggccgaggaggcgaagcggaagcgccatgtggtttgtcgtgacgtggcgtgacgtcacaggagggtgtaaagcacgtgacgagttctctccgagccgttcgattaggaatggacggctcagatccaatatggcacatacattttcacaaaacccccttgtttttgtagtaattacaattctgggcctaggcatctcccctcttctcgggcaagaaccctagccaccttcgccagtctccggctcgaacgcggccacggcgaggctgcgcggccagtgatcttgcggtctaggcggcggcggcggaggaggaggaggaggaggaggcgtcgagatggtggtggcatccggtggagggcggaacgcgtgggcgaaggagatgaccatccgccgcaggattaccagcatgtgagctacctaacctgaactcctcggattttctttttttaaagaaaagatttagctgtcaagttcatgagtttgatgctttgtgtggataacgatctcagattcaacaagacgcgggagcattttccgtccctgaaagattacaacgactatcttgaggaagtcgaggatatgagtaagttgttttataacttgtctctaggttggtcatcattcaacagtaaggaagcaaatgtgattgatcaagatttgcttgtttgaaattcgtttttcaagctttcaacctgatcgaggggatagatgtcgaggtgattgaagctaaaattgccagatatcaacaggaaaatgctgaacagatatatttgtcccgggctaaaagggtatgctgttcatcattgcgggctctcgtgctgtatttgaattttatgattgataaccatcttatttcaacatctttttgtctgtaggccgaagatcttgctgccgcacttaaagcaagcagaatgaaccctggcaaggctggtgccaatgacacggttagttgatagtattagcattagattatacagttaatatatttttgctccttcaacagtataggtgttgaggattttatggttggatgtgtattttttatatatacatgagaaattccatcatctttgaatgattgcaagtcttcctctttggagagcatcatgtatgaatcttaatagattctagctgtaaaaagctctgataaaatttcttcagaaaatggtattgaaggcatactgaattttactcccgactgtacaaagatctaataaaatttcttcaggaaatgatatttaaggaattactgaattttaaagtgcaaaactttagaatctttttaacttgacatcctatcaaaagacgtttgatacaagacttgaaagaagaaatactgtcatcaaattgtgatcaagctgaaacatgccaccacatgagtacatgactaaagtagaaattatagggtgccgatgtaaaggccaaccattggtttcagaaatgatgtctcagttgacaatgcatttcatatccttaaacaatttggtttgcatagtaatctttcagcttcacaaattggctgtttaaattatctggctatattatggcattactatgtaccatgtcagtttggaccttactttgtagtatttgctaattttgttgagctattctatttcatctgatttgactacttcatgtgatgtgaggtagaattgtagaaagaatttgatgtaaacttctcgttcttcttctctgtaacagcaacacttgaaattggtgcattcatctattgattcgatacactgtaatatgttctgttcttttgtttattagaaagatgtggtatttattccaatacttggtactcttgcaacttgtaacaggctgctggaagctctcagggcattagtagtggcgcgggagttcaggaaggccagtatgcgcctgctgctgttcccggtgggctagctcagcctcggccaacagggatggccctcaaccgatcggcggttcatcggttcctcttcaaggagatgatgaggagaccatgaggctacgtgcggagagcggggctcgagctggtggatggtccatcgaaantgtgcaagagaagagcattgcaggaagcgttcagtaccatattcgtctgacggtcagattagacgcaagagcacctaacatgtaggatgcctgataattttgtggacatccttt

SEQ ID NO: 506 - DNA, 1395 bp, Oryza sativa
tgtcctaccgggcagctatatcaactattctcagtaacctctttttggtcttgatggtttataccaactttgcagaaggatatcatcagctttgggtgtttgcacgactcagtatgatatatgcaacatcaaatcaattatgacaaaatgaaagcctacgagaaggaaatagaagcaagcaagcatagtctttacttcatcagccttttataacttctattagttaggcattagacttacatgataaaaggtcacactagaaaaagaaaaaaatattaaacacgacatatgaaacaaaaactgcacggagaatacctgaatatttaagtaatggagacctgcaactagggtaggaaaaacaaggcccgaagaaccatgtggaaactcggtcaagttatgaaaccacagaataccaccctgtataattgtcaaaaaaaatgaaaacaaaaggttaaacctgaagaaggtcaaaataaaataaataaattaaaatggagtagacagtataagaatgtgaatatatctattgtattaagaaccagaaaccttgaacatttgcaattgtgcatctgattcatagaaatgggaaagaaaattaaacttctcttatggcaacaaaaaaaaaacaaatttaccaagtttaatggccatttacttaccatgctctgttcacaaggtttcctttatttaaacatgaaaacaactcatttgctgcttttataaaaatggtgaaatgtacttctgactcacaatgtcaccagtacctatttgtatcacaacttaaatagatattatgtgctctagctcttttgaaagaatagtctaagtcaccttggacaatatagtacaaataacgttctttgcaattccacatcgcattttaatttttcagggctaaatgacccaatgcatgtgtgacagcatttgttaactgtattccatttgatccggcaaacatgccaaaggcatagccaaaaaaatattacaaagtttttattctattaaaattctaaaaagacgcatcataattttaattaatagaaatgtttttttagcatatgaaattataaaggaccttcggcaatggaatttaaagcatcaaaacaatactaaaaatgagcgtagctcatgaatggttataaaacaggggggaacactacatataataaagtatagctgctagtacaaatgtgtaatataataaaaaaaataccttgtacatacattatctagtccagggtgattgctcaaacacatagtccttattgttgacatccacagtataaagcacgggaactgcgtatacaacaaacaataatgaacaattcggaaaacaaattatgatgccaatgtaagattcgtagctattattagacaatatcaaggatagaagac

SEQ ID NO: 507 - DNA, 522 bp, Oryza sativa
cgggcgggctaatgcgcccaaacatgatttcttcttggtttaaaaaggcgagctcctccccaagttcaggaggcctttaaacccttttaattagtcatcatcatcatgcattccatgaggaatgatctctataatttacatttgggaaggaaataaaatgaatcacatacaattgactttgcttttcatattcgtttcgaacttcatgaacatgcaccatgacttccaaatcttgctctagccatttttgcaatgatttctcagtcatctgcattacaaaaaaaagtattctcaaggatatttccaaataagcaactgatctttttctttaagtatggaaaataacttacatgagagccaggagaagtaccattcatgcctgatgtgtttggaagaaagcaaaaaaaaaaaaaaagaaaaagaaggaagagctgttagattgggagtattaattataatgcgaaaaatggtcgcaatgcggagagagatacctgagttgtcacgtcctgatgatttccgagc

SEQ ID NO: 508 - DNA, 689 bp, Oryza sativa
  unsure (1)..(689): unsure at all n locations
acctatgaatcaggaagattcagtggtatgtagatctgtatcacatagctatcgctgttaatatgattaaacatagataagaattaaagcagagaaagccatacttacactcattctccagcagataactccactggtatgctattccttcgctagcctcctttgaagaatcagaagtaaacactagcaacctgtggttctttgcaaccatatctgtgacacttggccagtcctttccattagttggcatttctgagatagggtaccaatatttcgtcaagtcagcagcagtaaacaatttgctcaatcccatcgttgaatggacgtaatcctcaatgaatattgttattatctctgtcggattctcagatagaaatgcttccacctctttcaatgtgtcaaattgggctggttggctaaacaatannatattttcaattttaaaancactnnttagtttttttagggaaggttgggttaaaaaaaccaaggnaaactgttgaaagataacgtgaatagattcaaaagcaaacaataccactatgttactaaactatccaaacaattgatacctaaaggaaatttattgaaatgttgtcccaaaacaggagacgattggaaaacaaagcaaccagtgcaggacttcttatctaaatggcacgcgcctttctttaaatcttagcacaaat

SEQ ID NO: 509 - DNA, 508 bp, Oryza sativa
ttccaaatcttgctctagccatttttgcaatgatttcgcagtcatctgcattacaaaaaaaagtattctcaaggatatttccaaataagcaactgatctttttctttaagtatggaaaataacttacatgagagccaggagaagtaccattcatgcctgatgtgtttggaagaaagcaaaaaaaaaaaaaaagaaaaagaaggaagagctgttagattgggagtattaattataatgcgaaaaatggtcgcaatgcggagagagatacctgagttgtcacgtcctgatgatttccgagcctctagtaactctttcagccttttggtagccatcgcagcttcttcagtcttcctctgcaaaacctgcataaagatgcaaaactttgatatttaatattttataaatagacatgataatatgagggaaaaacttacacgtaattatatagctaagtaagatatgaactttgacgaaaactatgtcagggcagctagttacacataaagtg

SEQ ID NO: 510 - DNA, 637 bp, Oryza sativa
tatttgagaaatcaattgctttaaaggtagttagcattctattgaatgtcatatcaaaccctttgtatgtgatagtgatgatgtctcgatagataaatccttgtgaaaagtttgtttggtgctccaaaacttgtccatcatcgacatttgccatcattgatttcagtttctcaaaccattttgggggcaactgaccagatagagtgttattggctaaatcaagtatttgcaagcttgagaagtgatcccttgttagatcactattatggagacccttaattgtgccatataattggtttgatctcagtacaagaactcgaagcttgggaagattccccagccacaaagggaacagatcgaggatgtgattgttactaacatcgaggagttccagacttttgcagtttgatagtgttctgggcagcctcccttcaatttggttgctgttcaaatctatagtctcaagcttacatccttctttaatgcccttaggcaacatcccgttgaatttattccccctcaaattcagtacccttaagcttctgccttctaccagacaagatggaacgaaaccactaaagttgttatcagataagtacaggaattggagtttcttcatactacaaatggaaatggg

SEQ ID NO: 511 - DNA, 657 bp, Oryza sativa
atatttatgcttgtattgctgcattttgtttctcagggcaaatactttgtcaccaaatgcaagacaagctaggatagcatcacttgaaagcatggtgacaatatcttcaaatactctcgttgctatggcttctcaactctcagaagctgaagaaagagagcgtgcattctctgggcgtggtcggtggaatcagttgcgttcaatggcagaggcaaagagtttactgcagtatatatttaacgttgctgcagatgcaaggttggtatttattcttttggcttcattatttaatagtatggtagcatccatccttgtaggacttctcaatttgcagaacctggaaacaaattatttttactaaagagctaaaaatctcactttttctttctaaatagttgaaaatctgtaagtgttattttgctaagaatatggcactgattcgaataaaaaagtgtggtactgatttgaaaataggaataacaaaaaaaaaattctgaactcaagggcaacttttattctttctgaaagcatgacaaccatgtgaatggaagaacaatgcaaagcggtttttttgtaactttgaaaaaatgatcattttgacaaaagtatggaactaacctcaacttgtgaattatcaatgccaagtaagggagaaag

SEQ ID NO: 512 - DNA, 997 bp, Oryza sativa
ttgtattcgattcaccctggaagcactaagatgtatcaagatctaaagcaacaattttggtgggccagtatgcgacgtgagatagcagaatatgtggctctatgtgatgtatgtcagcgggtcaaagccgaacatcagaagccagctggtctgttacaaccgttgaagattccagagtggaagtgggaagaaataggaatggattttataaccggtctacccagaacgtcggcaggacatgattctatttgggtagtggttgatcggttgacaaaagtcgctcacttcataccggtcaagacaacttatacggggcataagcttgcagagttatatatggctagagtggtatgtttgcatggggttcctaagaagatagtgtcggatagaggtagtcagtttacttcgaagttttggcagaaattacaatcagaattgggtacccgtttgaatttcagtaccgcttaccaccctcaaacagatggtcagacggaaagagtaaaccaaatattagaagatatgttgagagcttgtgttctagattttggtggaagttgggataagaatttgccgtatgcggaattctcatataacaatagttatcaagctagtttgcaaatgtctccgaatgaagcattatatggtcgaaagtgccgtacgccgcttctttgggatcaaaccggagagcgtcaagtttttgggacagacatattgcgagaggcggaagaaaaagtgaagattatccaagaaaggttgcgcgttgctcagtcgcgtcagaagagctatgctgacaatcgtcgcagggatttggttttcgaagaaggagattatgtgtatcttcgggttacgccgttacgaggagttcatcgtttccaaaccaaagggaaattggcaccgcgttttgtgggaccttttaagatcgtgagtcgaaaaggtgaagtagcttatcagttagagttgtctccgtcaatggccggaatacatgatgtgtttcatg

SEQ ID NO: 513 - DNA, 2258 bp, Oryza sativa
cagactgagaagtggcgagaagtccatgggggtcgctggggagtccatgccttgtttataagggggtgattatgatccaggaacggtgcactgttttgagttgtgttgtgcaaagggtattgtcacgatttccccctttgcaatgccgtggtggtatttcggggcatggcaacatgtgtggaatcgtgtcttgtgggtacagtggtacacctgtggccagagtaaaactattcgaatagccgtgcccgcggttatgggcgagttgagcaatgtttttcgtgattagtctcacacctttcacaatgattattgatgattaactggtaataatttgcttagctcctggtttggagttagatctgttcagccgggtatggttgttcaggatggttgggcctgtacagcatgggtgtgctgttcagtgttgtttaaaatttcggattaattaatctactgttttactattcttaactctttgctaaatgctgctttcgcaaatgagcctatattatgccatcctttggaatccttgtgcacttgcatatttgctgtgtggcttgttgagtatgtcatatgctcattcttgcaataatcatcaaacctcagttgaagataaaggatccagaaggagaagacgtttggcttataccccagttgagctgcctgtgggagtggagccggagcttcgctagattttattttccgctgcagttttcttcatggtgaggactaagtgcctcttaagtaagtatttatcgttttagttaatttgatgaatctgtatattaaattgtcagtttgtgtaccttggctgattcctggacgagaattttatgcacaaataagttcggaaattactagtgaatttccgggcgtgacaaaggtgacaatgttgggaaagctggcagcaaagaggtgattggaaaacagccaagacaggctaacccgaagaagaaaacatccagtcgtccaataccaaaaatcagaaaatcgaccaggtatgaatcagcttgtcatttctcctgtgttgccttgacatgcatcatcaatataacacatctcgaatcctcaggaaaccatcagacatcgatccagctggaaaagaccctgagtcgaccgacaaggagactggttctgcggctgccagggaatccgagccgactgaagaaaaccgctcaactggcagtcagtcggcgaccgttaatgtagaagctgggaacaagcccctgactggaaatcagtcggcagaagctgaaactgacgctcaccaaaagcccccgattggagaccagctggaggttgaaccaaataaagacatcccggaaacagaggaacaaacgagcatccctccctttacaacaccaatgctggtccaaaggtcagtacttttgacaaaatacaagggacagctcgccctcctccgaaggttataacaggtaactgagcctctgaatccatttatattgaaaaagttctcttcaatcgctttatcactcttttcgtaaatgcataggcccaataattggcgacgaagaagaaattcttcggatacgatcagctgaagactcttgcccacccatcttagtcaaatggtgagatgacgaaatgcagccgcaagaaattgtaataaataagcagaaagaagacgaagaagtgtctctactcacaaagacacttaatcaagccactcgtcttgtaaatgtacgtcttctgcttatagcttgactcatcctgttggtcagtcctgtgaactgaataaacttgtaatgctgagaattcatcttaggaatgaagcaaagactgcaacccttgaaaaactggtcccacatcttggaaccctggaagcagggaccagagcccaactccacgaaaccagggagcttgccaggaagactgaacatgatctcagggactggattgccgagcttcaagattccaatttcgagctgagtggttcatctaaaggtaacccctattcctgaataacttattccaaactgtcatccgtgttccaccaaccgctgggatgtattgcagtataagctgccaagatcaccgagctagaaaaagataagggtgaatgtcacacccgaaaataccccaacgggcgttccttagtgcgtgtattattccttgtcccaggaggcaaggtacaccaaaagttgatacatttcagagtttatcaagcggaagcgtaaataattaatttattacatgggcggcaaaggcccagcacacacaaagacaaacgggaaaca

SEQ ID NO: 514 - DNA, 2390 bp, Oryza sativa
aggtaaaagagatggagacaacgatttttatacaggttcgggccccttatctgacaggtaatagccctactcctgttggccgaagccgttgttgttcttattcatctgaatctcacaagtacaataattatgataatctatctagctgtcatcgacttggcggctagataaccaactcgtagtcgacgacaacatagtcttccttcttgaatatgaactcgtcgggatcagagatgacgctagatccctcttgccagcctccgtagacaccggatagggtatgtctaggcttatctctaacatcgatctctggcggcgtattggcttgtgtgtatgttgtgtcttgtggcttcgtagactgtggtggatgtctctcctctcctctagagggacttgtatttataccatagatgcccccttgtccaagtaaactagggagaccagtatggatataatctgattagttcttatcgtttccatatagaactttactcgtccttcattatccggaactccttcaatatacgaggattgtttccgtataagacttggtatgtggtgggccccgccgagtttagtcgattactattaggtatgtggtatccataaccctgacatatatatcttgttagttgtaggatcaaactaactaacatgccctgaaccctgattgacagaacatgtactacagctaaccaaatctctcaggcctctatgtgtacgataaattttgtgtcaataaatttgtatatgaatacagactgtttgagaaactgaaaattctgttgaaaaatacaactgctagctagaaacttcccccagcataaacttttattctgttccagttaatgcgcaacgtaatgccgatgctgacagccggacaccgaagcgctcatgtcgatcaccaacgcatatcgcagcacaccgaagcccgccgcctcgccgccggtgcccagccgccgcccagtcatcggcatgcatgaacaagctagctttggtcgtaaaccagctgtgccaaattgatcaatcaagcacgaacgctcaatgatcgatcgattgctcgatcttggacggactgtccctaatttttttttcacgaacgtataaaagaattgcaagttaatatatcaggaactgcccctaatttaatcatgctaatgaaattatttgatcccggtcaattaatctgtagttaattttcagatcgatcatccgtcattttacttctccttccgtgcagtcaaatcctacgggggtatttggtacttgtaactgtcaagctaaccaagtagagatggaattgaatttggtgatcattaaagttgatggagcaactaattgcatgtatgcttgtcggttaaactttccattcctcttgcgacgggagctttcgacgcgtgcatatgactggaaggatggcggcgccggcgccgccgctccccggcggctctcctgctataggctaggttgtaacgagttaattattgaggaactgtactttttccggattatctttttgattatataagaataaattagatactataataaataaagttaataaataatctaacagaagtggctaagcaatacaataggacttaacaagaaagtttattgggaaaatatattttctgaagcatatgaagcaataatctacctatctatctatctatctatctatctatctatctatctatctatctatctattatatattaaaagtccatgaaacatcctaaaaaagcttctacgtcgacacatgacacttctagaaacgttcccaagctatcaagtgatactctaataaattggataagcatgtaactattgattttcacttaattcggtggacccatcaattttgaccattagattaaattctcatctctccaccctaatatatgatggttaaatgctttggtcccaccaaaataattaactacgagtaaacatatgtagagaatcagttgttttctctcccgaaaaaaataccgcagaattaattcttggaaagaaaaccgacgttgtggatttatcatttaatgcaggagcctgggtgtgtgcttccatcatccaaaaataaataaaacaacgaacactttttaagtgaatatcacctttgcgtcaaaaaagtgaatatcactaactgttctaaactatttacagatttaggttccgattcatgaatattgccctcggtagttagtttctgaatttttcctgtatctgtttgattacaaaagtgaatatcactgactgttctaaactatttatacagatttagggtcagattcatgaatattgccctcagggcctgatgaatttctcactaaaataaattatcttctctcctccctaatatatgatggttgcatgctttggtccca

SEQ ID NO: 515 - DNA, 2068 bp, Oryza sativa
cgaaggcgagctttggacctgcactggagttaagcagatctcccaggccatgtgttttctgtcaacacgcttttggcacgccctgtgggacctgattagaagtcagacgtcagttcttcctcatggcttagaaacaaccaccaccaccatcaagcccaggttccgttaaaggcaaggcgtcgaagccgggattaactgacatcattgatgacaacgtcatgccaatcgatccagagaaattcacgcctgagcagaagcaggagtttgaagcgacgctgcagcaagcacgagatcagttcctgaactcgttcatgcaaacccgcaaggggacacttgttcagaagtataaaataaaattggttgctgataatcttgggaccggttcttctaaatatggagaggtgaaaaaagctccagaaggctcggctcagccgagcaacaaaggtgctactgatggttctctaggaaatcaaggcgacaaccctcaaggggtccatggagtacaaggtgatagagtgcatggagctcaaggtggtggtgctcaagggccgcaaggaggaaatcttaatcagagtaacgagctagcacaagattttttcaataacttccaagatcgggttgattacgctgtgcatcatgctctgatcaatcagtccggggtattagtcaatacattgtcaaacatgatgaagacaatagccgatggttcgatagtcgagcatcaggctacaggcccagtttacttgcaaggaggtgtcttcccgaattatcgatctttgatcacgaatgttcagccatctgttcaagcggttcgctccgttgcacccacaattcagccgacggcgccagcatcaactcccctgcatggtacatcagctatggcgccaggccagccaatgaaccttcggttgttaatgagggagcatccatagcctattgggcagattgcgaatcagccgacccaagatcaagttgctgccatgtttttgccacctccacctattgttgatccagtgcagcagcagccgattcagcagacaccaccaatccagccagttgtacagccaatccaacaacaggtcgtacaaccagctcagcaaacaccaccaaggcagcagcctctgcaaccaattcagcaaacgccaccaaggcagcagcttcagccgatccaacagactctggtgagacagcagatcattcagccaattcagcacccggggtcggcaaatgcatcgccggagtttgcaccacctggtgggcaacttgcgcagcaatttgtaaaccaagtcgtcctagaacatttggttcaccatgcacagccggcgggcatagtgatgcctcagatggttcctgagcacttggtgcgcaacatccagccgaatctccataattatcaagggggtaacttgaactatcaatatcagcctccttccccacaagcccaatatcagccagggggattggctcagcccagttcgcatctcagtttggtcaattcgagcccatgcagcaacagccgcaacgagcagctcagcaacgaccatgggccgatgtgattgctgatgtaatgaggaacaatttggactcaaaccaaaagaaactggaagtttgtatcggcaaccttaccctgagtggtttgaaagagttcctcttcccaatcagtttaaggttccaaatttctccaaatttttagggcaagagggcgtgtcaacttatgagcacatcagccgattccttgctcagtgtggtgaagcatcggctatagacactctgaaagttaggttgtttcggttatctctatctggatcagcttttacttggttttcctctttcccatatgggtcaatcaacagctgggccgatttggaaaagcaattccacagctacttctacagtggggttcatgagatgaagttgtctgacttgacagcgattaagcagtggcatgatgaacccgtgcacaagtatattcagaggttcagagagatgaggaacaagtgctttagcttgagtttgaccgatgctcagttagccgatttggcccttcaagggtatgattcctcaatca

SEQ ID NO: 516 - DNA, 728 bp, Oryza sativa
aaagtcctccatctgcctcacgaattctgtgggcggctttacagaaatatttatgagggataataccttctcgaatgcaattgacatcagcaccagaatcaattaaagtgatatgctgaaagtaggatccgtctataaaacgatacataacttctgtgtaccatttttgcttcatatatttttgaatggttccaacaacctgatcatcttcttgaattggttcgtccttttcttccatatggaatccttcttttaattctaacatgtatagacgctttcttatttcttctaaatcttgtttcataattttttggtcttcgaataggctcatcaaatctggtttctcattcttctttttctgttcatctaatcttttgaacacttcatcaatagagaggaatttgctcttttgaatatccttttttagtttatccttatcagtcttgactcttgaaaggaatttttcgagaactcttcttttttcttctggatcttgaatggtttcaaaagtatcgagaacaaattcttctaaactggttaaaacgagtatattttcatcagactcttcttctgaattatctggctcataacaagagcaaccactgtcttggcaacaattaatctctgcatttttttcttcatctgaacatgagtcattgtctatattatttagtattgtttcaagtttttctttaacatcttctgattctgaatctaacaaggcttgg

SEQ ID NO: 517 - DNA, 2980 bp, Oryza sativa
gtgcagtagcgagaagtctgttggcactatgtcggtaaagaatgcttcatttatatcttttgaggatattgagaaaagtatttctgactggaagattcctaaggttaatattaaggaaatatatcatgtaggtactttttcgttacttagtgactactatattaaaacaattgaaatattccaattagttctttgcatgaaaccctgcatcttctttctgaaagagaaatcaattctataagagctaaacatcaatatcactaccttcactttggtcttatacaagttgctatcagatccttgactagaaagggtttgaacgtctctgttctggcttgtctaagagattgcagaaataaaaggttcaaagattccttatatctctaattttaatgaagataagattcccactaaagcaaggcccattcagatgaatagtcgactttaagaaatttgcaagcaagaaataaaaaacctgctagataaaagcttaataaggaaacgttcctctcctttgagttgtgcagccttctatgtagaaaatgctgctgaaaaagaacgaggagttcctcggctagttattaattacaaacccctcaataaagttctacaatggataaggtatccaataccttataagcatgacttaatacaaaggattcagggttcaaagatatattctaaatttgatatgaagtctgggttttggcaagtccaaataaaagaagaggatagatataaaactgcttttactactccttttggtcattatgagtggaacgtaatgccgtttggtttaaaaaatgctccttctgagttccaaaaaatcatgaatgagattttccttccctttacatcctttattatagtttatatagatgatgttttaatattttcccaagatgttgaccaacattggaaacaccctaatatattttataaaatcatagttcaaaacggtttagtagtctctgctaagaaaatgaaacttttccaaactaatgttcagtttctcggttataaaattcaatatgatcgagtccaaccagtagcaagagtaatagaatttgcagaaaaatttccagatgagataaaagataaaacacagttgcaaagatttctagggtgtttaaactatgtctccgatttttataaagatcttgcaaaagacagaaagattttaaccgagaggttgaagaaaaagcctccagcttggacagctaaacatactcaagctgttaagaagatcaaaggtaaggtcaaaaccttgcactgtctttatatcctagatcaagatgccttcaaaattatcgaatcagatgcctcagatcatggttatggaggaattcttaaacaaaaaaaggattccagagagcagctggtcaggttcacctcatatagatactgcattcctatcctcatatctggtgactagacccctagtcactgccctgggttagagctggtatcagagccaagtgctcgtaacctccccaagccatcttctccgaaaggggggggggaagaggggtcggatagcgtgctgaagtcgcggtgatcccgaacggtgtggtggtgttctgaagtcgcgaagttcccgaacctttgatcggttgcctgaagtcgcgttgccttgttgagccgcagaaggcgtttgtcggcgtaattcgttgactgggcacttatcaaaggcaaaggttgaacttaattgtgggaaatattccctgccgttgactggaacacatcatatccaaatagcttgatcataattgtgggagatttccccgccgttgtctggtaactacctacctatcttcctatctttcgtataagatgtcttggttggttagatcacgaagagccactgatcgatctgtagcctcgtgcagtagcgagaagtctattggcactatgtcgataaagaatgcttcatctatatcttttgaggatattgagaaaagtatttccaactggaagattcctaaggttaatattaaggaaatatatcatgtaggtactttttcgttacttagtgactactatattaaaacaattgaaaaaactattccaattagttctttgcatgaaaccctgcatcttctttcagaaagagaaatcaattgtataagagctaaacatcaatatcactaccttcattttggtcttatacaagttgctatcagatccttaactagaaagggtttgaacgtctctgttctgccttgtctaagagattgcagaaataaaaggttcaaagattccttacttggcatggtggaagctagcctcagtaatggtcctgtttattttaacatctttcctgatttttctgtatccctctcagacacaaatatccataaagttctcactctcaacttacaaacatctggttatgaactagaaccagggagtgaaaacatctccgttacctacagagtttactacaaagccatgacaactttagcaccttgtgccaaacattatacaccaaaaggcctaaccactctccttcaaaccaatcctaataacagatgtactacccccaaaaccctgaaatgggatgagatcaccctgcctgagaaatgggttttatctcaagctgttgaacctaagtctatggatcaatcagaagtcgaatccttgattgaaacaccagacggagatgttgagataacatttacttcaaaacaaaaagcctttctccagtctagaccttctgtcagtctagattctaggcctaggacaaaacctcaaaatgttgtctatgctacctatgaagacaactccgacgaaccttcaatctcagacttcgatatcaatgttatcgagcttgatgttggctttgttattgccatagaagaagatgagtttgaaattgataaagatttgcttaaaaaagaactcaggcttcaaaagaaccgacccaagatgaaaagatactttgaaagggtcgatgaaccatttagactaaaaataagag

SEQ ID NO: 518 - DNA, 3444 bp, Oryza sativa
  unsure (1)..(3444): unsure at all n locations
gattcttattcctgattctggtgttcccgataacagcagaacttatgcctttctcatttcgatttatctttatgatgggggttctctatcttctctgcagaatatatacagaagagggaaaatcgctatacctgaaaggactgtaaatttggaaaaagaggatggtgttgaaaaaattgtagtccttcactcctttgtaatatgaaataatccctaaattgttgcaaggattgtagtccagtcgtccagattgtaacctgaacagccttttttttttgttcaaattgcaagaatactgagttatccctttgtaatctgtagactgtatttttctatctggaatacatatgagcgtttttggttgttctgaaatattcaatctgatggatgtgttacaaaaactgtgattgtttatctaattacgtgagtgaataaaatacggaatattgtataatctgaatttttgaagaaatttaataagaacaagtagcaactcacaaggtgagttcaggcaaggaaaagatgaggataattaagagcaactcaagaactggtcgccacaaagtcaagtttttacatgttaataagtcacaatctccgtattaacgtaactaataaatccatggtcgcaactaatatcatcaatgaaaattcagtaaatccattgctccttgtcgtcatgcgcagcgcaggtgaaaccagccggcacctgatgagacgaaggcagaagcccggcaggtcgatctgttcttctccaggcctcctcgtcctaccatcactatcgtcgacggcgtcggcgagaggtgattccggtccgattgaggtgagagggcgagggagcgatcgccgcagcgcgtccgcaaatcgtgctcgccgttcgatctcttttttatccacgcgtccaccatcggcgcccggggctgcagaggcttcgctttgcaccggtgtatgcaccaattttttttcaaatcaactcggactcggttagtcgctttgtactgccgcgcgcgcgcgtttcccatctccgactcggattacacgtaggcgcgccgcgcgcgcctatttatagccgctgtccgtctccttactccatgcattagcctgattgctagttgctgctagcgcgtggcacaagagcagcgagaccagcagtaagctaggcatggcggcgcgcgccggcgacaccggcctgagcaaggtcaggcgctactggcccgggagggcgccggactgggcgtgggcgggcgccgctgtcgctcacgacgaggacgacgcacgtctcgtctcgacgcttgacgagatcaagcacgtggaggaggaggtgctgaggtcgccgcgccgccgccgtgtgcggcgggctcccgagatcgcgtcggcggcaccggcggtagatgactggcacgagcccgatccgatcgaggaggaacaagacgaagatgatgatgatgatgcccgggaggagcgcagagcgaggataagggagagggcgctgctcctgaggcggcatgaggaggagcagcttcttcttcttcacccgcagcatcaggaggaggaagatgaggaggcgtctgagtctgaagagacngcggaatcggactccgacgtcggcgagcagatggccgtcgtctacatggccgtgccactgtttataccaaagccgcggcgtgacaccatccggctcaaggagaaagaacggcagcgatttgaggacgagctgcacggaagaggctcgaggacaggaaggctcagacgaggcagatcttgctccaagagatcatcaacgaagagctcctcgccgccaacacagcttcagatgaagccgccatcaacggcgtggacaccgacgacgaggtggaccaagccgaggagtacgagtcgtggcggcgccgggagatggcgaggatcaagaggatcagggaggagagcggcatcgacgacgacaagtcgatcatggaagacgagaacccggttgctgatcgtcccaagaagaagatgaagatcaagaagcagatgaggttcatgcaaagatactaccacaagggctgcttcttccaacaagacgccgacgatgcggcgcagacggcaggatcatgcgaaatctaccggcgagatttctccgggccgaccgggttggacaagatggacgtaagcgtcttgcccaaggtgttgcaggtgaagcactttgggcggcgtgggggaaggaagtggacgcatctagttaacgaggacaccacgtacaggacaccacgtacggtgagtgattttgtatctatccccacaattttgtaaaatttcaaaaaatgtgagcagcggcaagttatttttcacccccttgtgacgtactcatctgtattttaatgtatgacgccgtttactttttgaccaacgtttgatcatttgtcttattcaaaattattatgcaaatatataatcatgtgacaaaaaatttaattgtaataaataaagcggtataatcttatcttagatgaatagttttggagaaaaagtattcttacatggttgcataatgcatgctagtagatatcttcaaaactatagcccaatgcacaatatttggcaccatagatctttacttgaaatgatatctggaatggagacattagacattttcatagattgttcgggtgggactcagtcaaatccatatgtgacaaaacatttggagatagtgttaacttacctctacctgctcaagccttagatgaatttcagcagctacaagttgaattgaatgagttacaacttcaaatacaaagggagatccttagtctgtcatatggaacagccgtgtttgttcctcagaattttcacgggctgaattttgtgaatcattctccccctagtcaccatttggctctggaaaactaaatgtgtcgtcaagaacaaagtatttatgtggctgatgttgtatgatcgattgaataccggagacacgttggacaaaatcacaaaaaactattgtgctctagaatgcagatctaccttgtgttctttgcttactggttctagggagacaacaatgcatcccttcttcgatcatgtgtcgagaccgtattagagtaagatggaatgctaatcttgagtttttccaaatggtggtcttggcacgaccgaggtttaggcaaaagagtttcttggatataatgttcatagcttgctggcatatattgaagcaatgaaatgaaataatctttcaaaaattgttaccagaagaagacaatttgttccattcttttaacaatgaaattctcttgcatatgtgcaagatgaataagccccttaatttagtcatttttgactgattacaacatttacaataattattttgatgtgatactcttgcgtttaaatattttactgttttaaatatataactattaggcaaagcttgttagaatttttcataaaaaaggatcagggtac

SEQ ID NO: 519 - DNA, 627 bp, Oryza sativa
attgtaatttcggtgcccaaagatttagttatttcaagcactggtggtgtaccagcgaatactcgatccaaagctatcactttatcacaagacgatagttcactctagaatgagcaggaaactgactatatatagattccattacaaagctcagtgcctcagttctgtaatatacaattgattcgtccatccaattacttgggtgaaccatcggaacaactacccgacgttcacctctagtcgtaatctgattcctcggacaattcaccgctttcctgcattgaaaataaggtaagtatgattttttgcatggaaaaattgaatagacacgaaaaaaacacgtgcaatatatatgcagaaaatacacctttttcttgtcaaattcagccaccgccttctcatactctgcacgcttctcgggtgctatatcataatacttcactctttcctggggtaatgaacaaaagtgaaattgttgacataagtatgatatgagtttatgtctaaaatgcaatgcgcaaaaatgtgaaatgaagctggacatatctgatatgagatattgtattggctaaaccatttattttgacaatgaagtaaaatttctacatagtccactgtgtactaaac

SEQ ID NO: 520 - DNA, 1739 bp, Oryza sativa
acacttatcttctcctcttcgccgctacttgcacctccccaccacatatctgctgctcttcgccttcccgtcagcaagaacagctttcacaagctcttcagcctccctccccaggtaacaactgcagcttattatcttcagtaatctccatatgttcattcctatccctcctctccctatacagaagtgggtcagatccaaacatctgtaatagaacaatataggaaagtattagagcaaacaaactaaacatttttttgatctctgcaatgggcacgcgttaaccaacaggtcttctatttctttcctagaacactatggaggcccatcaagataaccaccctagccagagacaaccacgaccattgtcctatggcagtagccgtccactgttagcgacaaaattttcaagccgcggagaaatttcacagctatttgccgatgtcatttaccaggacgctgtggttgtcaccgttcttggagctggcaatccaaacacaacgaaaatatcagctatgataggcttcgtgtgtgactgccagattgatgattttgccttactgccgttcaggcacaaaatgtacattgtgctattcatggactcagacaagcaatatgagagatctcaaaaggcgtttgcccagaaatcctacacattccaaacaactcagctgcattttgagcctttcaagatgaacctttcaagatgaaccttcatagtgtcccaaacccactgcgccaaagagtcatacttgcactcgaaggaataccaccagaattatggaacaagcaggccatgaaagaattactagacggtagttgtatggttgaagagctttatgaagagcatcatatacaaaacctgtcgattttcagattgtctgcatggacaactgaccgcaatctcatccccaaactaatggattggaatattgaggaggttcaaggagaggaacaatcatctgaccaaggctggaaacgcaatgcagatttatttgtcatattaattcacattgaaaagctttttgactacactgatgaagacagcgacaatgagatcgatggagaagttttaaagcaatatgagaaagacaaccgtcgactgccagttataaagacattccagtgggtatctcggcaaacagacacagatagcggacctgttgaaggcgggtcgccggcaaggccaccacggcgtcttcctcttgaatttcgtaggcgccacccatatcatccagctccatagcagaatagttccttctatatatgttctcaccaaccacatagccaaaccacttatgctatagatctcctatgtgatctttttttggctactccattagagtcatacgtaattctcctggttcgaatatacaattccatcgcatgcactatgtaacatatcattttacgtctgttctcgcgacactctattttgctttcaactgatcttcaatgtttgcttacactcttccaaacttaacattactcttcactgccattacggcgcggcaaggcacgccaaacgtcctagtataatgcataagcagtggcgaatctaggataaaagttgagagggtgctccatgtaagccagtttaagctaagttaaatactatcttgtcccaacttttactctctcgttccgcgcacaaccgtgcatgttccccaaattgtaaatgatgcgtttttttaaaaaaaatctatagaaaatttggggtaccgagctcgaattcgccc

SEQ ID NO: 521 - DNA, 598 bp, Oryza sativa
atccataactaactcccccctctggcggcatgttactcttttaagactgaaaattaatatgagacttcttcaaaatgggcttaatgaacgcacccgacgagaccttgaagaatttggtaattggatcctagatctcggtgatggcatgctacctacaaccaaaaaaaacgatgaatctgaaccaacatggatagatattcctaatgatttactaataaagacacccggcgacaaagtaaaggcaattatagatgaggtctttccagatttcccctccagctacacagatcattcctatctagcatgtcgtgctattgtttgcccaaataactcaacagtcgatgaaataaatgattgtgttgttaagatgatacctaccgaagctaaagaatatcttagctgtgatacaatttcaaaagcatgtgaccatatgcctgactttgatatactctacccaactgagttcttagattctattaatgttaacaattttccatcacatcgtcttactcttaaaaagggtgtcacagttatgttgttgcgaaatttaaatcaatctatgggtctttataatggcacaagactattggttgtttct

SEQ ID NO: 522 - DNA, 594 bp, Oryza sativa
aaagttatcatctacgttaagagttcttcaatttgtgttttctcgggttcggcggtctaaccagcaagtcgtcggcggttagaccggcgacaccacggcggttagaccggcgaagaagcggtggtcagaccggcgacggcatcaggcgacttcaggcgacaggagttgatctcagcggttcgaccggtgttattacctcggtcagaccaactgcttccaggcggtcagaccggtgcaactactttggtcagaccgcgatccgtcgaatttgagggtaacttctaattctgcaaaaagtttgggtttttgagtataccaaccattcaactctctctggttggcttagttcttgtgtttcgatcctacaatcacctcctcgattgaatcacatatatgcatgcaaacaatataattagaaaacttaatggtacaggaattaaaataaatatttaatatatgcatacatacaggccttatattataagacatgagaaaaaaaatggttgtgccttatattttggcatgtagggagtaatgatttttaaaagatgacacatgtatcagtgagagaggtttactgtagagatttattta

SEQ ID NO: 523 - DNA, 921 bp, Oryza sativa
agattgaaggatctgatcgagggttgcatagatggaattcacaagaccatgatctataatggtttggagagatatttcttcatggttgtatgtgggtaggttccggaatctttggagatttatctcagctttgagaaccaggaatctataggatgggtcagagattgcctgatcatctagccttaagagagggagcatatatatgattactcgtatggctgggtttctttctcttccttctaagagatcaaagaaataatcttggagtccaaggaatattttcatttgtctctctttaaacttttgccaaacaagatcgaggatgtcttgcccaaagcaagataaagtttgctccgtcttgaagcttaatctaggttggagattttcgtatgtggtactcatgggattttggcttttaagtttcttttggcaagaatctttgtaggcacaagatctacatggtgcttttggctgggtccggagtatatattgtggaaggaatgaattgggatgattatgcagtatgtatggtgtttggggaatggtatcatgcctttttgtggatgatgatggtttattatgtggaaaagattgcaataggttattgatatttatgtggaaagcaaccatgctcgaagcaggatctgttgagatcaaaatcttatctgagaataccttggtattcttatctgttgccatagattgttcaacttccatgggaagtttatcttggccatcacgggatttctcctcgcgataatctagtaatctctcctcatgatgagggatatcttgtagtttagcccttttttctgttatcttttgatctgagggcacgaaatttttgaaataatatgccaggccatttaaggcatgagctttttcttttttgttttttgcctgccacaagtggtttaataa

SEQ ID NO: 524 - DNA, 1503 bp, Oryza sativa
atgagaggatttgtttgagtttttcttgaatttttgatgatttgtggatgttgttgatttgtgaatatgtatgagaatgtttatgtgaataaatttgtgatgatgtgttgtgaatgaatttgtgatgatctgtatgaatgaatttgtgatgttgtggatgaatttgtgatatgtgttgtgaatcaatatgaatggagaaaaaaagggaaaaatcaaaggaggaaaaaaaagaaaaaaaaacatagatggttgtatctttagttccggttggtgactaaagatgcatctttactcccgggtatttcaaccgggactaaagatagcaatctttagtcccggattcatagtcccggtttgctacctaggattatagggggttataaaccgggactaaaaagggttagtgcaccagtgccattttatttctcccgctcaccacgaatctcaaaggacattggatggtcctaaataaacgggttattttaatgaaaccgatcatttaaaagataccaatcaacacgcatctcaaagccacatcagatatcttaaacatttttttagcaatatcgaatatttttaaaacacccaaatatattaactatcagattttattttggatggggataaaattattgtgtttgttttagcaaaaccaatcaatgaaaaaagtacgaaaatgctcattatcaagcgaccaacacaaggcgaaccgaccactcatttcctcatcctctctctctcttcttcttctctcttcgctctctctctctctcgcgcgcgcgcatccgtatttggcactcgcatctggtggcgccaccgcccttcttcctatccttcctctgcgtcattgccaaatcaccgcatctggcgccgccacccgtcgtagccacttctggcactgccacccgtcgtcctctcctctctccgtgctgctgccccatcgcctggaacttgggagctcgggagctgtggaacacgacgaccgagcttcattgtgatatcccagcccagggcttaataggattaatagaatactcatatcaacaagttgcaacttcttttctggaagccgatctctaaagaactctgaggttaagcatgcttggcctagagcaatttagggatgggtgaccgatcaggaaattctttccaggtgcgcactttcctaggaaagctaccagatgtagagagggcccggcctcggaaagtgtggggcgtcacattcatgcagcatcgatgatggtggatacgtggatgcggtggagctcgtcacgacatcgacgcggaagtggttgctaaccactggagtggaggaagaggtagatctaggttttcatcttgaattttttgatgtttcagtgcatgtactatgatgtttgattagttatatttgaaatgttgcagtgggtattcgatggtttttcattctatttctcgatctagaaatgaaacagttgggggccgaacaacgccagaaaatagcccaaacttccatcctttctt

SEQ ID NO: 525 - DNA, 1579 bp, Oryza sativa
ataggtagtacaattctccgctcgctgggctcacatagtacatcctacctatcttttcgcatggtgttctaggatgccagctacatgagctgttatcccatgtccattcctttgggaaatcgcagtatgtcagtgttcttgcagcactatgttttttattggcctcaaaccattctgtcagcatcattttttgggctgcaggacttgtaagcagcgaattcaggtcagcaccttttttgtatcgaacaaagttctggtatggaagatgcacagttaggcgctcaaccgaaggcaccctatagtggatatcaaactcaaaagcatgccaaagggactcacaagtagaaaggaaccttgcatcaatgtactcttgtatctcattccgtggtgtgctgttactgtttggtgttttctttgatgtgtcattttgtggtgcactattattttcagataactgactcggtaacttactattaacctcatagtacgctttagatctgtcggttccttttgtgacatacttaaagaggtacttaatcatgttagatttattgcaccattcgacatttatatgtgcttggtattttttaagaagttccatgttgtaaggcacaacccattgattatcgatcttcactccatttttaagaacatatcggtcgttatctctacgtttgtaaatagtaaaaccaaactcgtccattattgtctcgtcctgaaaagacttagggaagtgcttagaacactccccttttttcatgcatgggcatgatttgttctggttgccacaagggccatgcatcatgaactcatcaaccaaagcataccccaatggatcagtgaaaatgtcagggatttcagcagaaatgaacccatcaacaataggagcactgaagtcaatagtggatgcaggcagccaaataaggcaatgtatatgagggggcccacgcttttgaaattctactgtgtagagcactatatgataagcacaaaatatcagaaccaaccaagggagcgcagaacaaactaaatagagcaaaaccaaaaagcctaccagcaaggactgggccaaatgtctttccttccttaatgtccgagataaactcgtctactttcatgttgaaaactctaacaatcatatcagaacggtcgcttggtacctggcctggttcaaacaacaatgcatcgtatatttcttgccacttagaattgcaagtaaaagtcacaaataggtcaggtgctccaaatacacggcatatggccattgcatcttggtaattctgtaccatataacgtctgccaccagtaaaactggtgggcagtacatacttctttcctacagaatccccagatgcaagaccatgatcaatggcatcacttatcccttgtacagattctgagcggagttcatgttggttgtcagcaatgtattttagtctagacccttctacagttgagtatgagtcaacacatattgcatcatttagatgaccacatcaagtatagggatttagtttattcaaccggtaatggagtcggtagcggtagtaatcaagcattgtaacatagcgtcgtgaat

SEQ ID NO: 526 - DNA, 4001 bp, Oryza sativa
  unsure (1)..(4001): unsure at all n locations
tctctccagatgatcatttttctttttataaaagaaaccagatagccatcttcataactgtcaaatattaaaaagaaataggggatcaaactttcaattgagttggtccacaagacatatatttactagtgaaaaataaatctagtgatgatcttaggatgaaccacgtcatctatctatcttctattatatactaaaagtctattaaacttcctataaacattctcaagccaccacgtggcgctctacaaacgctcctaagtcgccacgtggagctctaataaattagaaaaaaatcctagaaattttaagaaaaaaagaaaaacatctcaccattggttttcacttaaatgagtggatccattatttttaatcattagatcaattttaaaggaatatatactcaatccaacctatgggcctattagatcgatctcacggaatatgtagccttcccttcccctgctgtacatgccaccgtacgtaagtacgtatatatgtgatacgtattccatatgccctccccttttctcctattttctaaaaactcattacaaaatagtttaaattttaaatagctaaataatcatgattctcaatttatatacaacattaaattcatttgtactatttttatttgtaattaaataaatacattaagatcgatattgcatatattttgcgaggtaaagaaaaaactgaaatacgtttggacatagaccctagcgtggcagtcattaaacaaataaaaaaattgacaacaactataccatcttaaatcattctatatataaatatgtacattaaattaaatatcatgtaggacgcaaaccatcaaccgtcacatcctaaaaattaagaaatatcgttgaaattctatgagaaaaacaaaagcaaaacatcctactatcattttacacttaaatcggcaaatttattattttcagccattagatatatcattctactctcataagccactacgtatcacatcttaaaaattaataaaaatcacataaaatctaaaacaatgaagcatctgacctcgataaaatcattatttcagccattagatctatatttaaagaaaaactataaaaaaataaagtaccatcccattccccctccccctcacctggattaacaaagctccatctttatattatgaaattataaatatatagtaaatgaataaagatatcgttggagtatataagtataaaaaaaaacagggagtagctaaagaaaagccctaagtgcggaaatgctaatgggcgggtgatcgctccctcacccgcccagcgatcagacgcccgccccctcccctatactactagatacactcctccctcctctcctgctacagtacaccacacaaaaatttaaaaaaaaacaaaaagttagaaaaatttatgtatagaaatactatatataaaaaatttaaattcaaattcaaatttgaatcgggtatgtaaactttttgacttataaactttgggtctataaactttaggtgtataaactttagatgtatagaaatactatatatagaaaatatttgaattcaaatttaaatttgaatcggatataattcaaattcaaatttgaatcgggtatgtaaacttttgacttataaattttgggtctataaactttgggtctataaactttagttgtataaactttagatgcatagaaatactatatatagaaaatatttgaattcaaattcaaatttgaatcagatataattcaaattcaaatttgaatcgaatatataaacttttgacttataaacttttggtctataaactaactttaggtgtataaactttagatgtatagaaatactatatataaaaaaaatatttgaattcaaattcaaatttgaatcggatatataaacttttgacttataaactttgggtctctatactttagatgtgtaaacttgaggtgtataaatttactaaaataagaaagtaatgcggtggtaaaaaagnaaaccaggtgaagggggggcgtggggcgatcgctacccccatctccaggcgatcgatcgcccattaggatcgcccccctaagtgcttcaatcctactgcatcattagtcaactgctcagtagttttgctccctccgtttaaattatactattgactttccacattcgttttaaaatgttatatataaatgttatttattttgttgtgacatattttattattattaaagaaactataagtatgacttataatttagaatatttacactaatattttaaatagaacgaataatcaaacattattttaaaaattatggtattatctattaaagaaaatagcagaggtagtattactaggggtggaaacgagccgagccaagcctagctcggttcggcttgcaatggctcgtaacaagctaggcttggcttggctcggttcggttagggatacgagctaaacnatgagctcggctcggctcgtttcctggctcgagccagctcgcgctagcttgcgaaccttccgttgaagctatataatttataatcattaagaaaagcaataacaaattatcaacatgtaaattaaaataactttatatattcaattcattaaaatctagacgataaattatatattgacaaataataactcaactgcaaaataaaatcatccatacaaatatatgatggcctaggctcacgagccaaatcaagtggctcgtgagccagctcgggcttagctcgtttcagaaacgagctaaaaaggaggcttgggcttggcttgtttggcattcaagccgaccgagctaagtgagctcgagccaagcccgagctaagctcacgagcccaagctttttttccacccctaagtattactaattagattgatttagggtagaccgcgagaggtggcggcggtcattggggtcacgtacaatactcctatctgatttgatctccaagacttcaaaacttggaaaagaaatttggtgcagaactgcagaactgcagacctgctccagatgattgccatgtggacgacgtggtgatcagacggctatctcccctcggctcctatgcagcgcgatatatatggtaggatcgatcgatcacccttctccatatggtttcctattttaacaccgcattacttttctattttagtacatttatatacctaaggtttgtgcatcataagtttacacatgtaaagtttatgcacggtggcagacttcaagttacagattataaagtttatatattgttgacgagtgatactcgcaggcaggataagttgagtattggggtatgtttgaatgagggtttatgtagtacaacatctagctaacagaagacgaggattatactggttcaggcccgttatcaggtaatagccctagtttagtttatatgagattgatgatgatgagaacagattacaaagagagtagatgaagcaaacgacaccgacgagatcatagtcaatagattcgacggggccgacgagatcatagtcgatagattcgacgagatctcccggtgacttggctccgaatacttcggcttcgtaagctgtggtgggtgtgttggcgatgatatttgatgcccttcacctccctctaggggtccgttttataccgtggattatcttacccgaagtaagagttggagatatgtaaactagtacgatatagcagatattctatcccctccaagtaggactctgatagtttcttaactcgtagagatatttttcataattcgggacagattcctaacggtgtatacggaaacgacccgtgcacgtgaaggtataccttatcggtatatttcataagtcgtaggttagagggtatgccttatccataatcctaacatacacctcaagtttagagacccaaagtttacaagtcaaaagtttatatatccgattcaaatttgaatttgaattcaaatattttttatatatagtatttctatatatctaaagtttatacac

SEQ ID NO: 527 - DNA, 1652 bp, Oryza sativa
cgaattcgagctcggtacccccttgagggccatggggaaataattcgccatgacccggtcatcgccccttgccgctacgatgatcgtggtgtagatctggaggaactcggagggattgatgctgccatcatacttctccgtaaggttggggcgaaacttcgggggccaccggacgttccgcagactcgccacgaaggccctacaacccgtccctccaggggtgagcgtggggggagggccgcctcgtgaggaggaacgtggcactccagatgaggaggcgccttcccccatgcgggcagctcagcgctcgtcccggcgtcgctcgatatggattcgagcatcctgctccctgtagagaccgtcgtgatgcctccggcttcccgaggcccccgacgatgttggagccgtggaccgcctcgagaccatggccgaccaacaggccctcctccttgctgacgaggagagggtaatgggggtatgcaacgtaccggtgacggcgggtcggccgcccgcggccaactgccgctgggcagtggtgaccaagttggccacgtcgtccaaccagcgctggacaggggtctctggctccgagttcacggggggatgccgcagaagggcacccgccgcctaaagcgcgcctcggggcgagccgccgtcaccgtaaggaggcggcgccgtgccccgatgcgtcgtggcctcccttcacctgggggcggggagagggccaaaccacccgaacgggtggggtcctccctccgcgagggttcacggcgggggggagttggagagttgcggcggcggtgacgagggccgcagctctcgctagcatcctcactcccagacggagtgggggtgaataccacctcctcctcctccaggacctcgaccatgatcgtcgagggcccagggaaacttgggacggaaggaaacgacttctctttaaagcgcgtgccctccccctacctggcgcgccagctgtcgagggatgatcctctctagcgggaggtcgtgagacccccctttcgtgagttcggccgggggaagaagctcgcttctagaaaccacgtatccgtccctaaggcccctagctagctcgcacacaatcaaattatacaaattcgggccgctgagaagcgtaataccctactcctgtgtttgggatttagattgagagttacaaaggttcctaaactcgggagaacactcttctcctagagcccaagttagttgagaatcgtccctttgctcggtgggcaaggtcctccttttatatctcaaggggataccacatgcaccgcctctacctactcttctttcgggtggggtcccaccctatcttgaccggaactcgacccgtgccttcgcctggaacctgaaccacagcttgtccttgaatggggcccagtgccgtccctcgcctgacacgggagacagccctgtcattccctcattaatgggtgaagacttgtggtggccgccgtccgaatgaccctccgatgggacgggtcatacctacctccactccgccggaagcaaatgcgacgtgggagcacggtcggtgtcaggccggtcacagaccggtcattcttgactatggcacgtcagtttagcacgccgcacgtctgtctcactgcattaaatgcgacaggggg

SEQ ID NO: 528 - DNA, 554 bp, Oryza sativa
aaagagtaaacatacttagggaaatcttctagcacatcattgcattcttccagtgtggaccactttgtgaaagaaattgactgcatattgctcactggcctatactggctggtgcactgccttacacgatagaatgtcagatcatacaccttcccttcagtgatctgaggctggaaaagctcatctaatggtgggaaaatctgggctgcaatactggctccctgtttacacagtagtacaaagggaaaatatgtgtatgaactgtaagcaaagattccaaagaactaaccgtgcgatcaagcagaaccagcccaagatggtgcaaattactttcatcattttggtcacgaaaagcccagaaccttgacacacgaacacgaattgttgggttcccaagactaggttcaagcctattaattagcgtagcctccatttgtacagaaagtttgaaacggatagttcataacggaaattcctaggatatcataggtacggcaaatagtaaaggcatagataagagggatggggtaccgagctcgaattcgccctatagt

SEQ ID NO: 529 - DNA, 616 bp, Oryza sativa
gtgggctcgatgatggtgccgcctggctgcagagcgccactgcgctcggccgcctcgaccatcgccagggcgatgcggtctttgatggaaccgccggggttggcgcgctcggacttcacccacacgttggcacccgcgccgaacaggcgattgatgcgcacatggggggtgttgccgatggtgtgcaggatgttgtcgactcgcatggtgtctccagggtagagggtgggaatccggcaaagcgggagaggcgtccattgtgggggagtcgttcagcggcgtcgcgatatggatattcccgctgtggatatggcgccggcgtgaatcgtccgcctgtgggtcggctcgattgatgtgcatcaagatttgccggcgcgtgcgcgcccgcctgcgccatcggtcgggtgtgcgcgcgacaatggtctcgtcttcactttccctcctgcgccatgaccttgctgcacaccaccatgctcatgctcaccgcgagctgtgcgctgatgctgatcggtttctcggcgcgcgagtcgcgctggggcccggcgctgatgatggtgggcatcgtgggcgcgctgctgctcatcgcctacaacatcttccagttattgcccgcgca

SEQ ID NO: 530 - DNA, 551 bp, Oryza sativa
ccgagctcggtacccggtttcttgggttttgtttagatgaaagtttagccattgctacttccttgcagcgcgcgtgatcagcaaccgccgagaagatgcaaagccgatatgcttgaacctgttaaggctgagattcaacgcttatatgatgctggttttattcgtcttgccgatatgcttagtggatttctagtatagttcctgttaccaagaaaaacggcaaggttagggtatgcattgattttagagatttgaataaagctaccccaaaggacgaatatccaatgccagtagtcgatcaactggttgatgctgcatcagggcataagattttgagttttatggatggaaatgctggatacaatcaaatttttatgactgaagaagacattcataagacagcttttaggtgtcccggtgcaatcggattgtttgagtgggttgtaatgactttcggcttgaaaagtgctggagcaatgtatcaaagagctatgaattatatataccatgattaatcggctggttggttgaggtctacattgatgatgtgg

SEQ ID NO: 531 - DNA, 661 bp, Oryza sativa
cttcttggccacctctgcatacttttggctcctttgaatttcttctggggagttcttcaaggtcagaaagtcgtcccactgattgggggttatgttggcatacgtcgaaaatggtgtgcgtccagtcttcacaaatttcttgttcaaggtggttttccaaccacgccaagacttggccattgtttgcagtgcacaatttcttactgctgcctttgatccatccgggaactggaagattttcttcaactctttccataggacttccttatccccattcgatacataatcccagtacttgaccgtgatggggatcttttcccttactattatgccacactgtgaactgaatttcgcacgtgccgtcttaggggcgagcggctctcctttaggcgaaacatgggtaacaacatggaacccttcatcctttctattcacgcttctctcgcccttccttttcttcgtgattgctaaccgttcgattttctttgtgccggttgagttagctggtacgtcgtcgtctttggacggaacttttttcttcggctgccgttttgatcgccgtggcgccggttcctacgagaaggtatacatggaagtttcgaattagctcgggctaatagttatcacggtgaacattttacatattaagtttacttacccc

SEQ ID NO: 532 - DNA, 2169 bp, Oryza sativa
aggggtggactgatgacagcgatgctcttgctttgggtattcatggggttgctcgctggctactcttcttcaagtctttacaagttgttcaagggcgcagaatggaagaacattgcattgaggacagccttcactttccctggcagtgtatttgctattttcttcttcctgaattctcttatttgggggcagaagtcctcaggcgcagttccattcaccacaatgtttgcccttgtcctcctttggttcggtatctcagtgcccctagtatttgttgggagtttccttggcttcaagaagcctgcaattgaggatcccgtgaaaacaaacaagatacccaggcagattcctgagcaggcctggtacatgaacccgatcttctcaattctaattggaggaatccttccatttggtgctgtattcattgagctctttatcctgacctccatctggctgcaccagttctactacatctttgggttctgatcctggtcataacttgtgctgagatctcgatcgtgctctgctacttccagctgtgcagcgaggactatctgtggtggtggaggtcatacttgacatcagggtcttctgctatctacctgttcttgtatgcaaccttctacttcttcacaaagctggagatcacaaagtttgtgtcagctgttctgtacttcggttacatgcttaccgcctcatatgccttctttgccttgactggtacgatcggattctacgcatgcttcctgttcactaggctgatgtactcttctgtcaagatcgagtaaagaggctgtcttgcctaattctttattgccacggcaagtactgatcctgcggagtgcggacagtgaatatggtctccaagcttagttgcctgtggcatcagttttgagttttcaaagctggtagttaagatgaactggtgatttgttatcccatgattcaggtatcatagctagctcagtggttttttgttttcattttcttttaccttttcttctttttatggatttagcccttggatcacggcctattaagtggttgttgcagagttaattgtatacgaatgctgagtaatccatttctctccctatcagaatgttatgtacttgttgacctataatgcgactaccattaaagatattactgcagttgaaatattcatcttcctatttcctttttggtcattcagattttgatatatgaaagcatgaggttgggtattattcagactactgtgtattctgtcgcctgaaatgtttcacggggaaaagaagccagacagtctctcgtaagacctgttcttttttatgttttatagctgatgcagctataaaatattggtaaaatttgttacaaaacatcaaaagattactccaaactcaacctaggagtttttgtctagtacaatgaatcccctcctaatacaacgaatctagaccattcccttctaatacaacgtatctagatctctcctaggttgagtttttttaatggagggagtacaatctttgcatagacaataaaataatatatagtacatctaagtgagaatccgtgtcaaatgtcagttttgctcttttcttctttcaccatcttcatttcttgtgggcattccagtcacctaggcgaccataggtgcacgctgctctacttcgctggtgtcgagttcttctccaaggcccacctcgttacgcctgtcattgactgctgccccgagaacgcagctgcgcagttgggattggatatttggatggaaaaagtacaccgaaggtctctcaatttgtcattgagttacaaaatcgttcctcaacggcaaaaccaaatattggacatcccttaactaatcagatccttcggtggttttgatccggttttatcctacatgatggctgagtcagcttgggatccacgtggatcccacatgtcaggctcccacgtcatctctctcccttcctcctctctctctctcactcttctcctgttgcaagccggccggcagcgaaaacggtggcgccgccacgccaccggagagggtggtgctgcggggggcacgcgacagaggtgggcggcgccagtgctgaagaggaggaggaggtcgtggcgctgtcgtcgtcgtcgtcctctgcgctggggaacaaggtgggcgcggcggcggagggtgct

SEQ ID NO: 533 - DNA, 8015 bp, Oryza sativa
cagctccacaactatagtgcattttgtgagagagctccacccaactccactcccagttttggtggagctgaaactgtttggttaagctccagctccaggaggggtggagctagagctggagatgtgccaaacaggccccaacactgggctcacaccaccgccaccctctcgttggtcagacgtgccctgtttgtggctatgccgaaacctttatgccaccacctttaccatgatcgatgttggagttcggctagccatctccggatctgtctatcttacaccttggcaccctcagaatcaatacctcaagagtagccacctgatcgagttggcaggagcacaactgccactagatcaaatggtcctctatctccacatccctccatccacatggatctggcatttgccaacatgaccaacatcagatcgggcaacccaaggtaccaagtaccataagccttctggagacatgggaggggaaggagagggcatcaccatagcgatcgccggtgaggacagagaaggaaaatggtgccatcgacaaattgcagaagaaaaagtcttagaaagagagaaaaaggcaacacggcggactgatcgaggcacggagccgtccagcgagacaacttgaaattctcactcaattagggcaaacaagaccactcgaatgtatatcttttagaaatgttacaaaaatgtattatttttttttaaaaaatatcttataaaataaatatcgtttaaagagcttacgggtttaaagcatccagttggcacgtctagtttctagtttaaaatgaaatgcggaagctaaccaaaacagtgtcgggttgtccgataccgggttggccagtccgatgttgattggattgtccgaactgagatcggactatttgacttgtagagtagtagcacaagcaaacaacaacaactagattagcacagaacaaagcaatccaacaagaaggtaaagagatggaggatatcatcgagttttacgtgaaaatgtattttccgaagttcaaatccttgaggggattctagcctccgttgaggagctcacaaagagctgggtcttttctaaccctatcctcttgaggttacacaaatgcactccttccgctaaggatatctagggatggcaatcttttcaaatccatgcccgacccagcgcccgactttttccgcccgaaccctacccgatagggttagcacgcaaaactccatgctcgtacccatgcctgacgggtacgggtatgccccatgggtatccagtgggtatgcccggtgaccttgttccctatgctcggcgcgacggtgagaagggagcgaagcggcgacaaaagtgcgatggaggagcgatggcgctctctcgccaaatctagcaacagtggccaccagatccggtcaggtgagcgcgcgagggtgacaaagacagcggtcatgcgtgatggagacgatgaagcggctgctgcctatcatggcagccaccaccccctcctgcatgcgccgccacctgcatgcgccaccgacgccacttgttcccctgctactgctgacgcttgttggtatttcttacggtcacagataaaatccgcaagcgcacggatatacctgtgtagcacttcacccaggagtattttaaggtatcgatttccacaagaaatgagtgtgttcaactcttctctaggttcatccaaggacacaaggcagatgtaggcaaaggatagagaggatttcctagtgagagacaatgtctacagaaaacttaatttaatcatattgcaatacttcaggcactggcttgctcgctgctaccagaatgcgttctactccgtaaccggacaggaaggactgcagcgatctagaatgctatcactacctctacaccaaccgctagcgatctgtgggatacgcagcaatcactggagattaattacctagacaccgcgtctacgcaattaattactactttagtgtttataaatcaccaaagtaataatctctatgtattaataaacaatagtgaacaatgatccagtacactaataggaactaaccaacaaataattctcacaaagtaaatcttatttactcagaagatatttctattaaagtagaataattaacaaggtaaaaaagtaagaggagattactgattacttcggaattcctccgaattcttctacataaaaagttacacaagagcctcttataaatcaacttttgcttggtgtgtgttggagggagagggtgaggtctttatataggccccaaatgacagttaggcagctggaaatgtctgaaatgtcccgcaaccatcattggggagtgatcaggagcatccacatggaaagaagcatcaacagctcagatgggggttcggccaaaccctggtcagctccccagcccatgggctttctcctaggcctcagtattttcctcccttatccatttgtatattgattgggctcagtttctggtgtttcaatgagattatgagctcaattcttttatggatggaattctcttccactttagtctaaatttcctcccaactttggtagttcattacctgcatcaaatatacaccaatacttatggaatttgttagaattaaactctaccactatgttggatgtttttttaatctttgatttatgcaagtattggcggcatataatttccatttaacagccgccaacactgctctggactaaggagggaggcagccgggtgaggtggcgtggtaattagtttagggtttgattgagtgagtttacatatgtctctagtcaggcatgggttacccacgggtaaaaaataaaacctgactgctgcctactatatcttcgggtatcaggcaggtatgctcacaggcaaaatattacacacgttcgccggcggcggcgaggcctccaggctaggcggcggcagatccagccccactgccaccggatcttctccagcgatggcgacggcaggcgcgatgtggaggcggcgcgtccggcggtggctgctgcggcgcgtggtggtgtggtcattgaggttcgtggtggccggctgttcgacgctcgggtggcggctgacggtgggcggcggcttctggcttcgggtcggtggcatgtcggccggctagggggttcgtcagttcttctggctgcctcccccccaccccccaccctctgaaaccacccctcctctcttcctttctctctaccttccttctctcttcctctttgtcccgcctctcgccacaagcagttaggggaggccttgcatcatcccccttcccctcccccagttctcctctctctgcgctggtggtgaagtcgcaggtggtcgccaaagttgattggtttgtcccacgaagcccggagttcctcgccggaaacatggttgacaccgatgtgtctgagccctctcttcagaacttagttcctctccaggccgaccatgactccttggtgcctccccccttccattggtcgtttacttccagatctggtcgtgctcttttggtgcttgaggagtctgttcgtctgtggtgttgatcctgtctgtctgtagttagggctcttaggccttgccggagcttcacgtgccctatgtctgtgtgaacttgttgaagtgccgagtttggagcggtgtgcttacccccatggtgcaagagttcctttcctcttgcttcttggagatccagcacctttgagggagtccggggcgaaagccctgcctggtcatccaggattggcaatatcgatgcctgcgagtgtcgtttcctccttagaggtgttgccttgtggactctctcccccctccccccggttgaaaacccagtccagctgttgggcgtgcgtcgacagcggcttatgtcgttgttcacctccttggaggcttcgccttagggtctttctcttccctcggccttctacggttcgtagtctttttgcctcaggctttttgtgtcttctgtgtaaagtttttgccggtttcactttagcaaaccgtgtagttgtatgatttttgggcccggttttccttataaatagggtcaactctatccttctaatatattcggaaatactcttgccgcttccacttaaaaaaaaaagatcaagagaaacatacactaagctcccaaacttcaaatccacaatcacaaagatccaagttacaaagaacaatggggatttgagagagagagggtggggggggggagagaggtcaaatatccaaagcacttagcacaaagctcaaagctacaagctacaaagatttgaatgaaaggactaaccttcgaaaagggttggtggggagttaacgttgaacggtccgatattttaaacctccaaggcaacgagagacagagaacaaaggtccatgaaattttggactttctaacacgatgtatatcttggtgagagctataatttttacataaaacatgtctctatccaaggtcgtttggaaatataagaaaaacaaattcaaaaatagatataagttaaaaaaaatgaatatttgaaccactgaaggttctcaaatgaacaaactttaaactacaaagttgtagatatcatcgagtgctacaattttcatatgaagtttatcaacattcggcttcatttgaaagagttacgattttctttcatattttagtacaactctcatttttaagctaggtggttttcatacgtacaaatcgaatattctaactcataaaaaaataatctcaaatgtgaaacctttcaaaagcaaagatgcatatctcgtcgagagctataatttttatataaaatttgtcttcatccgaatttatatgaaagagttacgtttgttttcctattttagtgatgcgcctatttgtaacttgtaagggcagttttcttatatagaaccactcgcgaaaatatacatatttttacaacagatttcttatagacggcctataaaaattggtttcacaggtggcactactacagaatgggttttcgcatacgggtgaacacgatcttcgcatgcggtcggccggcccgcatgcgcgaaatggtctgcaaagatcgccatttgcgcatgcggccggcccagccgcatgcggtcacttaagacggccgcatgcgaaaatatatcttcgcatgcggcccgtttaagcagccacatgcgaagatctattttcccgtgcggtcgacttaacaagaccgcatgcgaagatctattttcgcatgcggccgtcttaagtagactgtatgcgaagttcaatttccaaatagctaaaataatatttattctatccttttggtgagatgtgtctgataattaatattaaattattgaggatttattattgtatttcggaattgtaagcatacgagatagtcgggttgttattattactgtaacaaacatctaatacataaccataaattcaatcgtaatttacatacgaaagatataatacaagtgccacaattttttcatgatatgtataagtagtgtacatgtcattgcatatgttctttctcccactctctgagaggtttgaatttgtcgtccattgcgagttcactctggttgtcgtagaagagacctcttgcgtgtaggatcaaatcacaataactaagccaaccagagaggggtgaatggtttgtatacccaaaaactgaaaacttttagcggaaataaaagttaccctcgaaatcgacggatcgcggtctgaccgaagttgtcctgccggtttgaccgcctggttgccgtcggtctgaccgagattagatctccggtctgaccgccgagatcagctgttgctcgctgtcgccgccgccggtctgaccgcccgtatgcagccggtctgaccgccgcttaccgccggtttgaccgccggtatatcactggttagactgccgaaacccggtgaaacacaaatcgaaaaactcttaaagtggatgacgactttattgattttctctgtgtttacaaagtgcaccaacaacactccttacaaaaatttcgactaaactcgaaaccctaactcaaaactcaactcaattgctctcaaaagcgataccgggaagcctcacgctccccctctatttatacccgaggtaggcagcctaaagccacgaaccaaactcatactagaagtcctaaacaccttaggaaaccctctagtacaagaaacaaactttacataaccaatcataccaaatttggactccttccaaattcgactccgcattccatacgcacacaatacctccatcgtatgccatatggaatctccatcaaccacgtgcatcaactctagccttagtatcccgtatgatttttgaccaccacggacgtcgtcttatccccaagccgactcccggtccatcaccgcaaatactctctcgaggcatcgagtcacctacatatgaaataaacaaagaaaccatattccgagaccaagctatctctaacttgactcattagtagcaaacaacaatattacatacgtatagtatccatctagaagccatactcatgaaataatcacggatatccaaacaaataacccgaaaccgaaaccgacacagagtcggccggtcagaccgcggactggctggtctgaccggtccacataaaataacatcagtatcttgtagattcacctgtgaaatccaatcatctccaaaatcacttcgtaaataaattccaaataaaaaaacaattgttcatcacagaataataatcaaaaacacctttgattttacattgcgttgcagacatcacgacagaggaatcggcagagttcagcgcccacgttccagatagtactgtcgtcgattcgttgtgcaatatatgggattttggggatctgcgcacagaaaggaaaataaaatggtactcagtgagaagtttgtgctagatgggtttctttgtagagaagagttcgccgacttactcggttactggttgttttgtacctcccgtttactctgagcatctcgcacacgtaataaccgcacaagttggttcccagtggttgtttgtaacactgcaatataattatgagggaccgatctcagtagatataatttagtatgtattgttcgataattagttgtattggtatagatttgatagtaccggtcggccagtcttgatggataactgcttctgggatggaatatgtactggtccgcctcttttgcggtagtacttgtgtgctatgtttgaagaaaacaattgttttatcagtagttagaagattgaggatcgacctaaacaatttatattaatgaaatgtttatcacttatagattcaaaacagtgaggaattccataaatgtctccttgtcatagtgtacggggtccaacgatatgatcaattggtcttttggatatacaaggaataatatgtagtgctctctgcatataaaataggcttaatggagactgaaaattccgaagaagataaattaattaaataaaaagaagataaagcttacgtcaacgcgtaggggaccattaagacatctttgtcggcgtacgccaatattgctattgccaagtatgttgctacttctagcttcttcctcttgtgcaattgcttcacatattcttccttttcttgaggggtcttgccaaccaattgctcgcagtcctctcttagctctacggtgtgttgtgttttgcatattcttgttggatcgacgtatccaaccggtgatccagttctatcagcttcgtggaattgcatattgtacaatgaacaaagaagtaatgagatttggtttctttgtttggaatgatacatgtaacatgtaataaagagttcagacttacagacaggacgccgcaattgttcaagcaaaaatttcaagttgaaaatctccccctaattattgcttgctttaggagagagaaagcttcgttttcaaatagtcaagctcgggcctggatgagcatatatggccgatcatcgcacgcggttccttgagctagccgcatgcaaagatccattatcgcat

SEQ ID NO: 534 - DNA, 1756 bp, Oryza sativa
ccttttggtatcgcccgtgcccgttgtgcggttgtcgaccccagtacccgtgtactggtgtcggtagtcgttcgcttgtgcgtgtggtgaccgtgtaagtgtgccggctcggtagcatcgtggttccaacgtgtgcagcccgtgtggtgtctagtggagtccgtttgtcgaccacttgcctcgggttgacacacgggatccgcttcagtcgacccgtggaccatctctgtgtactcggtctaccgtggtcctttaggttgacatgtggggtctgcatgtcacaggcgcagccttcctgtcttttccaggctagcgcttacacatgttttataattgcaaaacctaatcacaataatccgtaaatctccattgtcacgaccggaaataacccaacgggcgttccttacgtgcgtgcattattccttgtcccaggaggcaaggtataccaaaagttgatacaattcagagttcaacaagcggaagcgtaaatagttaatttataacatgggcagcgaaggcccaacacacacaaagacaatcgaaaacagcggaagactagggcgacgaccacaggcgcttgacggcaggcacaagctagacaccaaaaccttcatcttccagagactcctattctgggtttgggaaaaattgagcaagactgagtacaaccaccgtactcaacaagacacacccacaagtgcataataaatgcaagggagtacaagggagttataatataaagggttcgggttgcagcaaacagcatttaaagatacttagttgctcaaagctattttgtaaacacgattctagaacgatacaatattatttatcaaggccgtgaacccacacgaacctgtcttaacccaaggcctacgatgattcagaccaaaccggcaacccgaccctgggtcccagctcgttccaagccaacccaggccaaccattccacattgtagttgttaagcaggttttaagaattaaaacactaacttgggtacatagctcggcttgcccataaccgagggcgcggctattcgaatagattatactctgatcagaggtgtacatctttacccacaagacacatcttcctcacgtgtaaccacgtgccacataccaccacggtatacggacggaagacgtgacatagttcccaacccatcctagccataaacaagagtaccgacccaaccccacctacggccggaacccccgggacaggtaggcaggactgagcccccagcagcaggacaccggccctgtgccatgacatctcgactaccgggccgcagctcgtgtagccttcatttgccctggagatgtccatcgacccccgacttcgtccatctctatccgtgtacttttgtttataaccagactgagccacaaactaagccttacccactagacatgtggaagtacggtagtgctttgcaacagaggcccgaagaccggtccttatatggccgaggtgctactatcaaaaccatgcaccccgagcccagcctaaaaccatttttggggattttgaatagagggggaggtgtgtgtccaattccaacataagccaaccattccatagtgtccaaatgatatgagaattcccaaagtctaaagttataaaaccacctaatgttgcctaattaatcagcgaagcatctacctaaattcatactagtggaaccatgaatagagtacacactagttggggtttggttatcctagggtgaacaaaggaataataacaatagca

SEQ ID NO: 535 - DNA, 536 bp, Oryza sativa
ttagccaaaaaaggttcatattatctgtatggcactatcttcatttacttaaagaagtatgttgcctaggattgcagggaaaaacattttaagttatctgatagcacaatttatttcatgttgaatgggatttctaaccaaatgccacttgcagatacaaaggatcgccaggcagcaaaggccattaaatgcatgctacttatgtactataagaatagcagaggtagcaactaccgtaagcaggtgacattactttctaaatgtcataaattcattttgagattttatcatcatgtttatagcatcttgcctttaaatgttggatctacctaacttctaatgataatcaatgcagtgattactatgctggttagagattgtagagatctaaccaaactagtgaagtgatcgcagccatcaaaattcaaaaaaaccaacacttagtatatgtgggtgcttttgtgacagcaccctttctgccacactgaaataattttatttccacatatccaatactgagtatatattgactagaa

SEQ ID NO: 536 - DNA, 6396 bp, Oryza sativa
gggttagaggagagaaaacgaatccgaattgagctcgaatccaacaatttccaagcgaaattagatgtcgattctataggagaaaagatagaggagatcaaggggatcatttcccctctaccaatttgaccggatcgggaaaggggcgatgtaatttggaagggggcggcggcggctggcgcgctagggcgtggctgcggcgtgaggaggaagacgacggccctgacaggtgggcccacctgtcggtgggagagaggagggagagcgggcggcgcggctcggcgggctagatgggccaggcgctagcaggccgcggagagagagggagtgaattgggccgactttcggcccaaagccaaaagaggattttaaaacctttttctttttaaattattcatgaaatgcaattccatttattaaaaatacgtccttggctcaaataaatcccagaaaaatctagtaactatcgaattaagagaagtatttaataaaattttatctagcccacttttatattggaatttattatttaaaattagatcttttcttctaggcttttaaaatcatttctaataattccatttaaacaacaattcataaatttaggattttcagggtgtgacaaagtagcaaatcttgcaaagtagaggcaatagagtttgccaatgtcgaaaataatgaaggtgaagtcgctccacatggtgacaaagttgcatagccgtgatgacgtgaacacaagttggcagcaacagaagaaaaccggtggcgaagatgtgtagtcgtgaagatagatactccggtcagctccagaaaaaaaaatagtcgatgtcaaacaaggcggccagcaatgaagacgatgacatccctcagtagtggttgcggtataaaccagccgtagaggcgagggcactagtcagcagcagacgagacgactggcgatgaagacgataaggccaatcaacactagcagaaccatgcagccatggaagtgaagaaaccagtcggcatcatacgtagacagcttgcgttgaagatgatgatgcctattagcggtggcggcgacgtggccggtcggtgaagacgtagacgcccaacaacggcggcataataggccagccgtgcaggcggagacaccagtcggcggcggtgaaggcaagcctgtcggtgaagacgaagacgcccaacaacggtggcagaataggctagccgtgcaggcggagacaccagtcggcgacggcgaaggcaagccggtcggtgaagacgaagacgcccaacaatggtggcagaataggctagctgtgcaggcagagacaccagtcggcggcggcgaaggcaagccggtcggtgaagaagaagacgcccaacaacagcggcagaataggccagccgtgcaggcgaagacactagtcgacggcagcgaaggcaagccggtcggtgaagatgatgatgcccaacaacggcggcagaaaaggccagccgtgcaggcggagacaccagtcggcggcagcaaaggcaagccggtcggtgaagacgtaaacgccctacaacggcagcataataggccagccgtgcaggcggagacaccagttggcggcacgaaggcaagccggttggtgaagacgtagacgcccaacgacggcggcataataggctagccgtgcaggcggagacaccagtcggcagcggcgaaggcaagccggtggtgatgttctgactgatccaatcctgaagcgtaggagataagcttaaagccatgaatcccttttatgcatatctggatctggatcctacagaacaagcatataggatgagtagtatctgatgtatatataatattcaagtattttaaaatatttataaatatatatttctcctctactcaatttcgatttccccgagcagatgactctgtacgtttaaacactctgtccgactagtcatagcccccaagcatcgggagtcggtctaggcacttcccaaacatgcatatgagtgacatgagttcgtcattaatggaacaaagttttacgaatcataatttactactcgggtacttttgcaattgtaaagagcagaaattaaatttatcttatctctatgcttttgatttattccgaataatacttagcaccttgcgttactcgctccatccaacgagccctcgggtgctaggaatcagcccaaaggcaactatccatcgacaaaccaaacggaaagcataggaagatagaactccataactcgataggcacttttgtactcagattatgtcgcaagcaatcaagataaatattatgatatttgttaaaaaaatatgatataacgtctgtagcccctgattcgctagtcaacggcgaaccagttgacatagtgagacagaggaaaaggaaaatatcatataaagaaaaaaaataatgacttagctttgtaatattcctcttgatgacggcagaggtggctgatgtgggagcaaagttgtccatcaataacaatgaagacaccgggcaacggcggtgaaggcaagccggtggtgtagatgacaaggcccatcaatggcggcggagtccgccaactgtataggcgaaaacaccagtcgacagcgacaaaggcaaaccggcagtgtaagcgaagacgcccatcaacggtggtgtgaccaaccaaccgtataatctaggatactagtcggcggcaggcgaggctgggcagcaatgaagtcatagacgtccaacaacgccagccgtgtaggcggagacaacagtcggcgacggcgaaggtgagccggtcggtgaagacatggacgcctaacaacggtggtgtgaccaaccaaccgtgtaggcgaggacatcagtcggcggcgacgcaggcaggccggcggtggagtcgtagacacccaacaacggcggcataataggtgagccgtgtaggcagagacaccagtcggcggcggcgaaggccagccggtcggtgaagacgtagacgcccatcaacggcggcataggccgtgcagacggaaacaccagtcggcagcggcaaagcaagccaacagtgcagacgtagacgcctagcaacggcgtcataataggccagccgtgcaggcgaggacaccagtcggcggcagacgaggcggccggcggtgaagacgtagacgcccaaaaacggcggcataataggccggccgtgcaggcgaggacaccagtcggcggcagacgagggggccggcggtgaagatgtggatgcccagcagcggcgacagagacaattggcatgggtacatgcaaaataaatcaactaacagattaatctgttcagtaccacataaaataaatacaggtataaagaagcttgtgtatatacgtttgcatttatcaatgcgtatatgcagctcgcatatattgattggccaattaatctcctgtagcatgaacgcttgatatgcatccacacatcgcctgaccaatccatgctcgtgcaatctagttgggaagcttgtcttcttatgaatcggactcaaccgttcattagacatgcaaaaatatatatcacaaattaacttgtgattagtgaaaaataataattaattaattaatataatcgccgtaaccggccagatgatcggttgagaactcgacacggcagtaagcgatgctatccgaaatctcattatagatctctattagatcagccattgaatattggccgacttcagccaaatcgcagggcaagatcggacgcagaagctctccgccaacgccgagccatggtgcatatggttatccggaggcgatcagcagatctcatcagccgccagtgcatgcacacaaacaaagcgtctcacagaagagcaatccatgattagaagaatcaatctaataacaatatattgaaacgacaaaccagtagacgtttggagtggtcgaaattgttgagattaatctcaaccctgcttttggaattgattccatcacacttctttgataggaactcgacgtacccctacctggagcgccaactgtcgaaacatgaattcagcaataataaaaggggtagcgcacgagacctaaaagtggatggatgcggagacaaggatttagacaggttcaggccctctcaatgagaggtaataccctactcctgtttggggatttgaatccgccaagtgcattgtagatctgacgatctggttgtgtgtcatgccccatatagagcctcctgcccaccttatataggatggggggcaggactacaagatagaaaccttaatcaatacggtatcggtttcctaaatctactttacaatcttatcaaactaggactttaggccgttccataatatacagggaaacgtaatacccaagtcatgatccgttacatattccatagatataagttatctcctataaccagtctaataaccatgccgtgtgggtatggggtacccataatctccacacgaacgatgacagatggcgacggtggcgaggtcgaggtggcgatggtcttcgggtcaacggcgatggtcttcgggtcgaggtggcggtggcgacgacggcggtccagcggtcttcggtgaaaacggagggtgggacgatgacggcgatgaccttgccgctccggcgacggcaaccccgagcgacgacggcgactagagtggtggcgcggcacggttggacacgcggcaacggcggcggcgcacgagctagggcggaggcggctctaccagctacggcaagccaaggcgaggatggtggcgaatggacgaggtcccgggggtcattttatagcggcaaagcgcggcggctaggcccacggcgagcccggcgagatggaagatttagggttagaggggaagaatcgaattcgaatccgggctatttccatagaaatttgcgatagttccaaaaaggaaaaggaagaggagatccgggggatcatttcccctcaaacaatttggccggagatggaaaggggtggccggatttggaaggggcagcggcagcttgcggcgcgggtatggcggctggaggttgaagacgactgacaggtgggccccacctatcagcggaaaagagagaggagggaggggtgcggcggtctgggccggcatgggccaagcgcgcgcaagccggggagagagagaaaggccaaacccaaaagagagattttaaaactttttctatttaaattattcatgaaatgcaattctatttattaaaaatacttccttggctcaaataaatcccagaaaaatttaggaactatagaaacaatagaagtgttttaaaaaattatctagcctactgttatattggagtttattaacttaaaattagatctcttgttttaggcttttaaaattatttctaaaggcggcgaaagtggtttgtcccgaccacaaattcggccgaaccgccccagcttccacatgtaagctcatcttggtcgccccagcagttacctccttaaaatatggtataatttatcaaagatattaaaagttcaaataatattaataatgtggactagtgttaagagatggtctcctattaaaaatctaaaaagatagattgaaggttgtagagttataaagaaatgtgatatgtcttatggattcaacggatatcaaatagtgttgttcaccggatatacatattattatccgtgtctgttagaaaccccgataccatattcgtattcgcattcggaaagattagccgtgtccggacttttcgagaattatccgcttcaaaaggaatccgtatttatttttctccacagcgaatagaaactatccgctccgttttaatccctagctagggcgggcttgcatctgtccatctaacttgcttgacattttcggtctgttcatctatatctcgggttggtacgtggtactagttactactagatcagcatcgtagaatatctggtgggagtacgcgtaggagattggaaggacagtgtgatccataagggtacaatatctgccaagcacgtgctttccctgagctaactaaattaatgcatctaactagtactgtacttgataagatcgggtcagcaaaggtggacaatatatactacttcctccatatttaaatgtatgacgtcattgacttttcgattgactttttgactgacgtttgaccattcgttttattcaaaatttttgtgtaaataggaaaatatttatgtcatgctttaaaaacatttgatgaagaatcaagtcataataaaataaataataattacataaatttttttaaataaaatgaatagtcaaacgttaaacaaaaagtcaacagcgtcatacattaaaatgtggaggtagtactttattagactccaagtcccaaccatatgcatatagctcagattggtatagctctcgccgtggct

SEQ ID NO: 537 - DNA, 530 bp, Oryza sativa
caaccatcgacttcaccatgtttgacaaagtgttgactaacattccagattgattaatcaaagcatgttgtagggcatagtcaatccgatattggaagttgttaaactgtagctgtgtcgtgttgccatcttggttaagattctcaccatgaaatccctgagaaccatcaccttgagccccttgagaaccaccacctttgtcacctgagccatctgcagcgcctttatcgcctgattgagttgtaccatctgagacctgttgtacttctccatccttggaagaatttgtcctaggaacatcagcaactaatttcatcttgtacctctgaacaattgttcctttacgggtctccatgaatgaattcaagaattggtgttgtgtttgctgcatcatcagattgagctcattcttctactcaggtgttagcttgtctatagtgacgggggcaatgtttccttcgtgaacctcaaatgcaccagactttagattcttggtaggggtctctttgccagccgaagatggcgatgct

SEQ ID NO: 538 - DNA, 748 bp, Oryza sativa
atcgataattacatgcatttctcggctacatgcatttcctcgcttaattactgcaacgctgcaataagtgagcgtatatatgtattttttaagttcaatttagtgatgaaataagtgagcgtacgtgtatataactaacctagcctccaccggcaaaaaaaaaaaaaaaaaccgggtcacatcatatacagacacacatttgaagtaataacaaaacaaattacataatcagcatagaaaccgtgagacgaatttattaagcctaattaatccatcatcaacaaatgtttactgtagcaccacattgtcaaatcatggcacaattaggtctaaaagattcgtctcgcaatttacacgcaaactatgtaattgttttttttcaatatttaatatttcgtacatgtgttcaaacgttcgatgtgatggagaaaaaatttgccggcggaactatttattgctccttccgtcctaaaatataagtatttctagtacagtgacaagttaaacatttttagctttaactattagtagcaaaagaaaaaaaatcaatcatatgtataaaattgatgttactagatttatcattaaacaaattatcataatatgcaattctttatatttaaaacattttatttttattgatattgttggtcaaagtagaatctcggagactgtgtcagaatttaaaaatgcttatattttaagacggagggagtagtacatatctacatccgatcgatatttgttg

SEQ ID NO: 539 - DNA, 1711 bp, Oryza sativa
cttccacctcacatcatatcgattgtactccaggcctcggacgcgtctcccccgcctccgcgatggcagcggcttgtgacgctcagcgagaagtaagtgaatgaatttgaggtttcgtgatttcgtcgaactctgtctcaatcgcagcctttcgcagggcggcgcgggcgaaggcagcgcaagatgggtctgggggacctccaacgcgtctcctgccgtggcctcaacggatgtcgttgtcgtgcccaggagccatgaggcgacggatgtctgggggatcttgtggctgattgtggttcgccggctgccgtcctcacctgggaggagctccaggttgagatggggcgcctcctcgaggctggtgctcgcggtgttagccacgaaatcgcggaggcgagggcggcggctgcgtcgtcggcgaacaagcacgccgatcggctagcgcgcgacctggcggaggttcgcgaggacctccagaagatgagggaactggtggccggcaacgagcgacaacggcaggggctcgagcatcgcatgtcggagcttgagaacaacttgtcggaaatccatggctcattgcgggtcacctatactggtctgcaccagctcgccggggagtgcggtatcaagtccaccatcccggcgaatcccgatgagttctcgctgacgtcttctcttgcggagctggtgacggtgatggaggagatcccctccaagcatgcggccaggatcggagaggagacgtctaatgggatctacaccggggtgtgccacgtccttgcatgtgtgaggctggcgcaccctgaactcgatctgtggaagatcttggatcagggggcggttagcgacgcgcgcaaggatgtgatggaggaggtcggcgatctgggggagtccgtcctctcgctttttgaagagtagggtcttagctctcttgtactctttagtcatgctttgtaaaacttttattggtctcaaccgccctagtgtgtgcggtcattgccttagctttatttagcattttgatcttgagtactttgttgtcctttgttaccatttcctttgcccttccgtctggatcgacttgatttgttgtgttctcgggagagaagagcagcttgacttagtcgtttccatgctgagcagatctcgagagtgcgcttgctgaccaggatcgtcgcatccagtattggaggacgaagtttgaggtcgcggaactcgagaggactatgctggaggtgagaaaggaccaggccgtagagacactccggggtcgtgaggtgtggttcaactcgtatctgaagagttgctgcacatccatgtcgagagtctgtagagagctccgaataccccgtggggatcccgaggaatcggctgccggatacatctcatggctgaatggggcctatgcccagctcgaaggcatcggtcaacatatcgacgaggccttgaagcaggagtgtcgtcgctcaagccgatatgccggggggcacgtgttggcctgcatagagatcatcgttcgcagctgcatctcgagttcctccgcgaagggttttctcgttcccagagaactcctacggagatagatggcctggcaaagtcgatggcgccgctggcggagaaggttttccagtcgatggactagcgttgtccttcctggtagtctccgtatcctgtgacaaatgtctttggaaaaagtgtaatatagttttga

SEQ ID NO: 540 - DNA, 2866 bp, Oryza sativa
ttgttgagtacggtggttgtactcagtcttgctcaatttttcccaaacccagaagaggagcccctggaagatgaaggctttggtgtctagctcgtgcctgccgtcaagtgcctgtggtcgtcgccctagtcttccgctgttcttcgttgtctttgagtgtgctgggccgtcgctgcccatgtaataattaactatttacgcttccgcttgttaaactctgaattgtatcaacttttggtgtaccttgcctcctgggacaaggaataatacacgcacgtaaggaacgcccgttgggtgatttccggtcgtgacaaccatcatccaatggatcatcacaataaacaaaatacacaaataggcatcatgcacacgttagcttagaaggcactgtcttcgactcttcatgtctcaaactagtgcaagtctctgcatgcaaaagacaagcaaaatacataggcattagtcaattatttgatagcaaggaaatgaagggagtacaatgcaatagtcaattatttttagtttgaaaagaatacctccatcttatcttggatctcttgaagacagctccaaaaatcttgcaggttcttcattatcagcatctacaaaattagttgtaatgattattatgcaaccatgacaatggaaaaatataaatgatcacactatgtttgaatggtacaacacatacacctttgtacttgtttcgtagccaattttgggaacacattaaggcctccaagatatctgaagtgagtcagctgcggtgctcactaagaaccctcccactagtgctgaatgcagcctctgatgcaactgggctaactggaatggcaaatatgtcccatgctacttttctcaatgtaggatattgtgtcccagccaccttacaccaatcaaaaatcttgaagttttccatattaattgagactaactcatcctccaagtacctatctagctcagatttaactcttattgctggtggcctccttcaagcaacacgtgcactaattgaagacaatacacctgaattagcaagtgaatgagctgaagattctgtgttatcttcatcctcttccatttcatactccttcatgaggtcatacaaattgtttttaacctcttcaagtttgtctgtacactcctcacttgattggctagtaatggactcaatgaacccaaggaggtagtctgttttaaacttaggatcaagtatggtggccaatcccattggtccttggatctccttccaatacttatcaaacttcgcaatcatctcagttgacatttcctctataatattattgccacatgcagcctgtcgacgggggatacccgtagacaggatatagagggtactggggtacgctggtacaaggatctacatagtacgacatcaagcaaataggaaacagagattatactggttcaggccccttggtaggtaatagccctaatccagttgatatgggattatatgatggaaaccacagattacaaagggaacagtggaactcgacgataccgacaagatcgtagtcgagttgatccgactagatctcccagcgacttggctccgataagctccggcttcgtaggctgtggtggagttggctctgagattcgatgctttaggtcctcccgggggtcccttttatatcgcaggtcacctgtctcccagttggactcggagaaaccggaccgaacacgacacaatgacgacccagttctgaccgagtaggactccttccatctgtgaaatccatgatgaatttccttaacgtatgccgaaaacatccgtatatgcgtgaacataccatatcgatatgtgacgtatatcgaagggtagagggtataccttactcgtaaccctgacagtagccccccgacttctgcttaaatgaactggtgaaactgatcgcgacttcacatgtcgaaattgtcgttgttctcggtgtgaggacggagagacaaggagtgatcgacaacatcgagtgaagttcaacggtcatgagtgaatttaaattgaagtccgaaaaactgccacgcgtaacggacccagaaattcgcaccggcggaggtgcgtctatttaagggagttttggggatccaatttgaggtctgcccgttgaaaaaactctccagcttccaagcgtccctcgtcttcttcgctcccgcaaaaaccctagccaactcatctcggtcctttctccggcgatctccggtggccatggatcttgacaagtctacctccaccagtgtgtcactgaagaaactgcaggaggatggcgcccttcccagtcgcgggaccgcggagagggaagtaggaggtactgaaccccagcctgtcctgggtcgcatggttgcggttgaggactttattctctgcggttttcttcctccgccttctgaatttctccttttggtcttaaatttctatggtctttccttgctccatttgaaccccaactccatcgccttcctgagtatttttcacctttgtgaggcctacattggggtagagccgtttcttgacctcttccgcttttactatgagttacgctggatggaatccaaaaaggtgtccgggtgtgttggtttccgacttcgggatggcctgaagtcacgatacatcccctttcagtgcccctcatctcgcagcaaatggcgggggaggtggttctatcttcaggtagaggattcggatcctgccttcgttgttcctgaggagcagccagacaaggttccatcttggaccaccaaacctgccttgaccccgtccctccaatctttcatcgatatcgttgacgacctccgagaacgggggttgtcggggtatgaagttgctgccgatttcattggtagg

SEQ ID NO: 541 - DNA, 1537 bp, Oryza sativa
ccacgtggggctcggccgtcagccgcccgcgccctcgggtgcggctgacgcctggggcccacggcgccggtcggcgtgagccgcgtgcacccggtccaccgtgggccgtgaggctgccgcgtgggccccgctcccgtggacccggtccgcgcgccctctcccctcggctgacgcaataaatccgattttaaattaaaatttaaatgaagaaattcgcaaatattcatttaaagagcatataaacttcaaatggctataacttggccatttgaactcagaattggaccgttcaagtctctaatttttccttaagaagtcaagaacccatttttgtgctttgttaatgctttttatatggagtttgttagagtaaaagccttttcttttccgttggtcgtgtagacgctgcagcttcggaggatccgctcttcgtggaagttgaagccggcgtttgggaaagcgagcaaggcaagacacatcatccttgaacatattgaatcccaatttctgaaattattttgatttaaattattgcattatcgctttatttaaattcccgcgttatcactgttttatttagccatgcctattacctttgttacgaccttattatttttattgctattattaccttgttcaccctagaataaacaaaacccccaactagtggacactctatttgtggtatcactagtatgattttaggtagatgcttcgctgattaattaggtaacattaggtggttttaaaaccctagactgtggtaatattcatatcacctggacactggaattgttggattattgtggaattggattcaccccgccccctctattcaaaactctcaaaatggttttaggctgggctcggggtgcatggttttgatagtcgcacctcggccatataaggaccggtcttcgggcctctgttgcaaagcaccaccgtacttccacatgtctaatgggtaaggcttagtttgtggctcagtctggttataaacaaaagtacacggatggagatggacgaagtcgggggattcgatggacatctctaggacaaatgaaggctacacgagctgcggcccggtagtcgagatgtcatggcacagggttggtgccctgctgctaggggctcagtcctgcctacctgtcccgggggttccggccgtaggtgggattgggtcggtactcttgtctatggctaggatgggttgggaactatgtcacgtcttccgtctgtataccgtggtggtatgtggcacgtggttacacgtgaggaagatgtgtcttgtgggtaaagatgtacacctctgatcagagtataacctattcgaatagccgcgccctcggttatgggcaagccgagcaatgtacccaagttagtgttttaattcttaaaacctgcttaacaactaaaatgtggaatggttggcctgggttggcttgggacgagctgggacccagggtcgggttgccagttcggtctgaatcatcgtaggccttgggttaaggcaggttcgtgtgggttcacggccttg

SEQ ID NO: 542 - DNA, 1057 bp, Oryza sativa
aacccgctgctgctcggcaactacgcgaggttcctcaaggaggtggagggcgacgcggcgagggcgcaggagtactgcgagcgcgccatcgtcgccaaccccggcgacggcgacgccctcgcgctctacgcgggcctcgtctgggagaccacccgcgacgccgaccgcgccgacgcctacttcacccgcgccgtccacgccgcccccgacgactggtgagcccacgcgccgccgccaccttctcaggcaattccttcttgatgatgtctcgcttctcctgcagctacgtcctcggctcctacgccggcttcctctgggacgccgaggaagacgatgacgaccacggcggcgagcagccgccgccgccgttcatgggggcagctcagcctccttccatcacagcggcgtcttgagtgaacagatgctcttgatctctcgccgcctgtaaagaagacgaagcaacgaacacccgaggaggaatcacggcggcctctctccggcgaggcaccggccgtcgtcgacgtcgccggctcgccggcccggcgaccctcgccgtggctcgcagctgaatccggccacctgtaaaaatgaatctggagaagagcaccacgcagctaaggtgtagtcgatcttgtaaaatgagcctgcaaagcctacatgatgatcttgtttacttcttgtacatgtgtatcactgtatcagcaacgcttgtgaaataaataagccacagccaagtatgttctagctagatcagcaactgcaaggctctcatctcccttccagaacagaaatcatttaagccaaagttccacaccaacttaacaagatagaatgcacaaagtttattgcttatttgctaaagagaaaaaggcagggtaattcatatggaaataataagttcttctagcctaggaaataggatatggtcatatgcaattgttaccaactacaaataacaacagtaggttcctcctctcttgtatcaagaacaaaaattgacaagataaacattacaggggctacttgcgttcttcgaaactcctggtgatgaggacta

SEQ ID NO: 543 - DNA, 1536 bp, Oryza sativa
ttgcaggcgctgcatgtaccacatagctgagtcagttcttcagtagatcagtgtaccattctagtttcatgcaccagatgttttggtagtattgttaatatagaactgtagatagtccatatagcggccaattgtgcagtctgtatgtaacatggatatagataggtttcttgtgtagtagtagtaaataagctggttattttgctgccatgaaactggaatgacttgtgaacgtcgaaatgctctcgtgtatgtcggatcttcttcacttagccgttctcaaggatgagagcaattaatcttgtgatataatcctatatgtatttccagggcagaaatggaaaagaaaagggaaacctgcctaccacaacttttaagcctttgatctattgattataatctgaagttaattttgattttttttaatttgattcgtaagaataatcttaggtatatttcgcatctcctttacttgcccttttgactttcttggaaaaaagatatagcaaccaaagtgaggaagaaaacccttggtatcagtttgaaatcaaattctaaaattcaaaatcaaaatcagctttcgacgaaactagtttaactcgtttcgtccagcaacagttaaactagtactcctagcagtctagcagattagcatccatggaaaaaaaaaacccatctttgagtcccatcatgcaagccaggtacatagaatggtaagaagccttaaactaatccttccaatccataatcaaattagtggctgttaccaaattgtcatgaaatttctacctctccatgaccacatcaaccagaaactaatcccatgcatcttttatcatataaactaattgccactcaaatactgcaaccatggaaaaaaaaatcctatcttttgtgtcacatcattcaaggcgggtagccaggtacacagaacggtaaaagaagcctttaactaatccttccaatccataatcaaattagtggctgttaaattgtacttccttcgtcccaaaatataaaaactcagattcgtaatactaaaaaatatctcattcggttctagattcttatattttgcgacgggggagtagtaggactcccttcattttttaatagacgatatcaataatttttaaatacatgtttgatcatttacctcattaaaaaaaatttatgtaaatatataagatacaaattatattttaaatacttttagtgataaaataactcacagcagaataattactattttttaaatacaatagatagtcaaacgtatatccaaaagttaacgacgtcatccattacaaaaccggaggcagtaataaatttctacctctcctctccatggccacgtcacccagaaactaatccaatgcatcatttaccttcaaactaattcccactcaaaaactgcaaatctatctccaaacctttcccaaaaggttgctttgcttctctctccctctctctctctctctctcttcccccaggttcagatgaacctgtccagcctctccaaaaagaaggtcaaga

SEQ ID NO: 544 - DNA, 642 bp, Oryza sativa
gttgatctggatgatgtacaggctgtttttgacaatattgaggtttgtgtatgccattggtatattgccaattgtctgtcacctatttgcttctatagttatatttatacaacttttctggcttcaggacaagtacgtttctgagcaagtgactcataatgatggtggccctcttgtgatgaatgccttcgagatgattacattatctcaaggtttggatctttcagcattatttgatagacagcaggtaatttcatagttccactcttccttttagttggtaacactcttggtatggttgaccattttgctgttggagaaccattagcgcaatgaaatttgaaacgctgatgggtttatagtgtacggagatctggcatgtcagcttatttcatttacttacaaggctgtgaggcactgggtttagtgacggttggtcgctcaggggtttctatcttgtttataataaatgacttaaacgaacatccatttcaattggcgttagtattatgtggaactatattctagccactgtatatggattaaccgactgtagatcgatcccattgtctattctcttttcttatcgcttagtgtactggttggtggcagacggcttctgttttttgccaaatttgaatg

SEQ ID NO: 545 - DNA, 2219 bp, Oryza sativa
gaagaatgtgagcagagttttcaagagttgaagaatcgtttagtatcggctcctatcttgattttgcctgatccaaagaagggtttccaagtgtattgtgatgcatccaaacttgggttaggttgtgttctgatgcaagatgggaaggtggttgcctatgcatctcgtcagttacgtccgcatgagaagaactaccctactcatgatcttgagttagctgcagtagttcatgcgttgaaaatttggcatcattaccttttcggtactcgaacggaggtatataccgatcacaagagtttaaagtatatctttacccagccggatctgaacatgagacaaaggagatggttggaattaattaaggactacgacatgggaattcattatcacccgggaaaggctaatgttgtagcagacgctcttagtaggaaaggctattgcaatgctacggaaggacaacggttgccattggaattatgcaaggaatttgaaagattaaatttgggaattgtcagtagaggtttcgttgcagccttagaagcgaagcccactctaattgatcaagttagagaagcccaaattaatgatcctgatattcaagagatcaagaagaatatgagaagaggaaaagctatcggtttcttggaggatgagcaaggaactgtatggttgggtgagagaatttgtgtccccgacaacaaagatttaaaggatgcaattctgaaagaagctcatgatactttatattccattcaccctggtgtaccaaaatgtaccaggatctcaaggaaagattttggtgggcaagtatgaagcgtgaaatcgcagaatacgtagcagtatgtgatgtttgtcagcgaatcaaggcagaacatcagaaacctgccggtttgctgcaacctttgaagattcctgaatggaaatgggaagaaatcggtatggattttatcactggtttacccagaacgtcatcaggccatgactctatttgggtgatagtcgacagacttaccaaagtagctcatttcatcccggtaaagacaacctattctggaagtcggttggcggaattgtacatggcaaggattgtgtgtttgcatggcgtccctaagaaaatagtgtctgatcgaggcagtcagtttacttcaaatttttggaagaaacttcaggaagagatgggttctaagttgaactttagtactgcttatcatccgcagacagacggacagaccgaaagggtgaatcagattctggaagacatgttgagagcttgtgctttagatttcggtggaagttgggataagaatctaccctatgtagaattttcgtacaacaacagttatcaagctagtattcagatggctccttacgaagcactgtatggtcgaaagtgccgcactccgcttttgtgggatcaaacgggagaacgtcaggttttcgggacggatatcttaagggaagcagaagaaaaggtgaaaatcattcaagaaagattgcgtgtggctcagtctctacataagagttatgctgacaatcgccgcagagatttgagttttgaagaaggagattatgtgtatcttcgtgtcacgcctcttcgaggggttcatcgttttcacaccaaaggaaaattggcaccgcgttttgtgggaccttataagatagtcagcagaagaggagaggttgcttatcagttggagttacctcaatctttggcaggagtccataatgtgtttcatgtgtcgcaattgaaaaagtgtttaagggtacctaccgaagaagctaatcttgaacagatagaagtccaagaggatctgacctatgttgagaaaccaatccgtattttggaaactgatgagagaagaaccaggaatcgagttatccgtttttgcaaagtccaatggagtaatcactcggaagaagaatcaacttgggaacgagaagatgaattgaagtcagctcatccgtatctgttcgccagttcttccgaatctcgaggacgagattctgtttaagggggtaggtttgtcacaccctgaaaattcaaaatttataaattgttgtttaaaaggaatttttagaatttatttttaaaagtcttgaaaataagatctaattttaataataaattccaatataaaatggggccagataaaatttcattaaatactttgcttaattctataattcctagatttttctgggatttatttgagctaagg

SEQ ID NO: 546 - DNA, 1442 bp, Oryza sativa
cagggttgtcaatggcaaggcccttcagaatgcaccttgcaaaggccggatccccaaggataatatcaggagacccctacaaacaccataagaagcaacccccattgcaaacacaaacacacacacacacacacacacacacacacacacacacactacccacgataccgcaagccgcacaagacctgaactggaacaaacatacgcacccgaagagatcgcgaacacctggacactgaagaactggagcagccaagtttctacgaacggtgttgatgtccgcgactaacaagaattaccggaaaagaagaacacgctttgacaatatttgagctccgaacacgacgcaatggaaaaaaaacagcatgatgtaatgactgtaatcaacaaggaccaaggttgggatagaggggcaggggtgccacgctaatggcagccgaaggctcaaggaacaggcactatcccaagaggatacctgcaaaaaacgagcactcggctaaaaatgccccccggaaaacaaccggctctaagacgaaggaagtccaccatgactcaaagacaggacccaagaaaccaactctgctgctgcgaagcttgactgaagtaggagtactaccgctacggtcgtatatttgcatctggagatggatgacccagcacctccagcaactagttgttgttcctctaagcaaggatgtcgcaccaccagagctgcttctccagcgatgcaatgttgtggttgccacatgaagttgaactggagattgaggccctccaacgatgcagacatgctgcctaagaaaggaacactcttctgggtaaccttcaaacaaccagaaagtgagaggacacgaagtttgagctgcctcgctgacgccaacactgcaacaccgtagtcgctgaccatgcagtttgagagatcaagttcggcgagatcggtacagccctcagaaatggcaaacaggcttgcatcagtgatcctgctgcaaccttcgagactgaggcgtgcaagcgaactaccatgtgccttcaccaaggcagaaacagtagcatctgtgagattctcgcagccgttcaagtcgacatggaccagcccactttcggaactcttgatcaatggaaggagcccgttgtctgtaactgcaccgagaccactcaagtcgacattctccaactgagggcagatcatgccgaccacggccaagctggcatcggtgaaacctgggcaatccttgatggtgagggatcggagagacttgcacaggggaagctgcgcgggagcagagcagatgtccttgatcccgttgcacttgaccagtgagagggccttaaacttcgggctgcagttgaggaggaaggccagaatgcccatgagagtaaccttgttgcattcctcaatctgcaaactctccaagacctttgccgattccgcgaaatccttg

SEQ ID NO: 547 - DNA, 641 bp, Oryza sativa
atcgtattgcccgagcagataaagctagcatgccaacggtatacagcgagtcgctctttgtggaggtgacgattacctaacaatcggtcgattcgtttgatgttatgttttgttctcgctttggttggcaggttacggccaagttcggtaagagtgagagttttacagtcaagtaatgcgtggcaagccaacgttaagctgttgagtcgttttaagtgtaattcggggcagaattggtaaagagagtcgtgtaaaatatcgagttcgcacatcttgttgtctgattattgatttttcgcgaaaccatttgatcatatgacaagatgtgtatccaccttaacttaatgatttttaccaaaatcattaggggattcatcagtgctttgctaggatttgtgggggccccatggacaattgcaacttatgttgttgaaggggggatgaccaacacttacacaaatataaagagcatgtgccacacagcaccaaatgtgttaaggggacttttgtctcaccttgcagacgccatatctgaatacattatttaccaagtaaactctggggctcaatgtatacaaatatttgattcatggggtggacaacttccacctcatgtgtgggagcagtggtcaaaaccatat

SEQ ID NO: 548 - DNA, 510 bp, Oryza sativa
accagaacagttgtgtatacatgctactgccaaatactcaaattcttccatataaccattcctttcaaatgagcatgttgttactgtctcagtctacattaagcttaatgtggcttcattctaagtaggatcagctgctaacattgatccggaagaagctcagcaggcacttgaaatagccgaagctaggtagctagagactagactgttccggtccctttgggcaaagcataactagtattctctctcgccgtgcacgcgcacgtgcacgcaataggcgctccgcagtcacacatgattgccagagtccaaagatacttttaaggccgaccactacataggagcgataggaaaccaagccatgagcgggcgctccgaagtaaaggccaaacacttcggcaggatgctgctttatgtttaatttatttcgctttctgtggaaaacttgtaataagtgattatagttttgtgcatctatgggtgcagtgactgggatattaatattccatt

SEQ ID NO: 549 - DNA, 604 bp, Oryza sativa
aaccatttatacatgctgcatagactgcaattccagtattacaaatgctccagtttaaaatgattttgtttggattggacataactcataagtttattctactattattactaaaccgcaagacttttttcattacttttctgtttatgaatatcaatattccaaccaaaagcagttagcttcatcatatagaatttccgatgatgctgccaaactgaactgaatgctgttatggatgaactaatccactacacaattactatcttgaaggtcagctgttctgaaagcttttcaaaggatgtatggcgtgcagcttgatgatgatttgcataccctgccactaatgcctaatgatggagacacttggtctgtgatgcaaagctgggttttgcctacgagatcattcctggaatttgtaatgttctcaaggtgcacattatctcttttggaattcaatagtcaacatagcagtattaagtggaagatgtcactagctaactgttggtgtatacatttcaaagcacaagtacccaacactgctactaatatttgctcaaaatagctaaatgcctgttatctttctactagagaaaaatgaatcgta

SEQ ID NO: 550 - DNA, 3028 bp, Oryza sativa
attttatattataagatattgcgattatttttaatctaacatcgaataattttgatttttttagaaaaaatgttactatgttattgtaaacttaattttgtatacggaaagaaatcaaaacatcttaaaaaattaaacggagctagtagttaccggttttaaggttttaagggttgtataattcataactaaggtttcgtaggtttgtcatactttttttcgagcttgtcaaaagtgaggcaatcaaaatcctgatcacacttgagccagtaaaataaaagatatatgccacattttataagtcactaacatatatatgggacctatattacagaaacgtaatattgtcatgtttgtggcaacaacgcaaacacgcatgtcaaaatatctaatcacagattgttataaaatacggtaatggccaaccagacagtttcttagtaattagcttcaccgcttattattgttatgaaataaatagatgatcacatctatataaaagatgggatcggtaaccgaaggttgcgcacaacagttgtgtcgtacccctcgccttctcggcgctccttgacaacgggcacgatggttcccaaccatcacgtctatggtggccacccattcctgtataatcgcattgattaataaagtacacaactattctctcgctcccacaatctcaattccctattcaacatattatcagaacttcactcttcgcgagaagaagaagagtagatggagaaaagaaggtatgcgtaccttcgattcctttctcggccttcctcgccgcgatcgtgttcgccgccttcgccatctcctcctattcaacaattttcatataatttgacgtgacttttaataagccttcaatcgtacatggaagctagtgacacgatcgacaaatcaatgccaattaaaagtccacaaatttagcaacttaaataaataagtatttaattaggtctatgtacacataacattagaaaaattggcacgtctaggaaaggtgactgatgaagataatgcattgttcttatcattgacacgtcaccctaatttggttgtcgtaacttcacacaagtacacaagtgatacatgcattagttcattactcccccgtcattttttttaaatttttagcttttagatgtctactccctctatcaaaaaaaccaacttaagagttagatgggacacaatctagattcgttgtactatattggtcacatccaactcctaagttggatttttttttttacgaagggagtatctttttaggttatagcgcctactagatctcttaataccatttcatcttttttttattttagccatcaaactattagtattctcttcttctcctaagtttctctcccttctcattttccctgtgaaaatggatggtgtgtacttcccctgtcttataatacatcaacataatatcagatagaacatatatactagtattatgaatctggataaatttgtagcactagaatgttttctatttgatacaaattgttatatttttaggatgtagatagttttattttaacatcttccttgtaaaaaattacatcacaaattctaaaaaatacatcacagattcccatcacacacaaatcaaatacatcacaggataaatcataaattgtaaaaaaaagaaaaaaaagaaaagccggccggccggccactgccgcctcccctccttccctccgcgccggccggtcgccgcagccgcacgggcccccgtgccgccgcgccggccgccgccgagcggcccttcgcctgccaccgggcgatcccccgcgccgccgcgcaggccgcctccgcgcggccccccgagcctccgcgctggccgcctccgcgcggacccccgcgccgcctcgtcggccgccgtctgcttcgctgtgacgaatggaaggaaaaaaaaaggaaagagaaggtaggagttagagataaggaagagataagaagttggagagggagaaagagatagagggatgagtttgttgtgtggacgggaaaagaggatcggtaatagggattatatagtgtgtttttaattttttttttcccggttagtaacatcaaccggaactaaaaataggtttttagtcccggttggtgttactaacactacaccatgccccaagtttgcttactacatatctgtcaggaaaggccctatatgctgccaaattatttgtcagcaaaacgtttcccgacagataaggtctgtcaggccaagtgctgccggcaaaagtctttcccgacagataaatctgtgccgacagatagaccgatagtgttgctacatatttaccgacagatagttttaccaacagacagacttttaccgacacttaagaagattcccaacagatagcatgtcactgtgttatagatttaccgacaattaatgtattgatggcaagcacaagaactaacaagcaatcagtcagtaatccacacaaaaaatatactaattaccaatcatccattttatgaaccatacctcaaattaaatttgcagcatatatatggatgaatatcactccaaattttgcaacacggattatcacctttcagtaagttacacacatgcataacacaatattcaactattcataactattgttcacaaatgcattctgacatatcatcatgtaactattgttcacccatcaagtagcagtattcctatatagcagttatccatcagctcaaatagctattacataagagttcaagtacatagcaataattacataatttagatgtaactaaggttcttgtaggtgtattgaggtcccaaaaacaaaacaaatcatctcttttatggttcttgtaggttcttgattttttttacagcacctctgctagccctttttatggttgcctgcaaaataatggacagagtaaatgaaatgaataatcatcagtagtgtacagagtaaacatatctagtgtacagagaaccacagaagaatatatatagtccatggcaattagaatagcataacag

SEQ ID NO: 551 - DNA, 554 bp, Oryza sativa
aagaagatgaagtggaagacgacaatattccggactttgctcagtacgctggatttgaaggaaatcaaacgggcgaggaggaaagggatgctgatggtaacaatgttgcggatgatcttggtcagatgttgcaggacgccaaggaggattgcgaaagtgaaaagggggcccataaattggacaagatgttagaggaccacataacatcgttgtacccaggttgcgagcaggggcacaaaaagttggataccactctggagttcttgcaatggaaagcaaaaaatggtgttagtgacaaggcatttggtaatttattgaaactcgtcaagaacattcttccggagggaaacaagttgcccaagacaacgtacgaggctaagaagatagtctgtcctctagcactggaagttcagaagattcacgcatgtccaaatgattgtatcctatatcgtggtgaggagtacgagaacctagaagcatgccctgtttgcaaagcactacgatacaagattagacgagatgatccaggagaagttgacgggcagctaacgaag

SEQ ID NO: 552 - DNA, 826 bp, Oryza sativa
ttctttaaggttcaattcccaggagggaggaaaaatatctgtggagaagtacacatttgatccacaaatagctaggagagagcttgctgccatgattgtactacatgagtatcctttatctattgttgatcatattggatttcaaaggtttgtgactgcacttcagccattatttaagatggtgactcgaaacactattaggtaataatgatatctattagtttcagttgtctattaaaaatatctgcaattaagaagaaaaaattaacatttatgcatttttaggaaggacattatggactattacatggaagaaaataagaaagccctagcctacatggctggaactaagtcaagagtggctattactacagacttgtggacatctgataaccaaaaaagagggtacatggctgtcacagcccatttcattgatgattcttggacacttagaagcattatcatgaggtacttgatgaacaattaatttcatttcctactgctacatatttaattcagcatgacattagatttcatttttgcatcaatctgaatttaatctaggtttaactttgattgtataggttcatatatgtgcctgctccacacacaactgaagttatatgtgaacaactttatgaagcattggtggaatggaatcttgatgagaagatctcaaccttgactcttgataattgtaccacgaatgacaaggtaatcactgaacttgggaagaagattggcaagtctaagttgatgttggagggaaaattgttgcatattgttaacgcccaaatttggttatttaggtatcggagatgaagat

SEQ ID NO: 553 - DNA, 2705 bp, Oryza sativa
ttttgttcttgccaatgatgtaacccaagttttttacgtcaaggacatgtctagcaaaggaaaaaagggcaaagggcctgacgagccgaagcgccacgtggttctcccaggaaaaagaaaaatcgtcggagtagaggacaagactgacgaggattacgatcagtttgatgggtaaccccctttcacggtgacgattgaccctagcatcctcctatcaaatgaagacaccccttactcatgtagcgatcacaaggaaggaacaatagtgaggagaaagtacgtgcggtcaaccgtcaccgccgatgtattgcagtaattgttctatacacgatgtaaactatgttggatgtactgaatatccatacaaatcaattgttgtatagcatatgttaaatatgtatgattattagaatttttatcaaattgaaatcatccatatgctagttatatatgattattagattttttgttaattatgtatgattattagaattttaatcaaattgaaatcatccatatgctagttatatatgattattagaatttttaaaggttttaaatcatgcacgtggtatttacatatgttaattataattttcaacaatttaatatcatgatatgctagttatatatgattattagattttttattaaaatcatgcatgtggtatttacatatgttaattagaattttcaacaatttaatatcatgatatgctaattatatatgattattagattttttttattaattttaaatcatgcatgtgctatttacatatgttaattagaatttttaacaatttaatatcatgatatgctaattatatatgatattagattttgtattaattttaaatcatgcatgtgctatttacatatgttaattagaatttttaacaatttaatatcatgcatatgctaattatatataattattagaatttttaataattttaaatcattcatgtgcttattatatccacgtattctactacatacaacaataatttttcgaaggttttatcattaattgttcgactttaaataattgtaatgcattatttactattttagaaacacatatgcaatgaaattcaagacacagctgctattatctttagtcccggttcctaactctaaccgggtttaaaaagaatttagaaatagcgagaaaagatctttagtcccggttggtgagaacaaccgggactaaagaatatctttactcccggttggtaacaacaaccgggactaaagatccgggggtatatatattcccggtgcgccctcgtcttctccaccaacacttagacattgttcgatctcggcttctcattcgccgccaccgtgcctagggcaaccccgcgccgacaccgccgtcgtctctcgccgtcgcttggcggtcctcgccgcctccgccgcagacgccgccgccgcatctcttgggtgagagccgtcgccgcctctttctctctatctcgatctcgatctctctctctctctccacggccgacgaccggcttcgacgcggcggccgctgccgacaacgccatcgccactgccacgaacgccgcccccgcctcgagctcgccacgccgccgcgccacgccgccgggccactacgccacgccgccgcgacgccacgccgtcgccactgcgactccgccgccaccgcctcgagctcgctatgccacgccgccgccgccgcgcgccgccgccgcgccccacgccgccgggccccgacgccgccgccgcgcccgcacgccgccgggccccacgccgccgcgcccccacaccgccgcgccagcacgccgccgggccggcccacggcgccccgacgccgccgccacaccgccacgccactgccgcgcgcgcccaacattgccgaacgtgattgaaacgtgaccgaacgtgaacgaacgtgaacgatacgtggacgacctttgaacgaacgctgaacgaacgtgaacgaaacgttaacgaacgcgaacgaacgtaacgaaacgttaacgaacgcgaatgaacgtggacgaaacgttaacgaacgcgaacgaacgtgaacgaaatgttaacgaacgcgaacgagcgtgaacgaaacgcttacgaacgtgaatgaaacgcttacgaatgcgaacgagagcgtgaacgaaatgattacgaaacgtgaacgaacgtgcacgaaacgcttacgaacgtgaatgcacttgtactaaaagtgtgagaatgaacgcgtttatactaatacgatttactggtaatacatatatgattatatatgtaacttggcccgtttagactaatacattttcctggtaatgttgcagagaagacgtcgtcgtcgtccctcaagccgaagtggtagctagccatcgaaggaattcgcgcaggcaagtgatgtaaagaagtgattgttagatatttaatattagattgttagacttagcatatatgattattacaattttaatataagattgttatcgatttaatataagattagtagcgatttaatataagattgttatacttagcatatatgactattacaattttaatataagattattagagattaaatataagattgttagatatttaatataagattgttagacttagcatatatatgtatgattattacaattttaatatgagattagtagccatttaatataagattattagacttagcatatatgact

SEQ ID NO: 554 - DNA, 1325 bp, Oryza sativa
cgtgtgaggccacctaccttttctagcactaccaacccagtggaagcaggtgattggttgcatgccatagagaagaagttggatttgcttcaatgcactgatcaggagaaggtctcatttgcatcgcatcagttgcatggccctgcctctgaatggtgggatcatttccgccttaacagaactactgctgaacctatcacttggcttgaatttaccgctgctttccggaagacgcatataccatcgggagtggtgtctctcaagaagaaggaattcaggtcgctcacccagggatcacgctctgttacggagtatctgcacgagttcaatcgtcttgctcgttatgctccggaagatgtgcgcaatgacgaagagcgtcaggagaagttcttagaaggacttaatgatgagctttcttattcactcatgattggagattatcctgatttccagaagctagtggataaggctattcgccaggagaacaagtacaattgcatggagcagaagaaagccggattgctcaattcaagacacaacaggggaataatcagaagccgcgtcttactttaggaccccagtccataccacatggaagttcttcgtccgttgttcgtccgcagcgtcagttcttcaacaacaatgctggcaacaacatacgtaatcaagttccgcgtcctgttgcagctccaacacagcaacaacctatcaagagggagcaaggcatctaagcccgcggtgtgtttcaactgtggagatccaggacattatgctgacaagtgtccgaagccccgacgcgtgaaggttgtccctctcagaacaactctactgtaccagtatcaaaggcccgtgcaatcatgttgctgctgcagaagctcaagatgctccagatgtgattttgggtacgttccttgttaacttagttcctgcaacagtgctttttgattctggtgctacacattcatttttatctatgagttttgctggaaatcatgggatggaagtagaagatcttagacgtcctttgatggttagtaccccaagtaatcaagcactctctttgcaacgtagcccctctgtcagaatagaaattcaaggagtaccatttctggccaatcttatcttgttagaatccaaagacctagatgtcatcctagggatggactggttagccagacataaaggtgtgatagactgtgctaacaaaaaagtaactctcaccagcaatgatggtcgagttgtaactgttcatgcattgtcttctgaatctttaaggtcgagactgaaccaaataactttggaagaaattcctatagtccgggagt

SEQ ID NO: 555 - DNA, 575 bp, Oryza sativa
aaatacaagtaaataagaagcagataagccctatggatataatggcagggtttccatgtatgaagttggtgctgtaaaccttcataagccataaaaagctcaaggcgtatcaactaacgcaccgcgaaagcacgagaggttcctgtaaaatgcctgaccgaaccaaacattggtttggaggcaccaaaatgcctcaatctgtaaacaccagcagcagcgtcttcaggaactgtccactctagagttgcaaaacttcttgaactcaatcttgcgggccttgaccacttgaaacgcaatgaccaatcatcatcatcgtagacaggaacccaattattgttaccatctagcttctcgacgagtgcaaaggtaccatccgtaagaaggtcattccttgggcatgctgaataaaatgtagcattcacagtactacccttgttgaatgttgagttaccaggaacatccgagttgacatccccaaacttgacaccaagaggagttgagtcaaaaacaacaccaggaagtagtccaatttgcttgtccaacatatcaagaggttggaaatttgttgagacctc

SEQ ID NO: 556 - DNA, 653 bp, Oryza sativa
ttatccaattattagaaggttgtaccagatgaagatgagcatctgaacgaactcctccaggtatggtggtgtttattctgcaacattttgtttcttttcaattttgtgaggattgtgcagcatttttttgatacgagattatctgaattacatattgaatctgaataattgcttcaggaagaggaagatttggtgtctgctcatcggaagcaggtggaagagaccctagacatgatcaaagaggttagatccctgaaatggtaaattgtcaagtggtttctattatcgtttttttccataacaactgagattactgtcttgaactcttgattaggagatgaatttattagttgaagcggatcaacctggcaaccaactagacgactacatcacaagactaagcggtatactctctcagaaagctgccggaattgtcgacttacaggcacgtcttgcgcagttccagaggcgcttaaacgagaataatgtgctgctatatgcccaatgcccttgatcaaaggaagtacctatttgtgatgagaataacgtgcagtatatctgtataccagagcccttgatcagaggagttgcctatttgtcttcactacgaggctaatcagaaaagtggctgtgccactgtttgctggtatgct

SEQ ID NO: 557 - DNA, 5775 bp, Oryza sativa
tcggaggtcgaccacatgccgccgcctccgccacggggtccaccaatgcccccacgccacaggagcagaggtggagggcaagggacgccaagctgtccgtgctcgcgtcggccacccgccctgtgaccgcccgagccgccgtgttctaggggccgtcggacgtgtcgtcggcggcggggtgcggcgttgtgttcttgcccacgtgcgagctgcgactcggtggcaaccggctcgcaggcctcctcttccccctctcccgccagcgcagcctgccgccttgaggggcttcatcaacatcctcatcttgccgccgcactcgcggcacccatgcttccccgaccatgatgccaccacctccgccacggcgttcgccgaggcccctgcgccataggagcagaggcggagggcgagtcctcggacgcgtcatcggcggcggagggctgtgactcggcggcaaaaggcttgccgtcctcctctttcgccctctcccgctggcatggccgggcgctgtggtctcctcctccgcggcagcggcgggggcctcctcccccgtggcaactgcaggaggactccgcctcccccatccgcgcgccggccgagaacagaagcaaggagagaagaaaaggagaagaaagaaaaaaaaaagaatagacttggggcccacatcattttctctcacttacatgtgagtcccacatacttttttttttctgactaggatgccacatcagcgaaaccagacatctagacctaaattgcatggttttgtatagtttagtggtgaagatttctcatattgtgaattagggatatcaaactaactcggtgtaaaattgagggacggcaagtgaacttattcagtgcacgcaactgtataaaagcccataagttgcatcttttcgttgggctattatttttgctcactgctgcaaagtgccactattttggtgtggtagcaacaagttttaccactccacaagtccacagttcaaaacggtaactctgattgttcagtagtgttctttgctctaacatctttctttttccaaccagtctaccgatagcggattttaagctctcaaagtaacgtttttcgttgtttgtatatcacttaaatagttataaaaaaatttaaaaataaattagagtaaattgcacccacggtgtatcaattgtcaggtgggtgtgcaatttgatgcaataacttgagaaataagcgttctaatgtaataacttggcacgtatgtgcaatttagtataagagtttttataagtgatcgcataaaatacagcaacttgcaagatatgtgcaaatttgatataataaattaagaagttatgcgacaacttaattatttggagcacttttttttatacatattcaatttttaagtacttattttgacgatatacttgtggatttgtataagcacattcatattttttatcctcataactaatgactaaaagtgaattaaacatctaattattatagttcggttgagatttagaaaggtgaaggaaacagaaattcttaaaggtaattagatgtgcggtataattcttaaagattaaattcaatatgataaagtaatatccgtaggattgctatgtaatggcatattgacatcgtaaagaaaactcacatagcatatgtttagccaagttgatgcacaaaaatactaaattgtcaagtttttgtactagaacgcatccatttgtcaagttgttgcactcggacgttcaagtctcaagttcttgcactttatcgcacccacatgccaagttgttatatggtgggtgtaatttacacaataaattaagatgtattaacatgtgatatattactataccaacatctaacttaaaattcaatttctacatattaaaaaaataaatttgactattaatatacgttaactaattgttatttaatttatttttttcgttacaacatgtagaagttgaattttaagttgcatgtttgtgaagatatatcacatatcagtacgcctacttaatgttttttcaaattttttcataattgtttaagtgatatacaaacaacaagcgaatatcccctcgagaatttagaataatttcccccagtctaccctcaatcccatctcccctatattcttccccaatccgggcgactgagctcagaggcagttgcacatcactacgtcacctcccaaaatgatcctagtaatttcctaatccatttggctattggtgcggccgcctagtcctgcagttttattaggaatagcaattccgtttattaaactcccccgcacgagtgacgagatgccgctgcgccttgcttctccgtgaaacaacccccggcatgactccccagcgatacgtccacacacacataccacaagtagagttccaaacttgccatatttcccggttgctgatcatcaatcatcacttcatcagcgcatacgtccggaacgtggatgggaatttgaagcttcgctacattccaccctgtttctcgcctcttgtcccctgcatcaacgcgacgacacgcccaaatctctatctgctaacgcgatgctactcctcccgttctcctgaactcatcaggccagggccagccacgcatgtgagttgcagccgccagtcaagcccaggtttcggctgcactgcatggatcgagcccgactgccgcaagcaatctcctgaccaacactaccacatgccgacttcgccgcaaaccgccccggctagctagtagtaacatggtgtcacgttcgcgatgggagctagtggctgcgactttggacttcgttactgcaatctcgccaggattctggggaaatccgttacgtgacagttgacacgcaccgcaacctagcacgcacagttcacattcagttgcacctcgagctctataaatggcgtgatgcagcgaagcgaaatatgtcagtagctagcagcgatccgataagtgataatttagtggtgttttcacgcatggctcggtgcagcgtctcccgtgttgtcttgttgctcttgtgttgcatgcatctgtcggctgcagctgcaggagcagcagtgtacaacgtcgagagttacgacgcgagacctgacggccggacggacgcgtccagggcattggcgtccgcctggtccgccgcatgccggtcgccggagccggccaccgtgtacgtgccagacggcgagttctttgtcagccactcggccttcgctggcccgtgttccggcggcaggatgacggtccagatcgacggcacgctggtcgcaccgtccggttacaccggcagtgccagctctggcggggagtggattgtgttcgaccacgtcgacggcctcaccgtgtccggcggcaccctcgacggccgcggtgagtcgctgtgggcgtgcaaggcggccggccacggcggctgcccggacggcgcaacagtacgtacatactacagcgcacagtgtactgatgagcttaattgcagggaaacttaaaaaacatttttgtgttaaaccgacgtgtgttgatgtcgacgtggtgcgtggcgtgcagtcgatgaaggtgctgaactcgagggacgtggtgataagcggggtcaagtcggtgaacagcgagctgtaccacgtcgtgatcgacgggtgcgagggcgtggcggtgcaggacgcccggatcgtggcgcccgggagcagccccaacacggacggcatccacgtgcagtcgtcgtccgcggtcaccatcaccggcgccagcatccagaccggcgacgactgcatctccgtcggccccggcacctccaacctccgcgtcgagcacgtcagctgcggccccggccacggcataagcatcgggagcctggggaaggagagcgaggagggcggggtggagaacgtgacggtgagcggcgcggcgttcgtgggcacggagaacgggctgcggatcaagacgtgggggcgggcggcgcgctcgggggcgtacgtgcgcggcgtcgtcttcgagcacgcgctcatgcgcgacgtgagcaaccccatcatcatcgaccagagctactgccccaacgacggcggccaaggctgcccccatcaggtaccgtacgcgccgccgccaacacatcgtatcccatcgccgtcgtgtctaatgaggaggtgtttagataggggtgtaaagttttaatgtgtcacatcaggtattatatagaatgtcacatctgagtagtaccccaaggtcctgggttcaaatctcttatggagcgaatttcagattgggttgtttgcggggctaagttccctatttcaatggccgtatatatcagttgaatgtagaggccgggtaaaaaatactcttctctaaaaaaaatataaaaaaaattatatagaatgtcacataggatgtttgggctagtataaaagaactaattacagaatccaacagtaaaccgtgaaacgaatttatttagcctaattaatttatcattagcaaatgttaattgtagcaccatattatcaaatcatagagcaattaggtttaaaagaatcgtctcgtaaattaatcgcaatctgtgcaattagttattttttagcatatatttaatatttcatgcaggtgttcaaacgttcgttgtgacataatataaaatttttgtgtgggaactaatcaagggcatgagttgttttttttcttgcagagctccgacgtgcagatcagcggggtgacgtacacagacatccagggttcgtcggcgtcgcaggtggcggtcaagttcgactgcagcgcgagcaaaccctgcagcgggctcggcctgcaggacatcaagctcacgttcgacggcggcaagccggcggaggcgacctgccaacacgccgacggcacggcctccggtgtcctcatgcctcccagttgcctgtaacgctttaccgccaaattggagaaacaattcttgtaaaccgagtactcactatttacacatggacgaagatacaacggatagtatagtgaattagtgatattaacaagatatttgattcggtccaacaaaaaacggatagtatagtgaattagtgatattaacaagatatttgattcggtccaataaaaagtacctcgacgtaccggtagtccggtaactcacagtactagatccaacgatcggaaataatttggtaccgtgaggtcctgtacctcgaggtactttttgttggaccggagcaaatctctattaagaaacttcaacgattccagctctaatcagtaatcgaccaattgtattcccgaatcaagaaggttcagcattattattcaataaatcaactagggaatgacaatcaaattatcgggtctgacgactactactcctaaatgcctcttttttccctatgttcttctctgcttcagtacatccagtcatccgggggccagatgccaaccacaaacactacaaatgtatatacaagtaatgaattcttcactacaagaagtatgtcagttgctcccgcttcctcgacccgcctttgccgtagagctcattccattccttgatctgattcatcacaacgccttcgctagcgaagctagcggcgacctgcatagtgttcaatgcgcaacagcttagcaatatgttcttgctgtgaaaaggatagctaagataagtacattgcgtgtgtatcatgaagaatccgtcagtgacttacttcatcctttgcctttctcaagtcctccatgtttagcggtctcagggtagtctctccagcatcgcctttgtctgatttatctttcttgtc

SEQ ID NO: 558 - DNA, 666 bp, Oryza sativa
agggggagctggcccagaacctaccttaggagcactcctcccgatgctagtggctgtcgcccttccactcctgctgtagtcgccaagctgtcgcatccggttctacgccaccttcatccgcatgtcctccttcctcatctccggcaagtcaacaataatctcgtgcgcgtagctagccagcatcgtcggtctgattcgagagttacattttgttttgattcaatgttctgatttgagtgtttcattttgttttgttttcatgtttcatccattgatttcttggtgttgcaattagtatggatgttgtatctgactgaaatactttcgatcaagcgatgaaatattttttcctacttgatgaaacatctgaaatttttttgttgaaacatttttttatcgagtagtgcaacatgtgaaacaatatagtgcaataccatgtgatgttctatgaaatatcctacatccaattttgtagtgcttcccttatttatactccctccatctatttttgatagtcaaaatctgaaaaatttatttttgatagacatatttcaatccaacaacctatcatcttaatgactttctcggattttatgcgtgactctccattcttccacacaatattggctatatgggcatcgagaaatgtaaatattaatgaatcgc

SEQ ID NO: 559 - DNA, 11354 bp, Oryza sativa
tacgtagctaatacagcccgatatatggcgttatatgtaactatatctgtacgcccgaagaaagaagtaacaaattaagctatatacctctcaagatacaatgtaattaaggacctagctagaagatatatatatatatatgctgcctatatatatatacctcctatatacggacatatataattcaatttagtccacgacgttgttgctgaagagcttaaactgtccagcgtcgagcacgagcttccgtatggaggcgaatgcgccgatggccccgacgccggagaagacgaccatgatggccgtgttggcgaggaacatcggcgaccgcctgggcggcgcgagcgcgatgttgtacatgacgacggggaggacgaagtcgagcgggatgaaccccacggcgccgaccacgccgacgatgtcgccgaagaagggcagcatggccgccatgaacgcgcagaaggcgaggtagagcgtccgcaggagcagccggggcaccacgttccgccgcgagaacttcccccgcgtcgcgtccgcggagctcttctccatgatctcgtacgccacctgggagtagacgaggccgatggcgaggagctggaggaggacgaagaggacggcgaggccgagcagccacgtcggggcgagggccgggccggtgtccggcatgaggctcttgaggacgttggactggacgtggctgccgaacgcccagtagccggtgatcgaagggatgtagaaggcgaaggctatgacggagtagcacagcacaagcgccttcatcatcttcccggccgccggtggcgccaacgtggcctgcaaacgccgatttgaaaacggcccaccataaatcttctaaataggcccgcataacacttcatatgggctttttaacaattgatatgggcttaattttaggagcccaataagcccagcctgtcgcgtcagttggaccatattgcggcgattttgctatatatttgtcgacaaatttttcccccaaaatttgacagatgtaattacagtacaatcgtagtgtaattacactgtaacttgcatgtaattacactgtaactatagtgtaacttgtatgtaactttcaaaaatctctccgttacatgttatttcggtaaaatggaggtcgtgggaacaaattctttcacatatgtgtgtgctatgatttgttttctttctcaccaaaacaaatcttgtaatagatccaacgattcaaaattatgtgaaacttacatataagttacactgtagttacatgcaagttacagtgtaattacatataagttacagtgtaattacactacgattgtactataattacatctatcaaatttttggagaaaaatttgtcgacaaatgtataggtagtccctattgcggtggcttacagttttcggtgttttcctttataatttccagaggaacagatagtctaaaaagggctagcatgtaatttcagagtactagcgaatctaccaatatggccatagaactcttgttggattccactaagggatttttctgataagtgtttaacatatctagatctaggtacgttaagtcagatttttttttcttgatcaaaagtcagaagacgcaatgatgaatacctggatttcaggcagtatgccgttgccgtaaacagaagccaggatagaaatagagaggaaggcattgaaggtctgttctgatttggacgagctaagcgtgtaatccttccccggagcatcttttgacagacctgttaagaatgatggttaacatctaggacaatgagagttagacacttaaactaccagtgcaaactgcagccctcagttgtacaattttgttttctgatatagcgtagctgaagaactagtaatcatgaatttgttaagtctggttctggccaaaccaatcaaatagcttgtgttgtgcctaaattagaattacaggtacaaaatggcataaaagttaaaattcctaatggtttttactggaatctgaaacgtctaataagtaacgacagtaatgcgttttgtggacatatcatacctagttgagtttgttccgttatcatgcatcaaaaaacaactgaaaagaattggctgcaaagcgcagtaatcacgttcattccatttgtattttgtcttgtgtttatataaacaatggagcagaatttactgtatatttatgaagaatactactgatagatatagggcatctgattcccgatctaattcccaaccttttgtggaatctaattcctccatctgctgcagcataagtttctctgaaatcttaacagaaaagttctgggaacacagagaggaatgaacatgtgacgcgagagttcaggcgatatacctgcaccaatgcaagcagcagatacaaggatggtgtagcccaagctcaagagcagagaggcaaagttaatgtgccgcagggaatggaatgatggtagctgggagaggaaggccagcgccacagctactatgatgatgaagtggtacagtttcaggggaccattgggagaaaggctcgtatacatgatctgtttgggcacaacaaaagaccagtttatccaattttgcaactgataatttgagctgtgaacactgaacagaaagaagttattaattagttgttttttcatgccaatagacgaaatctgttatgcaatttcactaactgtaaatgactttacagttttagaagattgtaattactagcaggccgactacagtactgactcctttctgacagaaaaaatatgggattgccagttctgttctatcattctgcccccttattgttttcttgtctgaacttagtatagaagtacttaggttgcaggcaagagactatgcaaggattggaatatcttcttcctccatacaattttaagctctaaaaaaaatgatgtatgttgacagctatgcagacatgctacgaataaaatcatgtaattttagagttagccttcaatagccatatgttcaatccttccaaggtcagaagtacaagcacatgaaaattgcacagcagcatagggtttatttcctttgcttttacaatcagtgatcaggttttgttccaaaaataagtttagcttttattgtggatatttgcaatcaaatgaacaggaaacaacctatacctgtttcaaattagaactactagagcgatgcatagccatcaatatccattgcaggacttcgttattacttactacctccatcccaaagtaagtgcagccataggtatccgtatccaacgtttgaccgtccgtcttatttgaaaaatttatgaattttttattaaaaaaagtcacacgtaaagtactattcaggttctatcatctaataacaataaaaatactaatcataatttttttttcaaataagacaaacggtcaaacgttaaatatgaaccgtgcaaaactaaacttatttttggacggaggtagtattacttattggttgcatgattatgacttgcttgcatattacaaacccacaagcaaagccaataaaatattaataaccatagtatgaatcctcccacacgcattagcaaaattagcatgccagcatatcgtctgggaccagctttcttactagtttgaatttctgtcgttgcgtcagtggatactggataacagaaagcaaccctcctatcctgaagcagctcgagtcaaattcatcagagccaaccatttagatcacaacaaacatggatggccaaatatttattgatctatgcaatacgatatcttattcatattctacattcacattaagagcatgatagcttcttgattttgtacggcaactatgtccaggcattcccaatttgttggatatactacagcttgtccaaacacaaacgacatgaaaactttgttccgaacaataaaccaatcatagacaacagcaattggcaatagtatgagcttaaacttatatgcatatcagacagagagttcaagggggttatgggaagcaacgatttgcacctcgaggcaatcggcggcgagcaggatggtgccgatgctaacgccggtgttgatggccgtctgcacgatgaccacgaagtaaaacatccacccggaccctgcgtgcaggagcagacgaacaaaagaaaaagcgatactatcatgtcgataattaattttgtgtctttgcgttggcgagctcaccaacgcgcgccatcctaattaatgggagcatggcggcgagtcggcaacagcacggcagctagtgtgactgtgtcgctggctgctccaccgccgcccgtgcacaaaggcgcgcgcgcggcgccgcgctgcgtccaaacgagcattgatgcgggtagctaaagctgtctgcttcgcttgtgggcattgcaccgaacgcacatggggcaatacacgggaatgtcatgtgcgtgtggtgatggggtgcagtggaaaggaatggatcaggggagttaatagtaataccgaggacgtcggcggcgagctcgcggaagcggatgtggcggcggccgcgggcctcgcagtgctcgaggacgcgggacatgagggagtactcgtagaaggtgacggcgccgacggcggtgagcacggtgagtcccagcgcccaccccatcccgcgcagcgcgtacggcagcgtcagcaccgtcggccccacgatcgccgtcgtcaggtggaacccggcgtgccaccacgtccctgcaaggtcgccccgcgacgggacccaaccacagatcacagcagaatcagccctcgcattgcgcgcggaaggcgggcggggggtggaggggtgtgacctacctttggactcgagcacgaaggcggcgccggcgtcggcggcgggcggcttggcggccgcgccggcctcggcgtcgaacgccgcgtgcgccatcgccttcgtctccagtcgtcccgtgccgcgccacgccacgccacggtatttatacgcggcaaaggcgacgcgaagaggagaggattcgctcggccactctctctctctctctgtggatgcgtgtaaatcccaagcccctaatctgatgaaccaacttaatcggtgcgttaattgagcggtaacgaggagattaaatgttgtaatctcgcgattactgctccaactgcgagtgccagaggctttgcggggatccgctttgatcagttgatcgtctactagtaggagtagctgtttggttctcgttgggcgcccggcccccgtatttatgctgcgtggccggatcggcggtgaggtgaggacgtgaggaggttaattaaaagggctctgttccaagtggacgtcgtcgtcttcggattagagtaaaacaaatcaaattggccaatctgactagattcattagactcacttctattgagtggtagcggttaacttttcacttgcatgcaaaagatgagcacataataattaagtatcaattattataaacttaaaaataagtttatttgatttttaagaaaacttctatatatttagtataaaaacattactccctccgtttcaggttatacgatgtttggacttcgatcaaagtcaaactgcttcaagtttgaccaaggttatagaaaaaaatagtaatattttcgactcaagataaattgattataaaaatatatttaattattaatttaataaaactaatttggtaatgtaaacttagtctaacttgaattagtttgactttgaccaaagtcaaaacatcttataacctgaaacagagaggagtatttaatagtttaggaagcgtgtgctaattaaaaaacgaggaatttgtaacatcaaaacgcccaaaccaagcgtgctaatgaaaaattgtgcttgttggcttataggctatcgtcggaatttgaattttagaagttattttttgttgattttagtgtgtgttttttctttctatttttttatttttttagttgattttatatcttttggataaatagaactatactataagttttaccctaaacacccttggatgctttctagaattgttgattgtttggatcgatggcaatcattattgtctcattttgccaaatttttgtgatgttcacgtggctttacatttcccatttttggacagaaagttttgttttatcccattttaagcccttctatttggccccctgtttcatttcgttgggaatgtttggctaaactactggatactaattacacgaccaaatggtagcaaagcgagatgagcgtgtttaagttggtgaccaaagttaccacaaccaaaccttaccaaaatttagtcacgatgacgatgagtgtgttttagtgtttggctcggtgaacaaaactgcctcaactaaactttatcaaattcccctaatacaactttaaatataatagaactcatgaaaattagtgcaaattatgttgtccgctctcatttactcgtttatgaacagttgattgatggagaacaaaggtaaacttgttgagagagaggtgataacaccctaggctctagcctacaacttattgaaggttgtcactactcggaagcccctctttctcctttttcagagttattgctggcattgagtaacctattcttttccattagttatctaggatattttattctttttcttgtgttttccctagatctttgataaatgttcttttcactcgttaaatctttatattctatttaactggaactcgcttaccgtaactattgctataaaagagccataaaaatcacatcatcacttatctttgacactctcggatgatgctttagcattccaattatcacataatctttctagcttccatgatttctttttggttgttggatagaatcatttttttggtgagatttatagcatttggttcatatttgcatttttacaactgtactatagcaccatcctacggtaacacacaggatgtcatctagtactacaacatttatttacttgtaatggcttttgcatgaccactttgacaagaaaggtgagaaaggtagtccgtgctaaatatcgccaccttatttaattggttataaatatctcctctagctttgtcaacaacaaaaaaaatataggttttggtcacaaggcagctgtgggcgactgcagtcgtagccgcagaaccacctaacaaacagccccctaaaaactagataccaaggtgcacactctaagggcacctttgattcagagaaaaacataaaaattctatagtaaaaaattctatgaatgcctttgaagtaaatgattgattcctatcatatcttttaaaaatcctatggaatggacaatcctatagagattttggagaaaatttagcatgagcttcaacctattgaaaaatttcctttgagtctatctctctcattcgattcctatgtttttcatgtgatccaatcaaacggtcattcctatgttttgcaatcttctattttgcactttcattcctatcagtattctttttttttctaatcctacgttttttcattcctacgattcaaaggggccctaatttatctacagaaatcaatggatttacataatcatcaataatcatatcgttgtaaaaacaaaaaatgacgaactcataggcagaatctttgttgagttttgttgtagcaattagtttggtttattcgctattttatttatgtcgatttacctaaaaattgtattaaccaagctacacttttttttcgttttattacaattgtttcacctttttcagtccaagaacaaagtaaacataggaactgttggatacgagttaataagagtggtaaactaagtaacttcacttgataaataggtagtccatttttcaattttgatttctaaaaattcttggtagcgtttgaatgtagatttaaggacaccaccctgttgtttttggatgaagagccgatggatgatggatttgtttatatggatgaaaaataaatatgatctaagcagtactgacgtaaaagagttttagataaatcatgtattttttaaagcacgggacaaataatctgtaaaagtaaccaattatcctaggcctccgtagatcaatttataccagtaaataggatatgccataccggcgtactttctccgttcctaaaaagtcaatttgtagatatgaatatgatatacatctatctagttcatcctggaagttagtccttttttctaagacaaccaactaggtacgaatatggataaaaatatggataaacatctgtctaggtttgtttctagaagttgttttttagatggagggtgtaccctaaaggtttgtctctctctctgagatggtgtaccccgaccattattttctcgatattaggaggaacgaaaagtgaaaaaccaagttggtaagataccgccagattacagctgatgcacctgtggaaaaccttgggtaactttcctgcggttcgggatgtttcagaattcagattgaaaacgttgtcttggacggacgttccaggaagattgcctctgcaaccacggatcatacatttccgcgacactgaatcatacacactttgtgctcctttttgctaccaacttacttgattattgcagttctttatttcactcgcaatgtacgatcgcagtgtaacatctgtagcggaggcaaaatcgaggattcggacctccgagtcgaaccgcactacacgcagtgcggctgtggaaaacggctagccccccatctttctacgtgtaatgttttgttttaacatggaaaaggggagctcattggatctatctaatctttttttaccactgtcttgatctggcaacaatgtactgacctgtcttgtctggtgtagtagaaatcagtgttagtggatgacttgtgaggcgcggcgagccaattgccgcgcggcaacacagaccacttaaggtagctcgagttctagcccaggggcaataacaatgacagaaatattcgtaggagacacaagaggggcagaggcttatcaggtatataacgaattgattcggattgatcagcgcatgaagaaacagccggctccaatcatccaaccggaagtcaattttagcatgcttgaatgcttatgtgtgcttcagtacttgagttgttgtctgaaagaaaatactatgttagtagcataaggggaacaaacgtaatcaatgaactggttaacacaaacgccacaagccggcaaatacggtttagttacagtacagttcatgtgcaagaaacttcagtaaggaaattactttggtctgaaaggatataagtacttaccaaaaattttggagcatgagtgccgcaaagtgtggaacaacaaccatgctgggcttccggactagttttttagcaccatggtgtcacaaaaggtgattcagggggaggcgaccgtgagactgcaaatatacaaatctgggaggcggcgaccgtgatacccgcaagaggtgattcaccagtatatatttacaaatatatattagaaaaatgtatagctctaccaatatattacaagccgacaattgcacatatacctaatgcttcccatggtgaggcaacataccaacatggtgatagcacagataagaaacatatacaggcagagcagagaagttagagctgcctggtagatcgaatcgtttcagtaaaaggcatggaggtttggaattagtaggaggaagattattaatagtaaaatcatgggaacatgtgatctaccagcttcttggacaccacaacttgctgcgtagtccaggcttgaggtacacttaaaaagcttcaatctcactattagtagatatcacaaacttgcctccaatttgcagctacgaggggtaggagtaataatagacccactatccagctatctaaactcttcagggacatgcatgccaaaaccacgcttcagcttctcaatcctattcaaggaaaatttgataactgtaagtcgatcgggatagtgataatagaagcaaatttgtcaagatgcctgggtgagagctaagaaattgacttgcatcagtgccagtacagttttgtattgtttgtaacaaaaaaatatctacatccaaatatgaacaaaatgatcgacagaaactattgtcattactaatgggtgccacgagctactgcaggaacaaagacaattttttagaaggaaccatgaaaaggtgcatttttccttaaattccttgactgacaaaaaatattaatttagacagagcatcaaactagataaggtctttaggtttggtgcgatgactgtgtgtagatttagtggaattcctatagtaaccgtggtgctactttttatattttgatctgaaatagttagtagtaatgactattgaaataaaataaattgtggcaacctgtatgggattattttccatcgtgttgagttttccagtagatggtcctaagaaattcacatgtttcacttagtaaagctaagtgatctagccagtagccatgtatacctacttctaagaatgagccaggaaacattgctctagcatgcaacatgacacaccattaccgcaaacacgactgatgataatgcatgtacacagccatacagctataatgccaaattgcaagtgctcagcccaaattcaaatcatttcaaattacaagcaacatggatgatcatggccaagcaacatgaagttcatggccttggtgattttatgatggaagttggaaaacaaagtaagcttgcaatgcttggatggaagattatatatacatcagcactacggattgttaacaaataaagaatagacaatggtaagatcaaaatggtgaaatatctttgatatcaattgtattcacagacattatgcttttgagatatatcagatgtttaatctcagaaaaagcatgattgtgatcatgagccaaatgaattctggaaaagaaaagcagaatacattactaagttcctgcttttatactaaagcagtttgagcaaaatccaatggacaaagtaattaatattcaaaaaaatgcaatatatgttgagaaaaagaaggtacgccttatataagataaagcagtcgactgtttggacaaaaaaaatgtacaaaatgtaaaaaaactcacgtgggagcaagtttgccaagactgcgtagcttcttgccagtttcttcatcagtaatatttccagaaatctctacagaatatgatttgccagagatgcgtggaagccctcttcctacaagcaaatctagatctctctgatgaagttctctgccattcacgaaaacaccactatccccactagcacagttactggccatcgggtaattgaattctcttatgaatggctgcgcattttaaaaaatcatcagaagttta

SEQ ID NO: 560 - DNA, 9978 bp, Oryza sativa
gtgtcaggcgagtgatgacgctgggcctcactcaaagacaagctgtgatttagcttctaggcgagggcgcaagccagttttttttttggaagatagggtgagtccccacccaaaagaagagtaggtagaagtggtgcatgtggtatccccttagatataaaaggaggatcttgcccacttaagaaaggggggcgaaaagagagagaagagaagggaagacgggagctcggagagaagagaaagaggaagagggtctctagagtttgaactctcttgctctccagctctttgtaactccttcatacacagatccaccagaacacaggagtagggtattacgcttctcagcggcccgaacctgtctacatcgcccgtgtcttgcgcatttgctctctcgcgaaacattccacagatcgagggcttagaacctcacctagcgcccctggccgaaccggcaaaggggggcccgcgcggtctcccggtgaggagccccacgctccgtcatctagcgcgccaggtagggggcgcgtgtgtttttctaagccctcgtcctctttcgtgtgcgccaagcttctcccgctcagcccaatggctgaacgggcagtggcgcacaacctctctccgagcgctagcggtgacgacggggagcagaacccgcgtcgtcgagctcgtactccaccgcccccctcttgccaaagtcttaggcgggaggaggcgctcgagggggtcgaaagatcagcgacttcgccgcccacgagcgatgaagaaggacggcgagacggggagcgtcgcctcctcgtctacggcgatggcagcacgccccagggcgcgctccaagctgcgggcgcgctcttgcgtcacccgcccgtcgtccccgatccagagactccagcccgacgttggctggatgacgtggccgacttggtcatgacggcacagcagcgcctaggcgccggcgggcggtcctccgctaccgaggcctctggcgctgccgccgccggctccatgtcgtcgaggcggaaggcgcggcgagcggcggccgttgcccgccgttcatccgccattccctcatcaacgcctccgacccaagaagatgtgcgtggggggccagatgcccgcctcgatatcgagtgccggcgcgacgctcgtcgcgccgcccatgcaacggagggcgcttcctcgtccggagcgccacttcggtccgggcacgggggccggccccccgtgtccccggttggcggtgccggctgtcgagcctttgtggcgagccttcggaacgtccgttggcccccaaggttccggcccaccaactacttggaagaacgaaggcggcgcgcggccctccgagccgcgcgctaccagcagagcctgcggcgctaccatcagcgccacgtccgggcccgatcactctgcgtcgacgacctcgtcctacgccgcgtccaaacgcgtgctggactgagcaagctctcaccaatatgggagggtccgtatcgagtgatcggcgtcccccggccgggctccgttcggctggccacggccgacggcacagagctgcctaacccgtggaacatcgaacaccttcgtcgcttctacccctagtgggggtcgggtgtcatgtctcgggctcgggccaaccccgcacccccccccccccgggcgtgtagagttggccgggggctaccacatgcatatccttatcttttttctcttccttatttcaataaaagcattttcgatttcctgaggattgtgtctgtgccatcgtttccttttgaagaatcttggtttgaattaacacgctcgtgctcgaccctgccctcggtggcccgggccggctaaaatcgccaaacggggcccagaaccgagccgtgccccggggcgtggtgaactccgggggggaatcggcaaaggcccacaattgggtcatccataaccctcggtcaccgcgctcccggcctggccagtctcgacacgtggatctccccaggcactagccctgacccgcgccgtttgaggctggggcctgggcacgagcccttgttcaagccaagacacagaaggaccgcggcacagaccatcctcgtctcatacacacaataaacagagctgacgcaaaaatttcatctttacttgattacagattaaatcagtctatacaagaagggggcccgaaggcctcggaagaagaaggaaaagctattaagattggcgggggcctgggggctcactccgacgcgcccgggttgtcggcctcgtcgtcgctgtcgtccgcaccgtcgtcaccgccctcctcgtcggagtcgagcgcgaacgcgagccgaggggccgtaccctcgaagctgtggacgatttggtcggcggcgtcccggacctgcgcgcgcgcgccatcctgggttccaggagggaactcgtccagcgctgcccacggggagaagtcagggtccctggcctggtagcttgccagtacgagctccaccgccccccgggtgaggtccctcgaggatgacttgatcgtctcctcgagctcctcggggagccgctggagggccccggccatctctgagaggcgctgggcgaggccagcgcgccctgcaactcggcgatggcgtgttcggcggctgcgaggcgggcggctaggtcgccgtggcccgcggccgccccgccgctgtgcgccctcgcgtccagctccttcgcccgcgcctcgagctcagcggcccgctgatccagtgcggccctctcggcgcgggcgccttccagattgcggcgcgcctgctcctcccacgctgcctcacggaggaacaggctgtccgccagccgctgcgccgtggcctcggcctcctcgagagctcgcccccgctcgatgagcgcgtcctcgcggaagcggagtgcggactcctcttcggcgcaggcggcctcgtgctcacgatccgggaaggcggcaacacgctaccctcgagcggtgcggagccccgtgccatgacgccggcggaggaggagcttgagagcgagcgagtatggcaagggtagggcgcaggaaacgagaagttagagcgcaagcggcgaaggcaaggggaataatggcgagaggaaggaaacgagtctcttcctcggcgtctttatacccttgccaacgctatgcccggctcctcgcttcccgcgcccactatctcgccccctcgtttctcgcgcccactcctccactaatcccgctcgcccgtttgcggcgcacgaggtggatgtgcggccgtggcagtcgagatgggacagatcgtgcgcgcgttaactacgctcgccgaccgatgcaccatcatcacatctccaggcgaaacgaaccggctcgtcccgattcgcgcgctactcaagtaatgtagcggtcttgaagaaagccgctcattattgtcggtcggttttcccttgccgatgcgtgcaccactggattcctgcccgcctgtagagaccggccccgcctgtcaccaggcctaaggagtggcgtcatgcccgagcactttcctcgaggagggcgatcgccctggcataacgccaggggctactgtcggtgacatgggaccgggggtatcttgactagaggtttggggcagccgcggtcacccacgtggcctgaccccctcggggggagtcgggcccgagggtgatgtggccgcccctccctctgtctccccgaggggttgggccgctcccgtttcggccccgagggctggggcgccctgaccccctgcgggtttggcgccacgtgtgtgggttaggtgagcacagcggcgctcacctaaccgcgtttattgcgggttggacgagcgccccacgccgcatttaatgcagcgcagcacactcgttcggtccgtgacaggtcacagtgtgtgaccggtcacagaccggtcagatcgcgggttaggtggcaacaggcggcctttcgcacgcctcgccccgtcccgtcggaatgatgagagcctctaggcactcgtccctagccggagccggcgtgttaactcctggagttagcacgtcagtcccagctagattcataccaggcttcatcgcaaccattacaaggaagtcattttatgaagaagggctgacgtgtggcatgctaaactgacgcgtggtagacaagaatgaccggtttgtgactggtctgacgccggtcacgtcatcggcagacaaccgtgctcccacgttgcgcctgcttccggcggagtggaggtaggtatggcccatcccatcggagggtcattcggacagcagccatggcaaatctccgcccattaatgagggagtaacagggagatctccggtgtcaggcgagtgatgacgctgggcctcactcaaagacaagctatgatttagcttctaggcgaggacgcaagccagttttttttttgaagatagggtgagtccccactcaaaagaagagtaggtagaagtggtgcatgtggtatccccttgagatataaaaggaggaccttgcccacttaagaaaagggggcgaaaagagagagaagagaagggaagacgggagctcagagagaagagaaagaggaagagggtctctagagtttgaactctcttgctctccagctctttgtaactccttcatacacagatccaccagaacacaggagtagggtattacgcttctcagcggcccgaacctgtctacatcgcccgtgtcttgcgcatttgctctctcgcgaaacattccacagatcgagggcttagaacctcacctagcgcccctggccgaaccggcaaaggggggcccgcgcggtctcccggtgaggagccccacgctccgtcagggtgtatattttaagataggtataatatcatgggaaaaaagggcggaaactacggactcatttgttttggagggaaaatggaaggaaaatgtagaaacaagattcatgtactattcatccattagttttgtaggatttgagcatgaaattttccttgggctatgattcttaagaaatttcataggaaaatttgcatccacttagagctcttttttctattcctacgaataggatcgaggtaaattactcattgtttgatgtatttgacctcaagttacatggttaaagcattccaaccttgatcatattaacttaatactaagcattcatatattttccctaccaaccatccaaaagatcaatcctatacttttttctatcatttgttttgcacatgtgttcctatgttttcctattcttatgatttggaaatcttgtaaatcaactgagccttacatatgtaatgcagtaatggaaacctaaaaaaaaatcgttggatcgaaaaatagacgtttaaagttcgtccacatcatcacgagtaaaaattttacttcatgagtaaatattttattgatttactcacagtgatttagatgtatctcatatgtctatttttcgatccaaccgtaatttctaggtttttaatatatatgtgatttgatattttagctagtagtattggttaggaaactaggcagctcgcgcgtgttgcacaagcttcgtcatgcactactgattggtgggtggcaatgatttttcccatttaagggattgtgtggacctagtaataaattatctgataaatatgttatatgtatagtggcacttggaagttggaattgattcaaatcgtcacgatgctcaactcgataagtttgcaatttaataaccgatgtcgactccctagtcctcctaatatcttggcaattatggaaggaacaaaacttcagagttttcgactttgctctctcttcggtctcagtggttctagagtccattctcattgagggtcacctatagtcgttagctgccgttgcttctttcagggttttcttgtgagggtagtgtggctctgctcccttcctgcaaattggagttgcgtttagtcttcgttccttagtttttcttgtttttgtcttttctcccttcccatggcataagctggtctggctgattgtgctgtgtaaacaaacactctttccctctaatatattgacgcgcaatctttttgcgtgttcgtaatcgtaaaaatatgtacgccaagtcactacttaattagttgacttgttacaagcaaatgtatatgttttttttcatctacttacgaaaatggttgtgtgctcttataagaggcctaaaattccattacataattcactctagaagaaattaattacctcccttaattactttcatatgtaacggctcactaccggttatttcttacgtcggttcaggaatgttgaaccgttagtggtacctagggctggacaaatagctcgggctcgtgaactcggctcaagctcggctcgggctcgcctggctcggctcggctcgaatcctgaacgagccgagcccgagcctgggttttagctcgtttgtgaaccgagccgagcccgagccagctcgcgagcagctcacgagcttagtaggctcggtttgaatagaaagacttctggccgaaaaccaaaaaagcccatcaatttgttatatgttggctgcatacaatatacctaattatctttgtagggacttgagagttattatctgaataactaagtcattgcaaagcaacacaactgctgctggcaatacaactgctgctattgcaaagctcacgagccagctcgagccggctcgagccagaccacgagccgagccgagcctaatgtacagctcggttggagaaccgagccgagccaagccgagcctggcatttcgcgagcttccacgagccgagccgagctggctcggctcgtttccacccctagtggtacccccaaaaaaaataatcatccacaccatatactaatcgccatcattgtgctgaggatgccttgcctgtaatcgtggttgtcgtcattgtcaatgtagccactattacaccatcgccatcgctgcgcacgaagatgagagaaggatatctttcataaagtctattaatatccgaagtcactgctttgtccctggacccataaacaatgggtcttaattcaggagaaagaaccagcaataagtacaaaatccattctggttctacatttgtttgaataaaatatttcaccaatttcatgcgtctaataaaaaaaacttttcttattcttttttctatcttctcattcatcttcactatacccctcgtcttctaattccttccattcaagtggctggcatgagggtcccacagcttgtcgacccacatgttagtgaccccacgcgaagggcagtatttcagaggagctcatctgaaaagagagcaaaagaggtggccgcgttatatctaggcatcagcccccatcacaagttggccctccttcttgttatgactattgatatggtgccactgccagcatgtcgtcatcatacctgtcaccaagacccatagacatggcaacgttggatggggcagagcttgggaagatgggtgattgggccagttggatctagccacctagaagtcggagatgttttgatccgatgaccctttatcttagggaggttggtttgagctcccacaacaattggatctggcgacattgacgttcgggagagatgtggaggtggcggtggcacttggcactaggatggaggagaagacgatgaccgaagcagtgcttgagagaagaaagaggagagcaacggccatggttggaagcgaagggaaatgtgaagtagctaggcgaaaggtgaaaacgacgactacgctcaggagggaaggggagtgatcgagtggatggcagcagcagtgctcggctcttaagagagagctgggagtcaacggtgatagctacgctcgacactcgggacttaggagggagctaggagcagtggtggtgtttctagatcgagactcgaggaagagagaattatagtattactagctatatatggatctaggtggctgtttctcgagatctatagcggttggtggtttgtaaccgtttaagatgacaacaatgcatctattcataaaagatgattcgttagaggggaacatatcctatgcacacaagcttctcatacacactccatatacaccaactagcaaatgtcacgaaaaatcctacaaaaaattggacatttactcctattaatattacacatatctataaagtttcatattcaaattcattatattttagtcgtaataaaaaagtgcaaaatctgacagttttaaaggtaaaaatttgtcagaattttgtccttttttttgttacgactaaaatataatgaatttgaagaaaaaatttcacatgtacatgcaatactattcaaagtaagtgtatattttttgtagaatttttcgtgacatttgctagttggtatgcacagagtgtgcacgggaagcttgtgtgcataggatatgtttccttgttatacatgtctagtcaagtcatatgttattataaagaattatagatgttaagcaccatatttataagggttaattggatatgccactacaaatatgccaaattagaaaaataacactactattcacaatatcggccgggtgccactaaaattttgggaaattagatcatctcactccatcgcgttttccatccactccccgtccacggcgccaacttcgccaatgccttcccttccccgtgtgtggacgccgccgccactccactcgacggagatgatcaggggcagggaagggtgctgctacccggggggagctcatctctgctgtggacatttaccacaggagcgcggtcatcgtctcccgtgtcgtcaagacctacatgccgtcctcatggttcctcacctcgctgttcaccgtcgtcgacgccgtggaatgcaagaacccggtgccggcctcggtagagtcaacggcggagctggagctgagctggaggcgaagggaggcactaggggcggctaccacacgaaacagaaagggggagacgacgcacagggcttcgtctcgacggcctgcgacggcaacttccctccgggacgatgcatggatccaacgatatcggaatagtagtggtatttttttaatttggtctatttatagtggcatggatccaattaaccctatttataacggcccttagttccaagttccaaccactatatacgacggtcctacttgactcgttacagcctgacagatagatagctggttctgtagcagtgtgaaatgtccagtctaatcgacttaagcttccttgatgagtgaggaattgaggatcaccacgacagcatgaaggaatcgacatttcttctttaattcattcaagtttattgtttgattctatccattgttctctcattaactcttgctatacatgttttttttaaaaaaaaatgatcaaaagaggatagggccgggatcgtctgttttcgtttaacagtaagagacttggcatagtgtttaagaaaatccgaaccaaaaatctcacaaacacactactccctccgtactctaatataatattttaacattttaattgcactatttaactactttaagaacaattttttgtctttatatttgtacaattttttaaaataagacgagtgatcaaacgctacaacaaaatagtaaataatattatattaagagacggatgtattaattaggaaaacccggctaagaagccacacgaataaaaaaaataaacacttacggcgatatgactggagctcaaagcatgtgtcatcgttgtgtagctcaaaaaagcagccccgacgatttctatattgcaaatgcacatttgctcgtacaaactacatgcatttaacttcaccagtgaaatattatatatactactacctccatttcagattataagattttctatcattgtccatattcatatagatgttaatgaatgtagtcacatatatgtatatatatatatatgtatatatgtatacacgtatacacgtatatacacatatatatatatgtgtgtgtgtgtgt

SEQ ID NO: 561 - DNA, 8825 bp, Oryza sativa
tgtcgccgcctgccggatccgccgcccgcgcgctctagtcaccagggaggggagaggagagggaggaggggaggagccgcggccggatccgtggcagggggagggcggccggccgccggatccttgcggggacggccgtcgccgccagatccgtgcggggacggccgacgcccaccggatctcgtgcctccaccgccgcgccgccaccgccgccgccattgatgccgccgcttccgcctcccttaccgacggcgccggcatcgccgaggagggagagggagatgggaggatggggaggaggagagggagagggagagggaggatgaatggagaggtggtggggagggtgcgcccgtgacgggagaggataagggtgggcgcgtggggtgggctattttcgtgtgcgggacacttaacaagcccgcacgcgacgtccggatgcccttttttatttttctgtgcggttgcacttatgggccgcctggaaacaaactagtctggtgtccaaaaaaatatttagtgtagtagtgctactacacgctcggcatggggatggccagggaggggcgagcactagatcggtccacctcgatcaagttgataatttgcgctatatttactattgtttttgttaaatttgaaaatgttggtattattaattattgactcctccaacagctattggcactcgatcgtaaaaaaaaaactaaagttaaattaaactaataacccgaggaaaaaattacaaatatacttatttttttaataatatatgtttatatacatgcgggacagcgacggttccgtagattcaaaacacaggatcgatggccctgcgcgcggaaccgtcatggtcccgcagctccaaaatgcggaaccacgacggtcccgcggttccaaaacgcggaaccgcagtggccagcgacttcagcactgtgcagcatagtttatacactgttttgactctgtgcagcactgttcacacactgttcatgctcggtgtccctccattgtgcggaactgacacgggaacagtgtaaaacagtactggaaacagtgtcaaacagtattaaacacggcgccacgcagtaaaaaaatgttgcgccgcggttccgcacactggcgctgcgggagcgtactggctccgcgttaccggcatgcgggactggctcggtcccgctgccccattccgcgcgaacgccttggccgtccactccgcgccgtcacgccatacttttgttgcgctccggcggaaccgatatgcggattagttatattttcacaaattctttatactagtgtatataaacgtaaatctttttcaaaaatggatattttcaaaaatattttctatcggtttgatccccttcctttgtgattgtgtagctcggccttccacaatcccttcccatgtcgttaatttgcaccaacctatgaagccacgatcgcccaaggaaaaaaaaatggaagaatgaaaacaaccccctacttttagggcagttgagccacctccaatcacatcttaaatttgctacaatacaactttagtggtttgtagtataagtttaaatccaatccaagagaacagaaagagctggcactctcgtaattggtttttgctatttcggtctcttcgtgcgtggattaaatttgattatatatataactaactgggtggcccgcacaattgcgcggtagcactcatacaaaatcatttttttaatatgattttacttaaaatttattaaatagctatctcgttgacttaaggatttgattgaccaaaccttatcatccttgtgtttctactttcgtagtctttaaaagacacaccagttgctactctttacttctgtcacctcttctttcttttcttttttttttgcttgtttggtctaccattcatctctttgtaacatttaaaaattagaccttatggtttgtagagtttattttcttgttaggttttgtttttataattcttagaagtcccgtcaaacgttgtcattatactcatctacggtctatccgatgcctcatctatttattgtcattgggattttaaaaattgaatataattatcatttgggtttatttttttactttctagaagtcccgccaaacagtcagcggctttgtcactgtatttccctacggctcacccattgcctcctctctgtattgtcattgagatttttaaatcgggcattattattattattattattattattattattattattattattattattattattattattattattattatttactttgtagaagtcccgatactttaaaaattggaccttatagttattatagtttgttgtcccgtcaaacgctatcactatactcgtctattgtacgaccgctgcctcctctttttattgttattgggttcattttttactttctagaagtcctgccaaatcattagtggctgtcattgtactcctctacgactcgcccgatgtctcactctttaatgtcattgagatttcaaaatcaaacatggttatcattagtgtttatttaattaatctcgtgttgtaccatatatgaactattctttcaatatacttcattttaattttgaattttaattatttctaaattattcctattagaaatctttattattattgcgattttaaaaatcgaacctgatcattatttggttttgttttttaaatagtttgtagaagtttctctagccgtcattgtccatctcctttgccactctagtcttgtcgtcttaataatacaatacaattcattttatcttttattctatatggtagttttctatcaatattttttatttctgattttagttatttttaattgtatttgtacttgaacttttatttttttctattttgaattttcttttatttttatttcgaatttaatttatctcatgttattctctagattgacagttaattatttaaatattttcttcttttaattttaattttagttatttttaaattttattcccacttaaactctattttctctcgctgattaatgtgataacttttatttcagattccagttatttataaatttattcctatttgaaatttttttttatttttctaatttagttatttatgttttttattataaatttcagttatttatatattatattcatacttgaatgcaattaatgtggattttttaaaaataactaaatactatttaaaaatgagcttgccttttggcagtccttgtccgatggggaattcaaatagatggattcttgttttgttttcgagtatttttatatttttctagtatttttacatcttgtgcataggatttgtccggtacttatttctgggcaatcaatctcaaccattataacatctcatgtccagattcatagctagagtttgcccccctttttaggggggatagagggagtatgtccaccatgaattggtgcagatttttttctttacttattattaatttggtaatttctagatatccttatataatatttggatatattattaattgtatgagccattgctgtaacgggcagactaccaagcaagaggattgattttccatttttactgagcttctctgatttttttttttttgaaaaaagaacttgttagctgtccttgtcagccttgcccgattggaatttgatagtccgaatagaacttggactttttaatttttgctgcgtagtttcttttaaaaagtttgaggactcttacttttttatatttgtacaatcaatctcaatggttaaattatagatctatcataattcaatggtgtagattttctctttttcttcgattaatgtggtaatttctagccactacagcgaacatgtagtctcctttcaaggctgttttaaatagatatatgtaacataataatttatattttctatttttgaaaaggttctatgaatgatatttaaatcgcatagaagaaatgatatctcatagcctaggacatgggacatatccgggataaacttatacctaatttgttttttaaaaaaacatttaaatttgctatgtataatacatgtgcatatgatttgtggattaagaacagctatatttgattccagaattggaaagtagcaaaaaaaaccctccagatcaacgtctatatttgatcataaaatattttactttgtagtttgtaataatttttccttgataaagaacttttttttaatgtattgatgcttcttttctagtttgtaccccacctttcaaattccacgtccgccaataatattattacagcttaaaatccatttctccattcctcccttaaaaaaacgctagatataagaaatagctcttatatcaaaatttattaagagatggctgagaccatatttgtggtgctaaacgaaaaggggaatatatatattgaactaccattgaattgaaaatttgacatatgagatttgtctacgtcatcacgagtaaaaattttattgatagatttactcacgggagtaaattttttactcataatgacatggacaaatctcatacattcattttttatcgaacgataattttcgagtttccacgatatgtggtttgcccgatatatatatatatatatatatatatatatatatatatatatatatatacccacgtgaggacgtaaggtcactatctttccacctctatataagcacgtagcattagtataggtcggtattaagcaagcggcaatacacaaacacacgggtagctaagcaagctagcctcctgaatactgtcatggcaatagagtcagctccggcgcgaaatgagcggcgcggtcagcacgtcgtgctgctggcgagccccggcgccggccaccttctgccggtggccgagctcgcccggcgcatcgtcgagtacgacggcttcacggccacgatcgtcacccacaccaacttctcctcggcggagcactcctccaccttctcctccctcccgccgtccatctccatcgccgcgctccccgaggtgtccgtcgacgacctccccgccgacgcgcgcgtcgagacccgcatcctcaccgtcgtccgccgcgcgctcccgcacctccgcgacctcctccgctccctcctcgactcccccgcgggcgtcgccgtcttcctctccgacctcctcagcccgcgggcgctcgccgtggccgccgagctcggcatcccgcgatacgtcttctgcacctccaacctcatgtgcctcacctccttcctccacaacccggtgctcgaccggacgaccacctgcgagttccgcgacctcccgggccccgtcctcctcccggggtgcgtgccgctgcacggctccgacctcgtcgaccccgtgcaggaccgggccaaccccgtgtaccggctcgtgatcgagatggggctcgactacctccgcgccgacggcttcctcgtcaacaccttcgacgccatggagcacgacaccgctgtggcgttcaaggagctctccgacaaaggcgtgtaccctccggcctacgcggttggcccgttcgtccggtcgccctccggcaaggcggcgaacgacgcctgcatacggtggctcgacgaccagccggacgggtctgtgctgtacgtgtgtctgggcagcggcggcacgctgtccaccgagcagacggccgaggtggcggcggggctggaggcgagcgggcagaggttcctatgggtggtgcgctaccccagcgacaaggacaagacggccagctacttcagcgttagcggcgacggcgacggcgaggacagcccgacgaactacctgccggaggggttcctcgagaggaccaaaggcaccgggctcgccgtgccgatgtgggcgccgcaggtgtagatcctgaaccaccgcgccgtcggcgggttcgtgtcgcactgcgggtggaactcgacgctggagaccgtggcggcgggcgtgccgatggtggcgtggccgctctacgccgagcagaggatgaacgccgtgatgctgtcgtcgtcgcgcgcggggctggcgctgcggccgagcaacgcccgggaggacggggtggtgacgcgggacgaggtggcggcggtggcgagggagctcatcacgggggagaagggcgccgcggcgcggaggaaggcgcgggagctgcgggaggcggcggccaaggccacgcgggcgccgggcggcccgtcgcgccaggcgttcgaggccgtcgtcggtggcgcgtggaagaaggccgccgccgctgcacgtggcggtcgtgccggcgagcccgacgacaacggaacagcagtgacggcccaatgatttgtgtcggtgtcggcagatcgatctggttcgttccctcgcgcgcgcgcggcgttgtgggctcgtgcggttcccttcttccccccggttgcaaacacgtttgtctgcttggttggtggtggtctgatgtgtgtcagtgtcacgcctagctaggcctagcttgtccaaccggagctttggtgtttgtacgtaccatacgtgttgtgctcggtaattgtacattaagggtgtttagttcacgttaaaattgaaagtttggttgaaattgaaatgattgatgtgacgaaaaagttagaagtttatgtgtataagaaaatttgatgtgatgaaaaagttgaaagtttgaagataaagttgataactatacaagggcatactctctctatcaaaaagatataataatatagaatttgatttgatataatatagtagtataatgaatcataaattattggttgttttatttaaaaacgaaaagagtacgtgatgtgctatagtgatcgagatgtgtacatgtgataatgtaagggatttttttaagtagtaccactactataataccatttttccgggcagttagatttattatcccgtgcggtcactcggcccgccgcagctcctcgtctaagaaaatcggtactttcgcgtgcgggccggctgaccgcacgggataatcgattatcccttgtggtcgacttaacacgaccgcacgggaaaatcgattatcccgtgcggtcgtattaagtcgaccgcgtgcggtcagtttcaccacccgcaagaaaaaaaaacgaacaaaaaaaaataaaatcgaaacaatcccgtcgtcgtcgctgtggtaatcgacaccaaccctggcagtgccatgtgtggaacagcaacaggcttaacacaagaacgatgatggatgggtcagtggatgcagcagcaaatcggcataattaatggtcccttcattttcgcaaattacaacggaaaattctaaaaaaactgaaattatagatagaaatcacgtggttcactgatcattaaacagtgggcgatggcactggccttgttcatgccatcgaagctctcactgacactctccatggtcgtcgtcgccgtcgtcgcgccgccgctcccgtcgtcgtcgtcgtcgccgtcgccaacagccgcgtcgccgcagccgccgctccgcctccgccagcattcgccgtcgccgccgctcccgtcgtcgcgcagccgctgctcatcgtcgcctccggcctatgctgagcgcagcaagccggccggcgatgtcacctccggcgggggcaccctcctgcctcgccacgcgcagcccggcgagcctgtccgcgaggccgtcaccgtggagatggcgccggagacggtggtgcaggcggccttgtcgaggaagaaaagcgcgaactcgtcgccgcactccggctccgcccaggagagcgtctcgccgtccatcctctcgaaggcgtcgccgggaagggaaggggaggggaggaaagaggaaagaggcagatgtttacagagagagagagaggaaagaggcgtgtagcagtgagaataaaaaggaaaaagaaagagagagggtgtgaaaaatttgaagtgggtgagaaggaaaaaaaggggaaagagaatgtaaaaaatttgaagtgggtgggaggaaaaggagggaggtatttttatgtgcggtccactaataaaagtccgcacgtgaaaaacgattttcccgtgcggttcttttaagtcgaccgcacgggataatgaggattatcccgtgcggttggattaagacgcccgtacgggaaaatgcatttttccgtgtgggcgacagtctggcaccggtccctctattttctcatacagttccacttacgggccgtatagaaacaaaagaagatggcgtccagaaaaatttatcttggagtagtgtacggtcacatcaatcaactctagttcatttttttctatcttattccaactacctaatccacatacagccaagaaacacttattagaggcattttagtcatttatctccttactcctatatccttaatttctcttactcccccgttccaaaatataacaacggattatatgggatacatatctctgtttaaattcgttgtattaagatgtattccatccaatcttagtttactatattttaagatggggtgtgtcggtgacatgggaccgggggtatcttgactagaggtttggggcagccgcggtcacccacgtggcctgaccccctcggggggggggggggtcgggcccgagggtgatgtggccgcccctccctctgtctccccgaggggttgggccgctcccgtttcggccccgagggctggggcgccccgaccccctgcgggtttggcgccacgtgtgtgggttaggtgagcacagcggcgctcacctaaccgcgtttattgcgggttggacgagcgccccacgccgcatttaatgcagcgcagcacactcgttcggtaaaaacgggctgca

SEQ ID NO: 562 - DNA, 2815 bp, Oryza sativa
cacttataattagtgacataaaactgggacaattattgtgtgtttttgtggatgtggataacttgatttgcaaaacagcaagctcgtggtggcgaggaaagattcagaactcccattgcctaatgaattgtggactatgctagcagcgaagtggatgcgaccagggttttcgatttgacgaaagccgatcgaataccgtgaaaatttgaggttttgacatgggatgcaagtagattttggatgaaatttcaaatggttctttagaattcaaatttgaaacaataattcaaccagaatttgatcaaaacaaccatcctcaatttgatcttactgcgtttttctattgatttttatttataggaaaaaaaacctgccaaacacgggcagatccaatttacaataaacttgtccgtgagcattgcaagctaagtttcacaagtgcaagtaagaaatcagtcgatttacttcacaatgtaaaggggcttaatatgtgtcacttcatattggtagaatgaacagctttattgctctgtgcaagtaagaaatacggagtactaacatacagaagcagcgctgtatctatattgtctctacatcgacaaaacaggtgacattcaccttcagaaacacaagaagccacaacaactcacttctccagatgaaatatacgacaatgctaatttttctccaccgagccaccataaatactccttaaaaaactccagcctgtgctctccctgctgtatatgctgttgaggatgttcaaactcatgcttcaacattcccattaaagatgtaccaaaaatctttaggacgttcaaggatgtggtaggacaagcagagaaactgacaggctcatcaccaatataaaatgctcaggatcaagaaagcccaaatttggacaaagctgactgaaacaacgttgaaaatgcctctgcagcggtcccatcatcagccttcactttgatctgtgccttcgctgatgctgtgttgacgatacattctacaaggaagaaagcggtagcaccatccttttgagcatagaaaaagaacttgtagtttgggggctggccacctgaagcaatacactgaatgtagttgttttgcatatgtcgaatgagtgattgaggattcatcaatgatgctgctccttgtggacttaatgaacattcctgacaacataaaaaagcgcacaacgaaagaaaatttaaattgtataagggtcataaggcgaagcaattagaacatgtaactattaacttaaggcttcccgattgacaatgaatttatttcattagaattaaggattgctatcataagaaaacaatagcactttaacaaggccaatcattactcagaacatataactgctgatttcaaacacctcatcagagtgactttcatgggaagacacttagtatttagatttagacaatagcagcaccccataatttcatgctaaaatagttcaaatttgagtgagcaactacaaaaaggctacatgagcatgttgctgtacaaataatcacaaaatgcatgggaaagaactcagaagcaacatacctgagacaaggataaggccagctggccccatttcttctggaaagtaccaggatccagcacaggttttgagttgagggtcaatgctggagctggtggaggtgcagaggattgtggaacaccaagcccaagaaggtcatcaagactgaagttggactgtgacgaatatgtaggtgcaccaggatttattagtgaagtttcagacggtatttgtgaactaagcaatgaaggaccactcaagtctgaaggagcattgtaggtagaggcagaagaaccattgctggtagctgttgcattgtcctctttatccgaagtacttagcaaaagatcattatcactttcttgatatctttgggctgagatggtgttttccgtcgtttctgccccgacagccaaattcgtaagatcctccgagtactcaaatggtccacgatgctccttgtcagtaaacatgtaagatggctgccaaatgcaaagataatgtcatattgatacttcacatgtatttgttcaatagtagcatgagtaattatattagagtagctaacaccaagagaagtacataatggacttatacagaactaataaagtaataatactgataaaagtatccagtaaatgcattatcaatatttaattttgttagcaatggttgaatataaaaaaaatatataccttctgatataccactgataggctgttgaattcatcaaatatccgatctttgatttcactgctctgcgtatctgcaaatacagagacagcttgcttgggagggtttacaacacgttcagcaacagcaggatcatactgcaaaagcctatagtagaaaagtgctcggtcatgaacatcctgcaatcaattcttggcagttaagctagagctcatagaaatgttacagtaatcaaattattatcagaaaagatcttgacctggtgagtgtcagatagaccagcggttaatgtagctcctagtgccatttgtgtctctggtggcctcttaaagaaacatttcatcaccgcagtcaggagatgcaagcgaacctgcaaagtacaatattacaggaataatgaaatagaattcaaaaacaagtagctacaggcatatgatggtctaaagaaagggatagaattttacaataatgtccaatgactcactaggtataagatagcaattcaaaagaaaaaaaacaatagaatcacccttagtttttggtgccataatatgtgaatttcagtctggcacttctattttg

SEQ ID NO: 563 - DNA, 1103 bp, Oryza sativa
tacctaaataatcctgccgaagagagaagcaagtacgagtataatgttgataaagaaatgaccctcatcaagtttgtagacgatgaactgggtccagttggaagtttcaattggtttgcaactcatggaacatcaatgagccgtacaaattctttgataagtggtgataacaagggagccgctgcacgcttcatggaagactgggctgaacaaatgggcttgcccaaacagtcagctcatgcaaattctgatgatttgagatctttgcacaagacatctgtacttcctcggagagtttctactataattcctgaaccaaatgagataagtatgaacctgaaccatatgccccttgatctgtacacatatatcggtgaaacatgttgggtcatgcctgaacttttattttcttcaattgctgttcagctgatgacttgatacaattggcatcatcctatgaggcctcaggtggcaggcggttggcaggttcaagtatcactaggcgcattagaagtactcaacaaaacaaacctaaatttgtttctgcattttgtcagtccaattgtggagatgttagtccaaatgtccttggaacattttgcatagacaccaatcttccctgtgacttcaatcacagcacatgtaatgggaaaaatgaactttgctatggacgaggcccagggtatccaccatgcctgaaaagtttaataaccttcctgtacatctgctagaaactgttataaatgaggttcttctttgctgctttgcagataccctgatgagtttgaaagtacccgtgttattgggaataggcaatttctaaaggctagagatctctttgattcagcttctgaagaaatacaaggcaaaattgactataggcacacttatttagatttctcaaaacttgaagttaaagtttctacaagtgcaggcggtcagcagaccgtgaaaacatgcccagcagcaatgggctttgcttttgctgctggaaccacagatggccctggagcttttgatttcagacaaggagatgtcaaggtttagcatgtcaatacatagtagcttcaaaatttgggtaacatgctactcactggtttata

SEQ ID NO: 564 - DNA, 662 bp, Oryza sativa
tagtagcattcggtgttacagcaacagatagtcctctgtacaaatgagcaagggctgcagatccccaggcatattcacgtatctttctaaaatcagccagaagaggtaaatatcttggtgatacaaatcccctcatcgtgtcaggaaataaggtggagccaacaaggtaaagaaggtatgcccgggtgctgtaagcaatctcgttgatagttggattttctggcaattgatgaaatttcctgtacaaccatgtcaatctgattaagccacacagttgctctccatttccagggctctctcctaagaaatgcaaacacatccgcctcacagcttcatcaccaattggctcagcagtcaccacatgaccagtcactggaattccaagaatatatgaaacatcacggagtgatggggccatttcaaatcccatgaaatgtgcagtatttgtttcattgttccatctctcacaaaaggctgtaagcaaagaacgatcaatagtaaatcctgtggtgagggcaagatgtccaagaccactagcattaactagttgttgctgttcgtcagttagaacccattcttttagcttccgtgtctgctggctgggaagcagaacaccatatcgctgtggaaaattgagtgtctgcatgtaattttggtcacga

SEQ ID NO: 565 - DNA, 1251 bp, Oryza sativa
taacaaacagctactctcagtacattacaacttttgaagaataccagatccaaagatatgaggtgtgtataaacttggccatctggtctatacattgacaacagtattgaatcaggcaaaatagactcatctcatagaccaattcatttatagctatctatgtgcatgtggtgtgtttattaatttagcttctttgctacgttaagtttgtacttaatctgccatgcttacatatgtccctgctcaactagaagccttagaacaactagctgggtggcccgcgcaattgcgcggctggcacccatacaaaattatctatttttaatatgattttacttataatttattcaatagatatttcattgtctttaagactttgaaagaccaaaccatatcatccccgtatttctaatgttgtaacttttataaaagtcacatcagttgttaccccttactttttttgtcaccctttctttatttgcttgttcgatctaccatggcttatattcattctccttttaacctttaaaaattggatcttatagtttttttgagtttattgtctcattgggtttcatttttttattttaagaagtcccgttaaaagctgccaatatacttctctacggcccatctgctgcttcctctctttattgtcattgggattttaaaaatcgaacataattatcgtttgagttcaatttttactttctagagtcccaccaaaccgtttgtactcctctacggctcgcccgcttcctcccactctttattatatttgagattttaaaatcgaatgtgattatcattgaggtttattttttaattttttggaaatcccgccaaccgtcgtgaccattctgcttaacggcatgtccgtcgtcactccttttaattgtcattgggattctatatggggttttgttaatagttcttagatgtctcatcaactgtcaccactctactcctttacaaccctgtaacttcttcgatatttattatcatttatcatcgttgtgttctagatgatttttttttgaaatttccatatttttcgttccgatagattttatttataaattatattcctagttgttttactctattttcagaatttattttattaattatttggaattttaattaatctcgttatgtattctagatggtgtattctttaaatagtctttattttttattacgaatttcagttacttttaaattgcattccaagttgactcttcttttatt

SEQ ID NO: 566 - DNA, 4485 bp, Oryza sativa
tcgtcggcatatatatttagagaaagtttagggatgaatatcctgaaaactgtatttttctagaggaagatggacacggatgattctatgagctgtggttcgtctatctaattaattttctagtcgattgattttcacgtggaaatactgtttttttatgggttggttattttcgagttaggatgtttttttttagtggaaaaggagcgatggtctggcaggaggatggcaccgctcttacggtacgtagtagagataatggattcgagtatgtgctgatcaaatgaaattaatctgtaggtgatccctccttttttcgccatttttatgataatgaggaaacacagagataaatgataacgtaattagttcctagattaattatagaaataccccactatatcaattaaggtttatattatggctgcttttttccaagactgttgattgatgagttgtctgaagatcaaacaatataaagaagtatagcaccttcattattcaaaattatatactccctcctttctaaagtataaagtataaggtgatttagatttttacgtggtgatctcctatgttatagcttgaccattaattttttgcatgatataacatcggcagctacgaaattaacatcatataaaaatcttatcaaatatgaatataatagtactacatgtaactaataaactctcacgtattgtaaatttaattattagtagtacaatttaaaatttttgatttttataaaagacgggtgcattatattttacggatggagtaacatacttgacgctggcatagtgatctatagatacgggaattgatgccagcgaaacttattacatcacatatagatcaacattttttacaagaaaaatgatgttatgattttcagctgatcaactctttacagtactgtgtttggtatattttctggtaaaagtgaaaaaaaaaactatatcattcaacatatatattatactttttatatactggaagtattacaaattaaagatatagttattccttatttgcctcaactcagcgtcccacgtttttttactgttatatcagtcgcatgcatatttggtcacggctagctgtgatttgggatgcgaagtatgtatgctgaccatgaaactattttaatcccttgaaaaaaatatctagctcctttatttaaaaacaataaataaaaacaatccgaagttatagaaaaatcttacaaaatttgacaacactcacatgacatatatatattagttaacaaaatttttggtataaataaactcaactcacttatcgagatataataaaataataaacttatataaatagtagggtactgttaacatttgaattcatttatttttcaatatgtaggtcaagtttaaacttaattttaggggattgatagttgtcactatactctgtattaccaagttattttttaaaaatatttcacaactaattacgttaaattaaaaagaaaaagttacacgatgagtatttccctcgagggattatgctaacccagcgcgtgttatttggtctagctaatttgggagtcataaacgatactggagatcgagctggtacttagcttagagaattactacctttcttgaacatttttatattttaaaggaccgtcgtttgattccattcaaatcaaaatccaactaaaacattataagataggaaaatatctccctattagtaaaaaaaaatctccagaatatagcaacgaaataagcagagacccgcttataaaaaaacggccggcgcacgttgccccacggctactggctggtctcggttgttagagagatcacgactctctcatgttttcctcccatgccacgagtcacggccggccggccagcgccgcgggcgtcgcgtcacaccacgagcgcgcgcacagtacacggaatacaagacgcccgtacgtacagccgcgcagctacagtcccccgtcacgttgggctcgctcgctcgcgcgcggcctgtgcactaacggcgtacgtcgactctggtgtacgtacgtggtggagaggccggccaccgggcacgtctcgccgtaagctagcgtataccggtatacgtcgatcgatcggcgcgctgcgcggcgcagcgcgcgtggagtcaaacttccccgcgcctgcacgtgcgccattagctatctaagccggtcaagcgcgctcgcccaaatcggcaaacaacccggcggaacccgatcgacgtcgacgcgcgcttgtcaccgagccgtgtaccgctccgccggccacacgtggcgtggcccgtcggccatcgcaccgtacgtggaggcgaagcatcgatcgccgtctacagagactcctccggccggggccgcgcgcgagcgatgggtcccgggtcccgggcatgcatcgatcggggccgtaattcattcgccggcgtgcgtgcgtgcgtgcgtgcgcgcgcgaccgtgtgaacggcccggcgccgcgatagtacgatggctggtaggcggcatcagtgggcgcgggaccgggtgggttattccaggccctctcccgatcgagttccgtgattccgtctggtttcctccgctgatctccagggatttccgagcgtgcgtgcgtgcgcgcggatcggacgagatcgacccggggccgggccggggagcggctgcgcgtgtcggcaggcaggtcaattgagttgaggtgatatgctgttggcgtggtgggtcgtggacgcgcggggggatctcggatcgatcttgtgcgtgttcgtgcagcgcgcggcgcggggtggccggtggacgcgaacgcgacgtatataggtggtgtagcgcgcgcgggtggggttgggttacgtggtggagctgagcccggcggcgcgcggtttgttccgccgcgtgcgcgtttcagctcctttttcggcttcttttttggcgatttgattttgatgcctgctccccgatgtgtccatcgggtgtcggttctaccagagacagcggggccgggccgtgactcggacaggtttggagtttttcgcgggaccggtaacgtacgtaggtgctgcttccttcaaaaggtgggggtgagccggccggcgaatatgcacgcgcgtgtacccgctcgaatactcggtcagctaatgagatgatttgggcgtccgtggctcggtggcggctacgttcagattcagcttcatatgcataccgtacgactgtcaattgtcatgataccgacggttacctttttcgtcgggttgaaatataaatgctaataagatgcggcaatggtgttagcgtagcaaggcgaggtatctgtgtgaaaatgaggaggaattcatgacagagatgctgattgctgagcggtacatatgggctggcattgccgaccaaccggtgactagactaccatactggtacagtgctactcatttctgagcgactgttgttttgtcccatgcaggctgcaggctgacctgatcaattgggctgtcaaaaatgtccagcccaaactctatggtaacgcagcccaatataactacgctcttttgggcccatcaggtctctcctcaagttagagtcgaagaggcccacgaacaagccaatattaccccccaaatcaccgaaccggaagggatcatcaaaccccagaacgacacttccgcacagccctagggtttctgttcagcgaccccccgaatcgaatcaagagggaggtgccatggcgtcgcggccgtcgctgaagccgaagcccaaggtcaagggcgcgaggaagggatccccggcggccgacgaggagcagtccacggctgcggcggcggtgcggttcgtcaaggagtggaccacgtggaccatgaagaagaccaaggtggcggcgcactacggcttcatcccgctcatcatcgtcgtcggcatgagatccgagccgaggccctccctcgcccagctcctcagcccggtctgatctgacgatcgccttcaagccctagatgcgatcgatctgcccccctttactaccgctttagtagtgactttagtaatagttctttcttagatcgtgccttctgagcagttgatgctgctgtgcggatttagaggtttttgctatatgaatctaataatgttatatgggtggatgcttctttggattaaactcttgctattattgtgcgggtcatggatctgctattaatacttcggtatggtatggagaaattttctgtgttatttgtatattcctactccttccggttccattttaattgacgttttggacaatgacacggtctaaaagatatttttaatcttacttttctattataatatatgttgttctagttcctttaaactaaatattttttaaagttattaatggtcaagttataaaagtttggcctcaaaccggagggagtacatgtttatgcttctgtgtgacctatttagctttccgatccgttctgattgaagtattgaactactcagaa

SEQ ID NO: 567 - DNA, 7914 bp, Oryza sativa
cagtaggccaccgtaccatgcacagcacatgtaggaattatagcgttttacttccacatatgcatgagacagactctcctctcagttcttggagaatcctcccacagtggctgcacgatcagaagatccaacttttctagaaaacgcccaaaattgcgtgcaaatggctacttgcaaccttttgttggtcctaggaagaacgtccttcttggtgcatgcgtgacaaaatgattgattgatttgttcacgcccacgtactggccgtagctactagagtagcagctagctagccgcggacctcccttttcacgaactaatttccttgtccttagagtcggcaagaaatcgatcagatcatccacactagctgggcggtaatgagaatctcatcgatcgcacgttcagccagcaccaaggccttgtaggttgtagccactcaagttaattagctgaaacggagcagagtcaaaatttgactctctggctcgtgtagcttttgataaggaggttttactttctaattccaagccttgatcatcagttcatcacaaccataaaatgagtgaacgcttatatggctgctatttatggtatactaatgaaagataagcccttctgcgtgtgcccgcagtgttatgttgtgtaaccgaattgctttcttctaattgaatgatgtgcaattgttctgtgtgttcgaaaaaaataatcaaaggtaatggcagaaggaagacggaacaataacaccacatatgaacatctaatagtgtgccgcctaaaaaatataatttacacggaaggccatctaagatacgtccccatgtaaatatagatatttttctagtcggcacttcaatgaaaccgtctgcgtgcgggtggctgcttaaggtagccgctcgggtaaattgaaacaatcttcacgtgcggcggttgtcagtggtcacccgcgtttttatgtttacacgaatggctctctgaccctttgacacaagagatatcatcattcgtaaccataaaacatgcattttgtattttcatccacttgggaaattaatcgtgagggacctgcaaaaacttttttttgaagtagtgggagctagcacactggtgttgagaggtgtcctaggagaaactggagctcgagctagtaacaatcaacaagcctatgttagatatgaatataatcaaaactgaattacggaataatcaaaaccgaattgaaagtcgattatatggagatttgagatagatatatatttgcaaacatcgaaaaaggcaagatactaaagcactttcaatatctaagaacctgaaagatgaagctatccctgaagtgacctgaaagatgaacatgaaagacgaattacctccttgacaaataaaaaatagaggggtccacttgttagttctatctcttctttcggtcaccatatggcagttcaatcagcactaaaaaaagtacaaaaaggtagagcccacatgtggtgattgagagaagaggcagaactaacaagtgggcccccactattttttattttgttgactaccacgtgtgtgctacatagaatcaaaaccgttctggattcggtcaaggggtaattcgtccggtatgaaaagttaagagtgaagaatatctatttttaaattgagggggataatacgtactgttacaatagtttgagaggtagagagaggggtaattcagatttgtttttttcccttaattaatctctacatttaatttgtgacttgtcattcctggatcaagttctagagttacaatgttccatgaagatattataggcttaagggaaaattaacatgtactcccttcgtcccaaaatatagtaacctaggatgggatgaaatctatcctaggacaacgaatctggatatgtcttatcccattctaggttgttatatttttaggacggagagagcaacaaggtatttgtacttctatatcttgtattgcactttattatgtattagtgtgccactatcgaggagtttgaggataacaactggacttgaccagggcttgagaaaatactaggtccgttaacgcagacatacacaaaggctgatagctacttaaggccatttacaacccaataactaggatggtgtccataacattaaataagctgccacctaggatgaaaaatgatgtggcaagtgaataaatgaggaaagagaaggaaactatatcttgcatgagacatgacttctacacaatatccaaaacatcatgtgagataagtagcattaaatttaaatataggataattatgtttacattggaagagtagtgtctagtaggagtagtagtttcttaatgatgtggagtttatgaaaactatgtctagtgtcttgggttgagaatggccttagtgatcctgtccttgctatatattataggattggcaataattaacagccattctttttcctctcttcttcttttagatattttctttttttatttcaagaacgttagttgagctagcatgcgtcctttttttaaaaaaaaataatcaagatcttctctcttgcatgctgtccttaattaagagaagaaaataattgagcatatgaattgacttgttagttttaatttacttgattctccaaagctacctaccaattctatttctacacctgaccgtcaacagtattgatagtcgtcagcaactaactactaatttgccccatatatatatatttatatatatgcttgcacgagggataaccggaaaagaagagtttggtcaaatatgacggcagagggaataaaaatgatggcactagactgtcaaaactaaggaattattcagctatatcgagaggaaaccgagacatgctcgtatctgcaatccgtttaaaaggtgcaacttttgcgtggcaaagatacaaaatacatgtgtgtgctgaaggagatcgagcctttttatcattccatgcatgcatgcgtgaaaggattagaaaatacaccatctgtgcactcccaaagcatgtcgtgagggcaagtattttgcacgtctccttcacattttgtgcagataaaatttcgtaaataaacttataatcaaagtggattcactcataaagagaaaacgtatgcacgctagtaaagactaatcttgaagaagtatttatgcttgccctccgtcctgtaactgaaaacttactggtactccggcacttgcaatattaattaatactagtatatatgcggatttatcgtgtacatctaaaaacttgcggtcacaaccatatccatcagaccaccgtacgtacacatatattatctcagttttataatatatgatgtcgttcatttttttaactaacatttaatcattaatcgttttaatcaaaatttttgtgtaaatataaaaaaattaagtcatacatacgtaaagaatttttaacgataaatcaagtcaaagtaaaataaataatagttatatattttttaataagataaatgatcaagcatacgttaaaaaaattcaacggcaccatatcttagaaaaacgaagggggtacatcttggggaattaatatatcgatcatgatcattcatagaacatataaggccagataaaacatcagattcaacacatgttttgattagataccatacaagaatgtgaaaaaagaagaaataataaatgtgttatgttgaactgaataacaaatagctagcgatagacatagatctaacgcaaaaccggcctgctgcaggtactagctagctaatcgaatatgagaacaacagtattaattatcatttacttattcttgtgtcaaaatcccaatattacggccatctgctaccaaacaaaacaagcaaaccatgcatcatgataaggctatcttatggacactaccacaagaaaccggccagttcagtgtatcaatgtccaaagcaatcagaactctctcttttgcaccgtcattgtgtattaattccagatttatacatatatgtaggcacaaaagaaactacacacccgtcattaatttgtacaatctaacaaccaaaagcgggtcgatcatgtataataagttggcatcttctttgattgtcaaaagcgaaaatgtgagacgaaatattaattaatttgctctctccgaaaatgagtcaatgaggtacacatgatatacactagtacatgcatgtacaataagtctagaggtgcagaacagtaaagggctatgctgaagaatcaagtggaatgcagccgttctagttataaagttgtagcttccatctctactgatccgttcaatttgcaaccagggaaatgttgacaaatggaagagagaaaaaagcatgaagtgcacaacacacacaagttacgttcaagatgaaaagcttgcagaaaatcaattaattaataacaattatatattctcaccaagaccaagctgatcatcaagcactccctagccatcacatttttggcgcaacgactccaatgtttgaaaagcatcttgataaattccgggtgctagttaaatattgagtagtatatatttgtgcagaatcagttagatcagtcatcatcatgggttgctgctgggcattgtggaagggaaaaggtcttgcagcagggcgtagtcagtgaagtgatgctgctgaagaggaggatgatcgttgggcggcattgcaccgccgccagccacagcaggaggcggcggagcagaagcagctacgcccgggaagtacatgctagggtttgcggcggcggcggccatggccgggtggtggtgcatgaggcccatcagctcagggtggaaccccgccggcatgaggtgcgacggcggcaggccatgcacgccgggcatgaagaggtggtggtggtggtgccctccgacgatgccgacgccgccgccgccgccgcggaggctcgccgggctgtggtgcgtgtgctgcccttcgtacgtggtgatcaccgtggaggggtcctggtacgaccgctccacccgcttcttcacaccgcacttgggcgtcgtgcaccggtagtagctcctgcaatattcgaattcgaattgaattgcattttgaaattggagtacttgaacaccatcgtgccatgcaattgtatggcacagtaacatggtatactacgatatatgtatgtgctacaacaactgggtgaaattaaggtttgtacatgtatatagatgtgtacctcgggtatgggctgttcttgactgccttctggccgtacttgcgccaccggtagccgtcctcgaggtgatcaacctcgctcttggtgaggaacgccacgcgaggctgccgctgcctcttctcagctttcttcttgggcttgttcctgtgtagatgcatggtacaaaatatcaaaaataaggtcaggtggattagctagaaacagagagatgatatggattcagaagatcagttgatatttctgcggtgacaagctcaatcaggcctaattattaattagtttgggctttttcagagcaccaacaatcaaactagctaactagcttgctagataggtaggatcatggtggactatgggaatagctagctatttcatgttagattagcaccaggttttgctagaaatagttgttattttgatatatagtattaattagggtctaataagttagctagctagctagatatctgttggattgcatgttatggggcaagatcagcgttaattttgcaaaagtactgaggaactattgtagatttaggtggttggtggtgatacgaaaatatatcttaatttgaatcatttctaaaaggggaaatcataatataatcttcaaagacctagcaagtcaaaaattgaagctataactcgtaaaattgattcattctacgcaagatctattatggagcataggttggttgtctattaaattaaatcgaatagtagtagccccatcgtctgaaagatcatattggaaattgggtcaaaacggaatcagaagaaaaggggaacaagaggatagacggatctactaaaaagaaccctaaggaaccaaaattctagcaaaccctaatgttcacaccatgcatgcagtagagagaaagcataaacgaaagaaaatttcaggtcaaattttgcaactccgcaacagtatgaccaaccagatctagccccaagaaagtatccccatctcaagacacgcatcaaaaaagaattaatcaagcaagaaatcaagacaagaatcagacaaagtatagagtagaatcaatggaaatttaacatacggtttcttggagttctctccatcctcctcatccttgtcgtcctcctcctccgccttcgctgacccttcttgcaccggcgtgacgatttgccgccctccgcctctccgtcgctggacgagaaggacgccgacgagttcggcgtggcctgcgcgacgccttctccggcgacgccgccggtgccctggctgtcagggctcgtcacatccaccgacagctcctgcttgaccaccgtgtcctgagacgacgggcacgccacgtcgaggtgccgagctagcccggaggggtccaataacccctgcaggtagtccgtgatgctggagtacggcatgatctcgtcggcaccgccggcgccgacgacgccaccaccacccccgccgatgccgacgcccccgggttggctgaagaagaagctctccatgtcgctgctgctgtacacgtaatcagcgccttcgccgcggccgaggtgcccgtgctggtggtaggggccatggcgatctcctcctcctcctcctcctcctccagaagacatggggtgtgagagtatggggagctagcttatgtgtggaaaggaaagagaggcgtggaagtgaggagggtttcagctttcaaccggtctcacctcccttttgatttgttttttctttcttttccttcgctggaaaaggataggcgcaagatacgactttttgtgatggaatatgtaaatctgtctcggtgcggcgtctagtgatcttcgtttatatatatataatactccataattccagcagtactattaatatatatacacacatatatactagctagctagtcgtcaattcttaatggtagagacgttttattaatgaaatcagcgtgcttaatttagattcttttcgcatctgttggtcagggaggtattaggtataagaccggccagtgtcaacgtaattaaattgtgtagggcctgccgtactatgaatagttgaatccatacagttcagcttactgtatgctgaattaagatactatttcccggttggagttggtatatattgggcatagcatgcatatactatgtacatgttttgtgtccattaatttgagcaatgtaactcacttacatccaccgcgttttaacggacatctacggggatccagccaagagttcgaaactgtgcatgtgaatttcgattcaaatgtttatgcatgatcaggcatgcttcaagattttaaatgatttgcacagtacactacagctctttcttgacatacacgtgccacacaagtaccgttttgaaggatgacatgtatccatacgtatatacagctgtacatatttatagttggatattggacgtacggctgtcacagtacccttgcacagtgcacagctaccaaactactctcatcttattaaggacaaatatttcattcggttaaaaattagagaagaaagacgtcaaaaaaaaattcgagaagaaagacgtacgtctaaaaaaaatcgagaagaatgttcattgcaattgccttctgatctacacaatctagcattgacctcatggtccaattgaataacatggcaaaaaatatagtagtatatgcgtgtgtatctgtgagatgtgtctacatcgaacatgtacgtctacaagtttttaatttctgttgat

SEQ ID NO: 568 - DNA, 676 bp, Oryza sativa
ccctccacagttttctttcgatacactagtcaagcctagactttcaattctcctggcgatcactttgtgggttctaatcacgatcatctatatcattcttaaaggaactttttgtggatatatgttcatacttctctgcttcaactgttcttatattttttgggcccttgtacaatgaccttttcattttccttttgctggcaccaagggtgactaacagtctaacacacacgggagatcaccttgtggattcatcacgagggttcaaatcctacgatttgaagaccttcaactgggctgctgaatcaggcgaggttaagctgcatgcgtttgatgggcttcatgaacgggttcacttttggttttcggctcatatctcgaacagtttttgtttcggctcttttgaacagaaaagattttatactgcttaaagatgtccaattcagagaaaaaaaattcaaaattccttacctaggcacaacgacgcaattatgagggagctcattgtgtggggctgcaggcctcccaaaagaaggtatgctataccaaaaacgagaaaaactctatccctttccttttgatatccccatctgccacaccgcacacaccacacaggagggtgtggggccattaaaaaggagatcctatcaatatcaactagtaattgttccgatat

SEQ ID NO: 569 - DNA, 878 bp, Oryza sativa
aagacctacaccatgcgtccactgcctctcaaggcctcccaagacattctgagattgatgcatcatacatatcgcaatcaaggctatcagttattcgtgagcttctttgaaatatatggtgggaaattatttgatcttctcaatgaaaggaggtaagtagcccccaatcaattatgcttatagacagtatatattcaggaagcctgttacatcttcttgttcgaaacatttttgacttcatgcagtaaactttgcatgagggaggatgggaaacagaaagtttgcattgttggtttacaagagtatcgggtgtctgatgttgaaaccataaaggagttgattgagaaaggcaatgccaccagaagtaccggtactactggtgcaaatgaagagtcatcaagatcccatgccattcttcagcttgctattaaaaagcgtgttgatggcaatgactcaaaaccacccagattggctggcaagttgtcgtttattgaccttgctggcagtgagcgtggtgctgatacaacggacaacgacaaacaaacaaggttatctcacaacttttctcttctatcttgttataggaatgccatgaatattatgaaactgcctattatgttgaggtctgctgtactgaactgcctattatgaaacttgatgcagaattgaaggagctgagatcaataaaagtttgcttgctttaaaggaatgcatcagagcactagataatgaccagacccacattccatttcgaggaagcaaattaactgaagttttgcgggattccttcattggggactcacgcactgtcatgatatcatgcatttctcccagctctggttcttgtgaacatactctgaacacattgagatatgctg

SEQ ID NO: 570 - DNA, 9275 bp, Oryza sativa
agagtgaatgaagtgatgtccttatataggtaggtatgacggttatcctctatgcgaattgtctgaattgccccataaccgtcatcagggagtaatctgggacgtccatgccaaaccccagcctgaatggctgagatgctgattcggccgaacctgggctgggccctcctggcttggccttcggcctgtggactccctctgttctgccttatccatttctgtgaattttgggctgattctctggtattttgatgaagttcacaacccattcttgtatggatacatgtttctccctcactttggtctaattttcctcccaactcctaggtttattacctgcatcaaataaacaccaacacttgtggaatatgtgagatttaatacctatcactatgttggatgttttattatctagactttatgcagatgttggccgtaataccctgtatattaaaagatacttatgttttttagtttgggttgacttgtttaaaataaagatgttaacagaaataaataaaagaaaataccttttgaagtgggccaacacgagaaggcccataaacccagcccactagttctcccctaaaatctagagagagaggaaccgaatcccacctcccctcatggtgccgccacccctctccctggccggcgcctccttcctcccctcctcctgtgttcgcatctctcacctctacagcaaattgctctccctagatctccaccttcatagcttggatcaagaagcgaagtagaaaaacggaacgaggaggaggtgaggagtaaaaggaggggtttgatcggagtttcccctattgtctcctcacaagttctctaaagaaaccctaggtgagacttatccccttgttgtatcagttattctagcatggctttagtgctttaattcgtggttagggaaagctagagaaggagtttgggtagttgcggtttggtttgttgtagttctgcatgtgggcagatttgcagtgcttcagtgtttcgatgttttggagctctaaatattattttctgcaaaagtgtataactaggaagttgtagataatgtttggatctatcttctgaccaaagggcgcgattttatctcaagtggtttaggagatataatttttttaatataactgttgtttttgtgtcataatctggatagtagaggtttttcttagatttccatattggtaaagtacaccctgattggacgagtagaactctagttatggttgttttagtgtggacagtctgaaattctagacagattctgaagcctgctttcaagcgcaaattagaccatttttatggcagaataaaaatatgttttctacatcaaagttgtaggtattgttctgtatattttcaaagtgtatatattttcagtcatagcctttccatttttcaagatataaaggtttgaagcaggagtcttgtgtatagtccaagcggcgttccttgttattgagttttgatgggatggagcagtaggttcacctttttcattgttttatatgcatgtttgaatgtgtttgctaaggttttgtttgtgattaggtggtggtccttcagatcgtgcatgataccaacccttcattggaggcaagagcatgacgaactaattatgtgattcatggattgtttgctctatctatttatttccgatatatttctatgtgaaatctgactgcttatattcatattgttgttcacgccatttaggttttcatgtttatcttatgtttacgacgttattcttgtttcaatattccggattctggttctgggtaaataattcaagttccatgcttgccatggatgtgcaatatggtttcaatttggttctttgattctggttttcaattattcaaggaccatgcgtagtcatgggagtgcaatttggatctttattcatgttcctgtgggtaagcactgatcacgcttactcagctttgccggcaaatgttaggatgtattcactattgtccgggatagaaactactatttcaattcgtgcctgcccaggatgggaactactatcttctttaacttggtgtttgaaaatgtgtttcctatcaaagaaagaaagccttctattcatgctttattgccaatgtagtgtatatgtgttttctagttccatattgtacttgctgagtatttttatactcactcttgtgttttatttggttttaggtacgcattgagaccgacatgcacgggcgggaagtagcacccttatatacacattacttgcacactatcaaactatattgcttatgtccataatgacacttaaattatatcatggttcggtcttgtaataatcttttagatatctattagtttctttccatggaattataaggaaggatcgcaccgtgggaatgatattattattagtagaacttataattgcctgtcgtggatgtccgtatttacaggggagactgccgaaatttctaataattttgggagttagtggtttgagtgtttttttggtgtggcactttaggtacgtggttacatggggtgttacattggcggtatagaattggcatttaataactaccagcatggatcgagtcaacttgggagaagataacgtccggacgatcaggatatcatacgggatacttaggctaaataccaatgcacgtggttggtgaagattccatatggcatacgatggagatattgtgtgcatatcgtgcatatggaatacgatggagattccatatgactcccttgtatacctctgaattttgatttggatcccttccatacccttgccgtcaattgaccgttagttgaccgtttaataggtatagaaaagtcagttttacccttcaatacatgaggaatatgtaaaaatttgtaaactatattgttgcaagtatagaaatttgttgtgtgattataatattcgtaagtttgttgtacatagaaattttaataaatattaaaaaaagtatgtgtagcattttctttaaatgataaacatatttttggaaagcattcctatataatatataggataggaaaaagtgttgaattaccgtaaaaaaatgctacatatactcttttaataagtaaataaatattagttttatgtcatgatgtaaaaataaactttgccatgaataataccttgtacaataaaatcatgaatacaataattttatatataacaaaattatacacttccaacaatatagctagtctgcaatttcctgatttctttcatgtgtaagggcaaaatggtcattatcataggaattaaacattcaactaacggtcaacaaacggaatgtgtatgaaagggatcaaaaccaagattcaagggcatataaggtagtggacaaaactcgggagcatagaagggattagctaaactttcagaggtatagaaggaattttctctatatacagagagggagggtgtgtcctcccggtattgtttcagagagagttgagttgagagaatagttagggtttcgagtttagtcgagattttggtgaggagtgctattgttgcactttgtaaacacacagaaataacaaagttgtaattctacgtttgatgatgatcttcgatttgtgtttactcgggttcggcagtccaatcggcgagacaccggcgatcagaccgacgacattggatcggtcagaccagcggagcaacgatggtcagaccgacggcggcgacaggagccaggagcgattcttcggcggttagaccgggcgatcaacatcggtcaaaccggtggatctactccggtcagaccgatctatatcggattcgagggtaacttttagttccgtaaaaagttccggtttttgggtactacaaccattcacccacccctctggttggcttagttcttgttgttcgatcctacagaggatgaagaggtggaggtcgctctcgcggcaccgacagcgagcacacgagcccgagcccctgaggggatgctaccgcgccgccgccaccttcctcttatagcaacgctgacgccctcctccacaccgccgcttgcggccactcgtgcgctgacgccctgctcctgcctgccacgctgacgtcctgctcccgccgatgccgccaagaaaaaggttgagagaaagagagagagaggaagaaagggatgtgtcattaagtccacaattttttatttttttatttagattgaacggctatgacatgcgggtctcacactttactcagccgccacgtcagccgaaaatggccactatgctgtcgagggaccaaagttaaatggtattgtgaggtgagggatgtgctatacgtggtatttaggttcagggacaaacttcagactcggcaacaaattaaggaacctaaagtgaacttattccatctaaaaatgaaaaggatcaaataaattggaacagaatgccacgaattgattagtattgtggagaagatcgtcgccacagtggttccactcctttgtacacatctcggttcacgatgcatgccattgttgtctcaatgatcaactacattgcagtaatgcaaattaccaaagttctcgtatgcgttagtacatatgcacgcacaacacatgggccaaagttggcctcctcttgctgggctttggcccagcaagactccatgcacggacgtgatgaatacaaacttctagacggacgggcaccatgacagcgtgatgaaaaattgagaagcgcaaccgtttcactatttctccgttttcctccacgtgtcgctagactatttggctgccaccaccaatcagctagcaggaggcactgctgattttctttacataatttgtgagatcagggagacacgtggtccaataggcagccggcaaaactgccggcttgagattagttgatgagtaaactttaggaaatactaacacaacgaaaccaagcactcgactaggttgaaaggtatttttatggttggaagttggaacacatgaccaaaatgttgaacagtgatagcaagatattttatgcttctattcttgacataacaagagataatagtgaaatagaaaaggaatgaaaagcaaaaattagtttgaaattaagttctaaatttaaatatggtaaattgcacatcacattaagttggtattatttatctatcaaactaaaaatatatatactacgaaattagcacaagacagtaacagagaaaataaaagcacgaatagtacgatggtgtagtcacgtgtatataggggtattattgggtctaacgttttagcctacaaaaagttaagaggtgagtctaaaatgaagtaggctaagtttttatacatttttatttattcggcttacttaatttcattgttgtgtaactaacacaaacaattgttttgtatttgcgactgcagtagctatggctaggtgcagcggctgcactgactagccaaatggacactatgagtaggggtggatagcgagccagctcagctcggctcggtccagctcgttaggataatgagctggctcggctcggctcggctcgttatcctaacgagctagaaacccagcttggctcagctcatctgaaaggtcgagctagctcgttaggctcacaagccgttgatgggcgcctgggcagtgggcggcgtgtggcacggggcggcggctggcgggggcggggtaggcggcggccgtctagggcagggtaggcggcgccggcgggagcggggtaaaggccgtgctggacctcgtcggctccactcgtacgcgcgtgtgctgtgcaggtccaagcaatgaagcctcgctaagactagctgccagctgcgacgacgggtcatcaccggcctgcctcaatgacacctggtgccggctggggaagtgcggcgccgacggcggcagcgaccctagcggctggtggcagcggccctagcggctggcggcagcggcggcacggcgagaggtgacgccggcaccgactggggaagtgcggtgccgacggcggcagcggccctagcggctggcggtggcggtggcggcgacacggtgaaaggtgacgccggcgccggctggggaagtgcggcggcgacgcgctgtggaaggggatcgaggattcgaggttcgagcggaggcggagccaaagagagatgcgatgcggataagccgccgatgcggtgagaagtgaggagaggactagggttttgatgttgtgggcttgggcctttggtgttgtcttgggctgggccttttatgttgtctgttggagtcctggctcgttaaggctcacgagcagctcgcgagccagctcgagctggctcgttatctctaacgagctaaacttctagatcggcttgttaggaaaatcaaacgagccgagcttgtcataagccgagcgagctaaggagccacgagcttcctgtccacccctaactatgagggctaaataaggttgtgagaaaactcatgtaccttgatccatgttaaacacctctacgtgtgtgtataatgattataattctaatgccataaatataccaattgagaatgcgctttgaatagaaatttggggtggtcaggtattcaagggtgttcatagaggtgtagcttacccggtgcactggacacccgggtagcatctaattttttttaaccatattaatcatatattactccatattagctagtaataattagactgaagatttccgataattttcttctggatttcgccactgcgggtatttatcgtcggtctctatctctgtaagtacttaatttattctagatatagctatactcctcaactatatatatatgtggctgtgatgtatgcgcgcgtttcacgtgaaataaaaaaaaatcgccaacagcaaggataaccactgctcagcgccgtcgtgagatcatcacctccagcacctctattaattacagccgttttaggaaactaagttggcaccagatgagcccgatcgaggtacggatggagtacacgtcaagcagtgcgaagttgagcaagctgaattaagtatccttaattatggagcaaggaacgatcgataaaaagaagaagaagagagagatcgcacaaattgaatagctgggtagtggttgatctaaaataaagattacatcaacatctaaataatctttgtgttgatattttttagttgatgtctctagctgcgctgatatggtcatatcatatggagtatataataagaattcagcaactataccagtgaaggtttcggccagcaaattggaccgtgctcctgccttctaattttgttttttttattgaaacacgatatgatgaacagatagcatataaacaacccgtaactaatcttgatacctcgcactataaaactcgctggatgctaggaagaacgataaccaaattaaagtaccaaacaaaccaggagacctcgtgttacattctagtatttcataatactcatgtgaacatgtgagctcaccgccgcgaagtgagtatagcttaactagttaggttccttgtggtggaaccagcccacccgggttcaaatcctagatttgacatcctaaatttgacacccatcgacagcgaggcgcctgtggtgacttcgttaggttagggtgtgcatgtgtgcctttacaggggtgagcgcctgctgtgtttctcaaaaaaaaaaattgagctcaccgccaccgccctccccaactagctcacacccaaaaaaaaattcgcatgtgagctcccagcattatctttacgccttctcctattggcaaacattttcacattattttttaaaaaactatacattatagtttacatgccacacatattttcacaaacatgcaaagtcaatctatctataaatgaaaatatatactaaataataaatactccccacgattcaaaattaatgtactaattcttatagcaacattttgtatcggagagaggaagacctaaaagtgcatatgtgttttgcagttgcctttgttattattttgttgtccatcaaattgaattttgcatattttgtttctttaaaagttgaatccattccaaccattgcttcaaaggaccattattcccctcatcctaaaatataaagaattttgatcaaatgggatagattctaattctacgaatatcatccggttaaatccccttatattttaggacaaagggagtattataagggttgaatgacgaccgattgcaaattataaaatcacagattgaacaaaaacaagaaaaacctatctagaataccaactcagatattttccatctatggttggtgagggtctgcataaccattgtttcttgcaaatggccttacaagttatatatagttattgtctttcttaaaccgaaaacagaatcttcttaaatcaacggctgattgattattttgtgtcattcggtcggagagtaaatgagttgcaacgcaatcattcacccatatatggccattaccatagccatcaaagtcgatccaacgaagacacagctactaaggacgccacaccaacatgatacctctaatgtgatgtctccaagaaggttaaaatattgtcactgtcgctattccagacattagtgactaattaagtttccacttggagaatccatcccgagatacagagagcgttggcaacattgtctccgaggtgtttgacaggttttatgtgctagttggtacaactatagcaatagacgaatacggcttgctagtccagttactcctgaaagtatacgactgccatggcaaatagagccaactacgacgccaaatgatcagcagcaaaagcaacacacatcgtgctgctgaaactcgtctgtctcaatcgaccacacaccgtttccctcccagatgttttaaggcctcccaattccactatctacgagagaataatgttaaacttattctcttgtaaactccctccaccctaaattatagattataggacgctttctttttaaggaaaattaaactcggtaacttttaactaatgatcatactaactatatatgctagcatgttataccactagatttattaatttatattttaaagtgctttaatgcgatgctaattctatatttattgagaacatagcatgaaataaattactaaattatattattaaagaccatgtaaaaaaatataggccttataatttaagacggatggagtattgactaaaccgttagagaaaaatagatgctaaatgagtccttccaggccatctcgtgacctactactttaaaagtgcacctcttt

SEQ ID NO: 571 - DNA, 551 bp, Oryza sativa
  unsure (1)..(551): unsure at all n locations
acaataagttataattaagtaattttcctagtttaattacatgtttaaaattttgctattcttaacttacaggtcgttccagacaatgagtatgaaaagaagatccgaccaacggttataccagccaatgaaataggagtgacatttgatgacattggagcactggctgatatcaaagaatgccttcacgagcttgtcatgcttcctcttcaacgacctgatttcttcaaaggtggtctcttgaagccatgcaagggcgttctgnnnnnnnnnnnnnnnnnnnnnnnnnnnnnnnnnnnnnnnnaggccctagcaaacgcagcaggagctagcttcttgaacatctctatggctagtatgacatcaaaatggtacggggagtctgagaagtgcatccaagccttattcagccttgctgctaaacttgcaccagcaatcattttcatcgatgaggtagacagcatgctagggaaacgagataaccatagcgaaaatgaggcatcccgcagagtaaaaaatgagttcatggggtaccgagctcgaattcgccc

SEQ ID NO: 572 - DNA, 3599 bp, Oryza sativa
agcgcgcaccaatgcggaagcggaaaatcaagcgactacactggcccagcacatcagagccgtcaacgcaatactgagggaaaccccctacgatcccattctgaacgacgatctcgcacgatggacagaacgactacgggaatcagtgaccaacctcagcaacgcgttcaaagaagccgctgctgcagtgcacccagaacagccaccaactggcgatgctaatggtgaagatcctgaacaccgggaattgcctcatcgagccaccccttcacctcgcggcaccggcgatctccgcgatcacctgaatggccgccgagaggcgcgacgcacaagtgacaacgagaaccgttctcaacatcgcatctcttcacgacgtcacgataacgaagatcgaggaggccgttcaagcgaagaccgaggccatgataaccgccacaaccgctgcgatcatgacgatcacgaacggcgggtgctgggcgatactggtcgaggacgtcgccataatgacgacgatgatggagatcggcgccgagacaacaacgggcgacgacaacaaggttctcgagaacccggccgacgtcctcgtaaccgcacgccggaaccgagcgacccatcgtcatcgtcatcatcttcctcatcttcatcatcagatagacatccacgaagggcgtatgatcgccgacaacccaccgcccccagcgctgggtgtagagctttcgatcgttcacttcgggatgtccgatagcctgaaagattccgacctggagcaatagagaaatacgatgggacaccaacccagaagagttccttctggtttactccacggtactctacgctgccggagcggacgacaatgcgttggtgaattacttgccaaccacattgaaaggctctgcacgttcatggctgatgcatctcccccctactcgatctcttcgtgggcagacttgtggcagcagttcgtagccaacttccaaggaacttacaagcgccacgcgatcgaagacgacctacatgcgttgacacagaacccgggtgaatccttgagggattatgttcggcgctttaacgagtgcagaaacacaatccccgagatcaccgacgcttctgtaattcgcgctttcaaatccagtgtcagagatcgctatactactcaagagttggcaacgaggcgcgtcacgactactcggagattattcgaaattgtcgatcgatgcgctcatgcggatgacgcactgagacgcaagaacgacaaaccgaagactggaggagagaagaaaccagccaaggatgcacctgagtcaagcaagaagaaaattcgcaagagtaggaaaaggaaagctcaatcggaagttctcgcaacagaatacgcggaccctcccaagcgcccagacccacaaggcagcgatacgaagaaagcatggtgccctatacacaagtcggacagacactctctagaagattgcctcgtcttcaaaaagtcgctcgcaaaacacatgacatcggaaaaaggcaagcgagtacacgtggttgagaaggatgctgaggcgcctactcaggaatcggactcagcatacccagattccgatcttcatgtctcacacatctttggaggttccacggcatactcctcaaagcgagaatacaagaaagtggaacgtgaagtctgttcgacgtggcagggggctgcgcccaagatgaagtggtccgagcagaagatagaattctcagaagaggaccaccccaagattgctgtcatcccagggcaatatctgatcgtagtcgaacccactattcataatatcaaggtcgcacgagtcctgatcgacggcggtagctcaatcaaccttctcttcgccagcgccttggacgcgatggggatcccacgaaacgagttgacacccaccgatcaacccttccatggaattactcctcagtcatcgtccaaaccattgggcaaaattacgttgcctgtgactttcggccaagcaaactacttccgaacggaacagatcacctttgatgtcgctgaatttgatacagcatacaatgccatcattgggagaacttcactcgcgaagttcatggccgcatctcactacgcgtatcaagtgctcaagatgccaggaccgaagggaacaatcactattcaagggaacgctaagctggcagtacaatgcgacaagtggagcctcgacatggtcgagcacacgcccagcctacccgccacagctgagccacccaagaaagtgagcaaaacaaacaagacgccgaagccggacggcgcaatcaagatcgttccactctccagtgccaaccccgacaagaccgtcaagatcggggcatcactaggcgagaaataggaactcgcgctcatcaccttcctccgcgacaatgctaacgtgttcgcttggcagccgtccgacatgccgggggtacccagggaggtgattgagcacaaactcatggtgcgacccgatgccaagccaataaagcaaaaactgcggagatttgcaccatatcgaaaacaagccatacgagaagagctcgacaagcttctcaaagccggtttcatcagagaggtactccatccagagtggctagccaacccagtcatggtacggaaggccaacgggaagtggagaatgtgtgtcgatttcaccacctcaacaaggcgtgtcccaaggatcactttcctcttcctcgaatagaccaactggtggactcaacagccggttgcgagttgttgagcttcctcgacgcttactccggttaccaccaaataagcatggcaaaagaggacgaggataagacagcattcatcacgccgttcggggtattctgctacgttaagatgccattcggactaataaccacaggaaacactttccagcgcacggtccaaggtgcacttagtgaccagctcggaaacaatgtcgaggcttacgtcgatgacattgcttgtcaagaccaagacaagcgactcattgattgacgatctgcgggaaacgttcgacaacctccgacgatatcgccttatgctcaatccagagaagtgcacgttcggagtaccatcgggcaagtgtcacaccttgaaaattcaaaatttataaattgttgtttaaaaggaatttttagaatttatttttaaaagtcttgaaaagaagatctaattttaaaaataaattccaatataaaatggggccagataaaatttcattaaatactttgcttaattctataattcctagatttttctgagatttatttgagctaaggaagtatttttaataaatggaattgcatttaaaaaataatttaaattgaaaaaggttttaaaaatcttcttttggctttgggccgaaagtcggctcaaaaacctctcttttctctctcctcggcccagccggcccagtccgcagccgcgcgcgcgcgttcggtcgctgacaggtgggtcccacctgtcaggtcgtcgtcttcctggcgtcggcctccgcccgaaaccctagccgccgccgccgccgccgttcctttccaaatccggccgcccctttccgtttccggccgaatcaatagaggggaaatgatctccgggatct

SEQ ID NO: 573 - DNA, 725 bp, Oryza sativa
ttcttagctgcttctgtcggggcactaggtcggccgtctttgtccacctcagttatgatgtgctgaccctctatcttcttcgcggcacctcgttgtccgcgtgccctcttctgtccagcagagggatgacttccactagcctcctcctcatcgttcccctcctcgttcccctccgcatccctctccacgttcccctcctcgttcaagtactggtttggatcctcgttcccctctccttcgttccagtactggctgcttccctctacgattgtatcgtatagtatctgttcctcatcgcgatcagccatctgtgcatacaaaaaatatttgttaggtatataggatgtatttgcgtaccgtaatattaaaactctgctaatcttatattaaatctctaataatcttatattaaatggctactaatctcatattaaaattgtaataatcatatatatatgctaagtctaacaatcttatattaaatctctaacaaacttatatttaatctataataatcttatattaaaattgtaataataatatatgtatgctaagtataacaatcttatattaaatcgctactaatcttatattaaaattgtaataatcatatatatatatatatatatatatatatatatatatatatatatatatatatatgctaagtctaataatcttatattaaatggctactaatctcatattaaaattgtaataatcat

SEQ ID NO: 574 - DNA, 505 bp, Oryza sativa
gtcgaagatcttaaactgttgtggaagaaggaaggtgtccctgtgtgggatgaggacaaacaggaggagtttaacctacgagcgctgctgttcataaccatcaacgattggcctgcacttagcaacctatccgggcagtccaacaaggggtacaaagcttgcactcactgtatggatgaaacagaaagtacgtatcttaagcactgtaggaaggttgtgtacatgggttatcgtcgattccttgcagcaaaccacccggtacggaagaaaggcaagcactttgaacataaggaggaccactgtacaaagcctaaacatcgcagcgggaaaacagtgtttgctatggttaaagatcttaaagtagtgtttggaaaggggcctggtagccagcctatagagagcgaagatggtcacgcggcgatgtggaaaaagaactctatattttgggagttaccctattgggaattcttggacgtccgccacgcaatcgacgtgattcacctca

SEQ ID NO: 575 - DNA, 682 bp, Oryza sativa
cttccataagattgacaagtgttattaccctcaaatacaagtaaataagaagcagataagccctatggatataatggcagggtttccatgtatgaagttggtgctgtaaaccttcataagccataaaaagctcaaggcgtatcaactaacgcaccgcgaaagcacgagaggttcctgtaaaatgcctgaccgaaccaaacattggtttggaggcaccaaaatgcctcaatctgtaaacaccagcagcagcgtcttcaggaactgtccactctagagttgcaaaacttcttgaactcaatcttgcgggccttgaccacttgaaacgcaatgaccaatcatcatcatcgtagacaggaacccaattattgttaccatctagcttctcgacgagtgcaaaggtaccatccgtaagaaggtcattccttgggcatgctgaataaaatgtagcattcacagtactacccttgttgaatgttgagttaccaggaacatccgagttgacatccccaaacttgacaccaagaggagttgagtcaaaaacaacaccaggaagtagtccaatttgcttgtccaacatatcaggaggttggaaatttgttgggacctctttgtttgcaatcatggccatagcaagtttctgaaattcttggatataggcactcaaggtgtggggaccatacaa

SEQ ID NO: 576 - DNA, 612 bp, Oryza sativa
acataaattattaaaaaaatggtggggtccacatgggccccacatgtcattctcagcatctccccctcttcaactagagcccctcttcttcctcctctctctctcccttctcccatccccgaggcggcgggcggtgttcgggtgagggatggcagctcgcggcggccgggagaggagggaggcggcgcgcggccgggcgaggagaggcgacgtgcggtggcctggcaaggaaggaggaggcgctcggcggcccgacgaggagaggtgacgcgcggcggcctggcgaagagggaggcggcgctcggcggcccagcgaggagaggcggcgcgcggctgccggacgaggagaggcgacgcgcggcggccgggcgaggagggaggcggcgctcagcggcccggcgaggagggaggcggcgcgtgcggctaccgagcgaggaggggcggtgccgtccggctgggcatcgcgggcggagcggccgacggagtgtagctgtcgcgctcgccggcgacctcctcctctgcatcttcctcctccggcaacctccgccgcccgcggcctgccgccgctccgcccgcccctccgccgctccgtccgccggcatgctcctgccg

SEQ ID NO: 577 - DNA, 6773 bp, Oryza sativa
ttctagaacagtggatcccccgtcccacgaatttattattttccggatcgaattgccacgtatgcgccacgtcaatgccacatcatatgaagaccaagtcaaatttgccaagtatgcgccacgtcagccaaaaccgccctcaaaactgccgagggacctcatcttcactggttttgatagttgagggacccgttgtatctggttttctggttgaaggacgaaaatcggattcgttggcaagttaagggacctcagatgaacttatttctttttctgcaaacaaatcacatatgctcaagctgggccctgggatgcttcgtagaaaaatgtattgggccttgggccattgcctttgtaggagggtggctttgggagtttggactatacgtgcgccgcgtcgttaccgggctcgccgtcgccgacactcccaccaacaacaccaaagtccaaagacacccgcttccctccaaccacccgccgcaaccggtcagacgcaagcaacgcaacgccacgcacgcacccgcctcaccctcatgcgccggcacgcgtaccgccacgcccacaccgagatatagcagaaagccgcaccccgcaccctgcgccctcaccgcacgcacgcacgcaaaagccttcgaccctgccgtgcgcctgtgccgtgcactcatcagctggcgaggaaatagaaaagagtatatgaaaaaccaccgtatgtttttttaagcgaaaaagtttttaacgttaagtataattaaaatgtaattatattgtacaactatcttgtagctataatgtaattacgatataacttatgtaaaatttgtattcaacctttatttagttggttagcaacgagattttatacgtgatatgtatgaaaatttctttttaactattttttatgcataaatctcgaggtaatccgatgactgtaaatttgaaagttctgcgggtagcaattctgaaaaaaggacagacagtgtggcacacaccaacaaaacggtgctaggtacgggggaaaaaagtttttaaaaaccaccaccgcggaggcaaaaacaagacggtggcgagcatggcacatggccgcgcgcaggcaagcgcacagccgcgccgcgtggccgcgagtgcggtgaacagggccgcgcaatcacgcagtgccaccgtctgtggccgtctgtctatctctctctctccagctcctccacgggcccccacccgcgcgcgcgcggccactgtgccgcacttcacccccccgggcccgtctcccctattcggcccatgagacggcgccatgcctccccctgccctggccgccgggccagtccaactcatgatcacggggagtcaggcggtgggcccccacgttcgctcggaccacagaagccggtcccctgtaccacactgtgggttctccggttcgcaactatatcgtctttattggggattccgtggtaccggcggtccagaccggttcgtcatcatggaacgagttttggctgggctagctacctgtataggcttggacagctgagctggtgctgattggaagcttcctttcaaaggcaaaagtacaaaatcgtttcttactcgaaagggattaaaccgttttcgttgtaattaccgttttcaaaagctgcaatgcagttgtgtgtaaaacaaggttaatctcgagctcagtaataggaaatgcctcgactagtttcctaccaacgccgttcgaaaaaaaaagagagactaatttcctaccaaccagaccctattaagcaactactacgagcatttcaagttacgacatgtgactttgtggaattgaaaattcaaattcgtacacgaagaacacattgttgactgttgacttggaatagttttagttggaaatagcacatactggattacatatatacatactgacatgccgggtaagcatgttccaatgcttgacaagcacagattcgaaggccaaaaaccacatgtgtggcatcattttcattgcctacgattaggtcgcgttgggacctcacatacagtttgtttcttccgccttgatctcggatttaggccgctaagcttgttgcttagtgagaatgcaaaagcacacggctccagtcgatgacaatttaattgacacgggttttgcatcactaaacatgtcctttgcagagcagtttaagcaagacaaaatcacacagcttccatccgtcggtgccagtgccaagacaggcattgactctgcactcttttgtgcagggaccatggagaaaaaagaagtaaccatttcctcaattctcagtgcagagctttccttggtgtccctgtttctcctcctcatccgacctttcggctggatgtataaagcattgctgaaagctactaatgcttcaggagcagagcagctctctctatcgtcttgttcctacgcgtcatagtattgaatctatttctcttgtattgtcgccataatccattaattgtagttagtacgatatctattcttctctattacaaaagaccacacgcaaaatttatactccaaaagaacctttcaccaatttcacagaaaaacttgtggtgcttacacaagtactaataaagctgtttgggtgtcgagaaattcaacaaagtaggctgctttttacacccatctttcctactgttgttacgctagcttgttctccctttcactctctcttcagtatcctgtcgattctttgtgatggctacagttcgattcgtatcggcgctagcaacaaaattgcggcactggcacacatcgatcgatacggacgatggaaacggagacgcggctgttgtgtaatggcatcttaacaaaggacggcgaaggaaacacggaaacatttaggtccatataaatgccttgtttatatcagctgatgagaggaggaggatgacagcttgaaaagaaaactgtgtgttctagaagcaagcaagggtaggagtacataattgtgatttatgaaaggccctacgggaaatttaaagctgcagacatgtgctcagggaattaaacctgttagttctctgatactaaagagcttaacaagtactaaaattactaattgtctagtggccattggaacgacattgccctgcatgtgcagcatccttagagttcaagccgtttaatccgctaagattctactgaatcataccagtaatcatgtccgccattgttgcggctttgcaagtaggcctacttaattggaaggcctgatgagagacacaaacagttggctattttgcttacacgaaatctgttgtcaaaatgttagtagtagtaagctcccagctaaaggcaaatgccattcttcaggtcgccttcacaaataaccaactatcccacgtacaagcatcaccggccttattttattgtttctcccagtgagatgtttggcacaagaatgaaagaattgatgctggtactaccaaactaagaaagtagttgagattgtgaccattatcttagcttcagcctgttcaagtgttcatacgatggataagtgattgattaactactaatttaattatcactgtgggttatgcaggactgatgctaaaatgctaaataatggctctcccaagacgaaatggaaaagaaaagaaaagaaaagaagagagatacggcgaattccatttcaccagctgtaccccacctttgccgctcgcttccacgtgggccctaccttttgacccccccacgtcagcggcgcagccagatcattccaaaagcggaccacatccccacgaaaccccaccgcgaccgacccccccggaaaatatactaattacaaacaggtccctcgtgggctcgtgggtatatataaggctctttcagttggctccctcgtcgtctccgttaccacgcgcacactgccactgcgagtgccgttcccctcctcctcctcctctctcccatggcggaatcctcgagccgccccacgaaaccctaaatggcgagccggcggcgccgccacgcccctgtgccgtagcctcgccgcagcgagctggtcggaaggtaatccccgcttcgcctcccatccccccgcggaaccggcggatcttacctcatttggcatcttctctggatccactgctgatctgttcctccaccgtcccaaccgcctcacagatttctctcaatccgtgtagaacacagcgtcacctctcgatccgccaagtggtgggggagtaggaagcgtgtcttctccgggaggcgcgcgccatggggagcgatctgaaggagatgaagtacaggcggaggattgggctcgacgagcgggcgcaatgcagcgagcagagggcgctcgactggcacgcgctgaagcaggacccagtggagttgctccgcaagctggacgagctgagggagcagatcacgaggacctgccagatcgtcgagccgccgcgggagcaccgtcgggcgggccgacgagcgctctcgctgctccctgagaaccctgagccgccaccaatgccagggtatcaccgctcacgctatggtggtgggcggtatgggcacggcttgccgccgagcccctacgagccgctgcgccctgagattggggagaggtactccagacagtcaagtgggcggtatcggcagtatcaagggaggcaatgggatggctgtggagttggacatgggaattacaatccttcttatacatgttcctgtccgcattgtctacatggacagagaactgcaccacaagaagagcacattccaatggcgagatactttgctgggcagcatgagtgctaccggtttgaaaggtcgccatctgtctcatcggactatgaccggaggtccgtagcatcatcattgtactcgcatcggtcggtttcaaagaagagagcagagtatttccggaagaaggcagagcatctttgccgtcctgtttatggcgccgccccttttgttgtgtgcagttcttgttatcagctgttgcaggttccaatggaaaagtgtatggggaggaatcggctgcagtgtgggtcttgctctcagattgtcagtttgaagcgtgaggagaaagttatccccttctcaccatcagcatccttttgtgtgcccaaaattgagcaaggttcaaatgatcaaactaggcgagattttgagcaccagctcaatgagtttgccaattctgccttttataatttgaatgagcatagcagcatgcaaatcaacatagactttggtgatgatcattcagtttcttcttccattagtcatgacaggactgagaaaggatgtggatcaagcaggagcattcagttaaaaacagatgggctcttgttgtctccaagcagatctggagatattgagagcccgaaggatatattatgcgaaagagatgctgaatgtcaggtagaaccttcagatgctcgagtcagcccatgttccccagttttagaggacaaacttgttgatccattgtgcagccaggaaaaggataataatagtgaggacctaggcatggctaatatatctgatgtaaattgcaaaggagaacacaaagttaatgatgatgatgatgggagtcttagtatgggaagtgaacagaagagaaaggaatgcgatgaagattcccttgtagatgaaagcatgtgcaaaacccatgaacagaagagcaaggacgatcactctagccctgaagatgttagcaaaactcatgaatttgatagtacaaaagataatattagcagtgctgtagatggaaatgaaaagcatgagtttgaaagcaaaaaagatgataccaatagtcttgaaggtgaaagtttgaacaaggaacatgagcaaaagagcaaagaagacgaaaatagtggccttgaaggtgagaatgttaagaaggggtttgacaaaaacaacaaagaaagtgaaaatagtgcccttgaagatgccaatgccccccttgaagatactagaaatgcctctgatgcggcaagcttaagcgagatatctgaagaaaagaaaacagaggaagaaaatggaagtttggaccagccttttgttgaagatggcaatgcctttgcagagagtgggggatcatcatttaatgagcgtacaaattctggtttttcccgtggttcttctgagactgcattagaagaagatcagccctcaactggaaagagtggggattcgtcattttttgctggtttcctgaagaagggtttcaaggacctttctttatttaatcagtccatggacagcgttaaggtttcaattaatggccatcctatctctgaaagagctcttaagaaggcagagaaaaaagctggtcctgttgagcctggctcgtattggtgagtgattgctatagtaacaaattgtttggcagtttgctgtatttgttttagtttcactgaatggattggcttgtcttggtcataaaactataaaagttaattttgatagagccactcatctgcagcataccacaatcacttatctaaattactagtttactacaagaaaacctacattattgatgaaaatactgttgagcttcttaactttgaacttacattagtagaactgtttttcccgtagccgcgcaatagacttttataactgcaacattttgaaaattattgtgaatttttcacccaatttggggctttgttttggcaattgataagtattacttcctccgtttcatattataagactttctagcattgcccacaatccacattcatatatatgttgatgagtctagacatatatgtgtgcctagattcattaacatcaatat

SEQ ID NO: 578 - DNA, 612 bp, Oryza sativa
tccgaaactacacgcgaaacgggacaactcaacaaacggcgaaaataaggccctattaatgacctctcagcgtgccattagatagatctcgagattcgaggaattttggaagttgaacagagtcaaacggacttacggttgggaagatattgaatttctaagattattagatttttggtctaaaggaaaaaggatttaattaaacccttttggaaaagaaaaggaagatggaggggaagtagacttccctcgggcggctagggcgcggcccgagagaaaaggggcggctcggccgagctaaatgggccggccggcccaagaggacacggcccaatagggcgcggggaggggagagagagggcgccggtggaccgagtccatctcgcgtggtcccgggtgggacccgcttgccagcggctcggctcaccgtgccgagggagcacgtggcgcggcgctagggtgtggagcggggcgcggtgcatgcgcgtggttcgcggtggacgcggatgcggcgggcccacgcgcagcctcacggctcgcggtggaccgcgcccgcgagcggggccggaggaagcggctgaccggggtcggctcgaacccggtcttggccga

SEQ ID NO: 579 - DNA, 667 bp, Oryza sativa
tgcagcagccgccccaccacctgcttccgccaccggggtacgccgccccgcttcacgtgctccaccaccgccgtggtcgtcgtatctgtctttttctcgccggcggcggctttctggctgtcccacgtagccttgccgttgtcctcgaacttgatggagatgaaggaatctgttggttttaattaattggcagcagcaatagtagagtacgtacaagaacacaattagcttgcttgcgagcgacagagaattgaaggcgaggcgaggtgaggtgtaccatcgaggctagcgatggaggcggtgtcggcgtcggagttggcgtcggagtcgtggggggcggggcgaaggtggtgaggaaggaggagccgagcgcgaacaccttggggagagagatgctgctgttcttgcggtggagcggtcggtcggcgaggaggtgggcagcggcaggcgaggtcttggaggcgaggaggaggaggaggcgctcccggaggcattgcgagcacacgcccaccacctcctcccgcgggtggaagtagcacatgcatggcctctcgcctcctcctcctgctactccatccttcatggctcacttcttcttcttcttcttcttctcctccttgagttgagttgatatatactctagatagcaagctgctaggtcggtatc

SEQ ID NO: 580 - DNA, 6096 bp, Oryza sativa
  unsure (1)..(6096): unsure at all n locations
tcacctaaccacatttattgcggtttggctgagcgtgtcacgccgcatgtaacgcagtgcagtgcactagtttatccggtcagtgaccagtcacagaccggtcagatcgcgggttaggtggcgacaggcgatctgacacacgcctcgccccatcccgtcaggacgagggcttctaggcgctcgtccccagctggagctagcgtgttacctcccagagatggcacgttagtcctggtcagatatatgccaggcttcatcctaaccattgcaggcaagatgctgtgtgaagaagggcgaacatgtagattgctaagctgacacgtggtggacaagaatgaccgacgtgactggtctgacaccggtcatgtcgtcagcagacagccacgattccacatcgcacctgctcccggcgaaagtggaggtagttgtggcccgtctcatcagaaggtgactcggacggcaactatacaaatctccgtccatttatgaaaaggtggggtaagtccccacaaaaaaaagagagaaatggtgcatatggtatccccttaagatataaaaggaggaccttgcccactgagatgtggactggacttttccagattgggaacccagaacaagggagaggctggctcataccttgtagctccttcatacgcagatcacccaaaacacaggagtagggtattacgcttctcagtggcccgaacctgtatacatcgcccgtgtcttgtgtgttttcggtctagcgaaccttccacatacagagagcttagaatctcaccctgagtccccggccgaaccggcaaaggggggcctgcgcagtctcccggtgaggagcctcacgctccgtcatctggcgcgccaggtagggggctctgcgagggattttctgagctctcgcactctttcgtgtgcgccaagcttttcctgttcagcccaatggccgagccagcaaaggcacacgacctctccccgagtatgagcggtgacgacggggagccaaacccacgccgtcgacctcgtactccaccgccccttccacgccaaagtcctaggcgggagaaggcgctcgagagggctcaaggatccgcgacttcgacatccacaggaggtggagaagggcggcgagatggggagcgtcgcctcctcgtctacggcgacggcagcacgccccagggcgcgctccaagctgcaggcgcgctcctacgtcacccgcccgtcgcccatgacccggagtctccagcccaacgttggctggacgatgtggccaaattggtcatgactgcacggcagcgcctagatgctggtgggcggtcctccgccaccaaggactctggtgctgctaccaccggctccacgtcgtcaagacggagggcgcggcgagcggcagccgctattcaccattcggccgccactccttcgtcaacgcctccgacccgggaagatctgcgtggggaaccggatgcccgcatcagtatcgagcgccggcgtaatggccgacgtgctccccacgcaacggagggcgcctcctcgtccggagtgtcacctcaccacggacgcggggatcagccctccgtgccccggttggtggtgtcggctgtagagcctttgtggcgagccttcggaatgtccgttggcccccaaggttccggcccaccatcgccgaaaaatatgacgggagcgtcaaccccgccgagtttctccaggtctacacgaccgggatcgaggccgccgggggtgacgacagggtcatggcgaatttctttcccatggccctgaaaggacaggcgcggggttggctaatgnnaacttgccacccgcgtctgtccactcttgggaggatttggccaacagttcaccatgaacttccaaggcacatatccgcgcccaggtgaagaagcggacttgcacgcagtacagcgaagggatgatgagtcacttcgctcgtacattcagcggttctgtcaagtccgcaacaccataccatgcatccctgcacacgcggtgttttacgcgttcagggggggtgtgcggcacaaccgcatgctcgaaaagatcgcctccaaagagccccagactaccacggagctttttcagctcgcggaccgagtggctcgtaaggaggaggcatggacctggaacccctccggttccggtgtggcagcttcggccgcccccggatccgccgctcagatagggcggcgtgacaggaggaggaagaagaggtcagcccataccgacgacgagggtcatgtcctcgccgtcgagggcgcttcgcgggccacccgaaaggggaggcctgcgggaggcaaaaagaacgagaccggcgctcccagcagggaacgcccaaccggcaagtggtgcaccgtccacaatacatcccttcacgacctcgcggactgccgtgcagtcaaaagtttggctgagcggacgaggaagtgggaggaggagaggaggcaggagcgccgagagggcaaatccccggcggttccttccagtaatcggcgaagtgaggccaagcagaaggcccccgccgaggacatcgatgacggcgatgatgacctaggtttccaagagcctagggccaccattgctaccgtcgatgggggagcgtgtgctcacgtttctcgccggagcttcaaggccatgaagcgagagcttctggccgcggcccctactcatgaggcgacgcgccgggcgcggtggtcggaggttgccctcaccttcgaccagaccgaccacccaccgtgcgttgcccggggagggcagattgcgatggtggtttctcccaccgtttgcaacgtgaagttggggcgtgtcctcattgatgggggagcggccctcaacatcctttcccctgcggcctttgacgccatcaaggccccggggatggtgctccggccgtcccagccaattatcggtgtgacgccggggcacacgtggccgttaggacacattgacctaccggtcaccttcggtggatccgctaacttccgcacggagcgggtgaacttcgatgtggcggacctcagtctgccctacaacgcggtcctggggaggcccgcattggtgaagttcatggcggcggtccactacgcctacctacagatgaagatgccgggccccggtggccccatctctgtccatggcgacctcaaagtcgcgctcgcttgtctggagcagcgcgcggaccacctcgccgctgcgtccaagcccgagggtggcgacgagaggcttggcgcctacgcccccgccaccccgaggcagcggatgatcacaggcgacgaggtcccggtcaaggaggtttccctgggcgacggcccgtccaacaccacacggatcggtggtcttctggacggcaaataggaagacgcgctcgtctccttcctgcgggcaaacgctgacgtcttctcatggagaccggcggatatgcccggggtccccagggggttgattgagcaccgtcttgccgtgcggccgggcgcaaggccggtccggcagaaagtgcggcggcaggccccggaacgtcaagccttcatccgcgaggaggtggcgcgacttctggaggccggattcatccgtgaggtcatccatccggagtggctggcgaacccggtggtcgttcccaaggcgaacggcaagcttcggatgtgcatcgactacaccgaccttaacaaggcatgtcctaaggatccttaccccctgcctcgcatagatcagattgtcgactccactgcggggtgcgaccttttgtgttttctagatgcatactctggttaccatcagattcgcatggctagggaggatgaggaaaaaactgcgttcattacctccataggaacctattgttatacgacaatgcccttcgggttaaagaatgcaggtcctacttttcaacgtactactcgaatttctttgggtagccaattaggacgtaatgttgaggcttatgtcgatgacttggttgtaaagacgcgcaaccaggaaatgttactctcagatctagcggaaacttttgagagtctccgctccgcccgcataaaactaaaccccgataagtgtgtgttcggtgtacctgcgggcaagcttctagggttcttggtctctgcccgaggcattgaggccaaccccgagaagatacgggctatagagcggatgcgcccccccagcaaacttagggatgtgcaatgcgtcactggttgcatggccgccctaagtcgattcatatcgaggctgggagagaaggcgttacccttatttaagcttctcaaacgctccggaccgtttacctggacggaggaagccgaaaatgccctcacccagttgaaggcgtatctaagctctcccccagttctggtcgccccggagccagacgagcccttgttactctacttagcggcgaccccgcaagtagttagtgcggcattggttgtggagcgcgatgagaacaattctcatttcacgcttccccaccctgtgccgacatggcccgggagagagcagggaggagaggctcccgagccgaacggtggcccaaggcccccgacgaccggagttggccctctgcccgcttgtcagacggtgctaggagcccccgacccccaggaaggccctgaggccactgtgggaaggccgcacctatcgccctttgaccccgaggctaaccctgtgctgactcgacccgggaaagagcagggagaagaggcccccgagccgaacggaggcctaaggcccctgacgaccggagttggccctttacccgcttgtccgacgacgccaggagcccccgacccccaggacggccctgaagccactgtgggaaggccgcccctgttatcctccgaccccgaggtcatcagcacagaagacaagtgcgccccgcgaggctgcttggacaaagagtgccccagggatgcggcccctagcaaagaggatcggccccaccgaaaggtgcagcggcccgtctactttgttagtgaggccctccgggacgccaaaacccgataccctcaggcccagaagatgctttacgctattctgatggcctcgaggaaactgcgccattatttccaggcgcatcgggtcactgtagttacgtcttaccccctcggtcaaatcttgcataatcgagagggtacaggacgggtggtgaaatgggcaatcgaactttctgagttcgatttgcactttgaaccacgccacgctatcaagagccaggccctcgccgattttgtggcagagtggaccccggctcccgagcccgtctcgatccccgaggccagcacggacccctcgcagctgcctcacaccgcccactgggtgatcagttcgacggctccctgtctcttcagggcgccggtgcgggggtcacgttgacctctccgagcggagacgtcctcagatacttggtccgcctcgactttcgagcgaccaataatatggcagaatacgagggactccttgccggactcagagtggcagctggactggggatccgccgcctcctggtgttaggcgactcccagctggtcgttaaccaagtttgtaaggagtaccggtgctctgacccgcagatggacgcctacgtgcgccaagtacggcgtatggagcgccattttgacgggattgagcttcggcatgtgcccagacgggataacatgattgccgacgaactctcacggctcgcgtcctcgcgagcccagaccccaccgggcgcctttgaagaaaggcttgcccagccgtcggcgcgacccgaccccttaggggagacggatgcgcctgaccggcccccgaggcccgtcggagtccaggcctcgggacccgaggggagtgctcccaattcccttagattgattgcttggatcgccgagatccaagcatacctcacagataagactctacccgaggaccgcgaagggagtgaacgcgtccatcgcatttccaaacgctacgtgctggtagaagggaccctctatcggcgcgcggctaatggaatcctcctgaagtgcatttctcgggaacaaggtgttgtgcttcttgccgatatccatgaaggcgaatgcggagcccactccgcctcgcgcaccttggttggta

SEQ ID NO: 581 - DNA, 3529 bp, Oryza sativa
  unsure (1)..(3529): unsure at all n locations
ctcggccagttcggcgctcgtcgctctgtatgcgatgtgtcggaaggagagctcgccgccgccgagctcgccgtcgacggctgcctcctctccgcctttccctccgccgccatgacgctgccggcgcccgtaagtaagcatgcactgacgatttgttcaccaccaggagcgtcagcgtttgctcgccggagaagaagctggtggtgccggagagcgtgtgcgggcggccgttggggctgcagttccaccacgcctctggcgacctgtacgtggccgacgcgtatctgggcctcctgagggtgccggcgcgcggcgggctggccaaggtggtgacgacggaggccatcgatgtgccgttcaacttcctcaaccggaaagtattttactagctaatttactagtccatttattctaacatcgtggacgcacacacttattcttacacagattttgcactacacgattgcacacaacaagagcaaacacacgcaggctttgcggcaccacacaaaagaaccttttctgttcttcctcaacggcttcgacgtcgaccagaggaccggcgacgtctacttgaccgatagcagcagcacgtaccggagaaggtaccccaaattaaatcaatcggtcatgttcatactacacagtgtgcatgcatcatgcagttaatcgtgtgccatgctcgccctccgccgccgcgctcaccctccgcttctttgcctgccgccgcgctcgcgcccgccgccgctccgctgccgcgatcgccctacgctgcgccacccacatccgcacgctaagagaaagaaagaagagagagaagagaagagaaggagaagaaaagagaagaaaaaaaaagtgcggctgacatgtaggccccacatacttttaaaaaaaattgctgactaggatgccacgtcagcgaaaccactcatatatactgctataggaccttgagtgaacggttttagtaatttaggggtaaacatttctgattttgtggttaagggatctcaaataatctcgctgttaagttgaggaacctccggtgaacttactcctttcgtcctacatgcatcccttgtacgaccaattggcgttttcaagtaggcccgttaaggcccacattttcatactagccatattaagcccattttgttcacgtaacgccgtaacttttggtaagtacacttcaggtcccttaatttgtcgccgagtctgaaatacgttcctaaatcaaaatataggtcactcaatttataaaaccggatcacccgaggtccattaattggagcgaactgatattttaactagtcaccttaaaaatggttcaaccggtttcttatatgccaagaaaagtttaccattttttttatgtgccactaaattaaccatttcagaaaagatatatatatctttaaggggattttgagtttccaaatatagctgttagcctgtcagataaacacatccactgaactttttttgaaataaaaaagaaggattgcattctaccaactccaaagtgtgcgagtccaataatcatatatagtcttcctaacgctgcagctgcacgaggacaacatggccactcactttataaattcagccacatgtaatataatatagcggtactagctgggaagtgggaaaacagtgattaaattgaaactatagcctagctcgatgcatccacttgactaatagagtatcgatcgtttatgggactttgaagcgttcaaacgccaagcacaaggtctcggcgcacgcgctacctatcatataacaacaacaagtggatgttagggtatgcatgcatgtttggttactagtcatactttatcaataaatattgatacacttatctaatttgaggtgatcaaattcttagccataatttaataagcctaaaaaaatcttaccacactttttcaagttaataacatatggacctaatttataggaagaaaatattgccacaatagtggctacaaccaaacagccatcaatgtgatcaaacctgcctaagcgtagcaaattacgacaaagtatgattggcaaccaaacaccccggtagtacatatatacaatcttatgcatcgcgtgcgtggcgttaganaactactctccccagccgttttataataaatattgcaagccattttaacttttaactacggagtagttgtttgagaagttttctgtttttaattaagctgttattttataagttgtaattttcgacccacaacatctgtaataatttctacttcccccatttcacaatataagtcattttagcatttcccacattcatattaatgttaatgaatctagatatgtaacatcaatatgaatatgagaaatgttagaatgacttacattgtgaaatatctagattcattaacatcaatatgaatgtgaaaaatgctagaatgacttacattgtgaaacggagggagtagtaatcttatactctctccatccctaaatatttgacgccgttgacttttttaagcatgtttgaccgttcatcttatttaaaaccatatgtacatataatagtatatttaacaatgaatcaaatgataagaaaagaattaataattatttaaataagatgaatggttaaatatgtttaaaaaagttaacggctttaaatattcagagacggaggaagtataagctatgtaattgtccacacctagtaccaacatatgcgtctgcctcacaagggttaaagaaaacaagatctttttcctgatggatccaccaccgtacctgtaattcatcagccctcgataaggtcgactcacgcgcgcacagtacacgtacgacaagatgcatgaagagttgttggcgacgatcgacgagatgcacgttgaggttcagggaacgatggtgtatcaattaaagttggcaactgatcgaccggacgaagcggccaacaagtatcatgtgggggttcatcgcacgccgcatgatcgacacatgcatgcatgcatgccccacgtgatatattgtacatcgatcggtgtcatcatgaatctcgatgtggtatacacgcacgcaccagtccaaataagtactcctatctaaagtactagtagtactacaattatctaaagtagcacgtacataaagaacttaaaagcagcaagtatattattttcttaatgggttcttaatagtagaatttattccgggcatttgctttaaaaaactacagttagatcgagcattgcggcttataaaataacaacttaattaaaaacaagaaaactacttgaataccaagaaaaacaacttccatccatagttagagagaggggggttgttgttgttaaaaatagacaagaggaggtaggatgcatgggatcttttgggagatgttttggggttcttgttaattcggatagcacatatccataagtaggttgtctatccgttgggagcagacacatttaaaaatgggtggccttcgaagcacatgtggtttaaaacttacgaggatattaaactacttaccact

SEQ ID NO: 582 - DNA, 7600 bp, Oryza sativa
gagatgtgtgtttctcgcgctgattcaataataacttttttttctcatgagaaattccgttgtgatttctcacctagtatctcatgaagtgcacttttcatctagatgttgtagcagctttaatatgtgcacttcactggaatcaaataatgtcattaacctaggcccaaaggtaaagcaacaaaatttgagcacagatctagtgttaagtaaaacaacagttaaaaactgcaggtgctagagcagtgttgaactgtagagacccaacttgatgtatgcttgctcaatggtgcatttctcatgttttgactaaactacacaaaaggacattcataaggccaaggaagcagattcattaactaaagcaaacataccagagcattggccacatccattgcaatctgtagtctagactgccagcttaatgcctttcttccagatgctgtagcaattcaaattggacaacttaacagcaattaaaaaatataaattatatgtacagaagattcaagatatacaaagcaatcatacagtgtaggtgatcctttaggcttccgtttgccatgtactcatagacaagaaacctgacaagtacatatataatatgaccacagtgtaaaatctgtacttctgtagtacaataggacaaaaagataccagcgtacctttctttcctttcgatacagaagcccttgagggttacaagatggcgatgatgcaacctagctaaaagctccatttctcggcagaattcttcctcagcttgtcttgataccttgtccatcctttttacggcagctatagatccatcactaaattgagctttgtagactgttccaaaacctccctttccaataactgtgctgaaattgttcgttgctttcattgtctctttgtaactgtacctttggaacattggtgattgacctgaaaagaaggtaacactttggtttcgataagagacaacagaatgatgaggtgatcggtttagtttttattactgccatgctaaagcccaaagctatacttgttgatgcacaacattataactcataaatagcagactttcttttagattttttttcacataacaggtttgacgcaggaatgcataaagcagttgataaacactgatattagaacatcttatgcgcgcatcaacattgggcataacaacgtagcgtaacaacctaagcaagtttcaggcagacatcacactatctgattaccatgatttactgaccataaacaagctaagaccaaattccacctttttactagcttaaagcatttttagtaatgtgaaatatggtgttagatatagattagttgaatagaatcaagtgcacaaaccttctggacatctccaggattgactctgacagaatgcattttctgggttctgagcatgaaggtctgcatttttcaattccctgttctttctacgaatcaatatgactaagacaagttggagcagaacagcaagcaatataaccgctatccctatcccaggtatcactgtaatccggtaaggctggtgatgtttctgcagaacagttttggtctttggagctggagcatcaacaggggttgtcacatttggagaagaagctggagtcgatgtaacagatgatggccctggtaaattccccaagttagagagtggtcatctttaaacttaatcagaatgcatcagtagtaagttagtaatacctggaaaaattgtgatcccttgtacaccgaagaagcacttgacaatgtcgtcgtaagagaaaatgccctgttgagttgcaagcgtgacaaaaaccgcgttccgacagacgctaagaccaacgttatcatccgagccaatgaggcgatgcaagaaacaatgccgtaattcaagcaggtcttgcaagtgatatccaaggatagaggacccctgcagcttccaacaacgtcattgaaatttggggattgcaacatttcaaggacggtgtcgcgtccggcacactgatatgagacccttatcttgggtcccagcccgcagaagacatcagcatcggtggggattccccgtagcttgaatgtctcggatacagagctaagacatatctcagagaaggccggagggacacccagcctgccggtggcattggcgtagcgagccatggaaatggcgacgaatgcattgatgtatcggcagcatgccgcccgctgcgtgggatcagagcacgcggctgaagctaatgtgaagttggcccaactaaaatccaaagggcaatctgcagagaaacgcggtggatttagtagagagaaaagtagtgctagtaattgggaagcaacagaaaatgggtaagcgtctgatgatgtgcattgaatcaagtgagtaggaactcaggtagaagaagaaaacgtgcagttatcaagtgagtagcaattaagcggcatgaaacactgggcattatattcgtactacagaagatggggatggtatatagggttgggaagatcaaatcgggcatgagcagtatcgaaagcaggaaggcaggtagtgattagtacagtaatcagtcgcatggggagcggatcacaaatactgctactctgctagagtaaataaggcaatcgatggatggagaaggtaactgacctccgacggcggttgctgcggggttggcggagaagaagaagggggaggcgagcaggagcaggacgacggagacgaggccgccgcggaggaggggcatttggctggatggcggcgcggagtgtggagctcagctcagtgttgaaggagagagagtgaaggagggttttggctgcgccggccgaggttttcttcttcttgttttttttttttcctgaatctctccctctcttctcttgggtgtggtacaggtactacggtggtgacaaggaaggatttgcttttggggctctgcgcttttatgtgggtgtctccccgtgacaatccctatcttttgctaccacctgctcccaacacccaattgaaggcatgtgccacgctgaggattgaccaaagtttgttggaaacctactagtaataagtttgcctccaaaatttgttgaatttaagtagggtttgtcctgaactttggtgcaggctaaacaagacgggccggtatttgggccatggcaaacagtagaggcgagaaagtggagtccagcagagacagcgggtgggggcagcaggcaggcagccattctggcacaccaccccccactcagcgcagtccagtatcacatgcattgcattgcagccacctaatttagctgccagtgccactaacaatctctcgctcgctgccttggcttgattaattaagaccgctgtaataatgtacaccgacttattaccccacgcattagtgtgtgtaatagtagtatgccatcgtcccgtacaagcagtacgtacgtacaacaacggatcggagctagctagaggtagaagaagaaatccgatcccaacaaccgggcggccgtgtctatttctagtacgtgtgctccccggcttccccgcgactttgtcacagttttcaaccaacgatattatctgtgtgtgtgtgcgccgcgcgggcatgcaccaacgcgcgcaacggatgaaccatccgcctgcatcgatcttcctgcgatggccgccgcgtcgacgttccctctggctctgctgctcgccattgttgccgcatgctgcgtcgccgggggcgagggcggcgcgctggtgggcgacacgtgcacggcgtcgtcggcgtcgagctgcggggcggggatgcggtgcgccacctgctcaccgctgcccgggatgggaccacccgtgtgctcgcggacaacgccccttgaccccaaggcgcacgtacgtacacatcactcctctatcatttcgcaatgcagcaaccaaattcctcctcaatccattgatgcattgcaggggacggacctcgcgttcaaccggtacacatggctcacgacgcacaactccttcgccatcgttggctcgccgtcgcgcaccggcacgcccatcatcgcgccgcccaaccaggaggacaccgtcaccgcgcagctcaaggtctacatctctctctctctctcgccaataaataaataaatattcgaaattataccattctttcttcaccgattttacaaagcatatatatacacgcttataaacgattggtacaagtatattactccattgtcgtatagtgaggtatccatctatatccatctgtgcctgcatactggggtactgcacacggggctctgctactgtatcatagcctgctgtcttttgtgctcgtcgcacataatcgtcggtgcactttatcctctagagagaggtgtcatgtagtatatattctctctctacacaacaaacaaatcagaatcattcaccacaacgcaacgcaacgcatcacggtgtccgtttgctcggtacacatcaaaaggaggcaaaagtaaaaggctgatgctttggtctcaaggtacatttggccacgccacaccgcaccttttgtcaacgtgcatgcgcacccattccccaccaagcccaaattctaccgtttgctgcttacagtttaatttgcatactgtacacaaattgtcgattattgtactttctggtcactcagtgcaagtgatgccagcaagatagattaggcggcttgtctagtttcttagaaagaactacgactatatgataaacagcagttcattcaaccctgtattatctttggccgaaaactatagcatttctgtcaaaaacgagttttggtccgtccaggattaaccatttaagtggtatttatcgatttaactatttaatgtcgattgtaatgcaacacttaaaaattagaaaaattaaaacgatactcggtcaattggaaatttccgtcattattttcatccctattgaccagtgtgtggccttgcaatgcatatctgcacagtacagctgaaagatctgctcatcttcattacaaaactgctactattacgatacttgtagtcctagtagtactagctagcttacagaatcctgtttaatcattactattccgtttgataattaacgtcctagtacgtgctagtgcattgcagaatggcgtgaggggcctgatgctcgacgcgtatgacttccagaacgaagtgtggctctgccactcgttcggcgggaaatgctacaacttcgctgcctatgtaagcctgcattgctctgactgactgactgacgatagaaacctatacgattttgttgttgtttatatgtcgtggattgatcacagcaacgcgcgatggacgtgctaaaggagattggggcgttcctggatgcgaacccatcggaggtgataacggtgttcgtggaggactacgctggtccggggagcctgggcaaagtggtgggcgggtcagggctgagcaagtacctgttcccgcctgccaagatgcccaagggcggaggcgactggcctctgctcaaggacatgatcgcccagaaccaccgcctgctcatgttcacgtccaagaggggcaaggacggcagcgacgggttggcgtacgagtgggactacgtcctggaaacccagtgtacgtaaaagcacactgttgcttaattggtcgtcgtctgcatcgtgatgtctcctgatgttattgatcgatggtacatcacatgcagatgggaacgatgggctggtgggcgggtcgtgcccgaagcgagcggagtcgatggcgatggactccaccaagcagtcgctgatcctgatgaacttcttcagcaccaacccgagccagagctgggcctgcggcaacaactccgcgccgctcgtcgccaagctcaaggcctgctacgacgcctccgccaagcgctggcccaacttcatcgccgtcgattactacatggtccgctcccataatcattctgcctctgtttctgactaactgactgacgacccatccacgtgcagaggagtaagggcggtggagctccgttggcgaccgacgtggccaacggccgccagcaatgcggctgcgacagcatagcatactgcaaggttcttataatatccatcctttgtctccatcggttttctttctcaacccatatttatatatgttgtatacgcagcctgggtcagcgttcgggagctgcagtttgtcatcgcctcctgcagcgccaccaaagatggctgctgcttcaccgccggcagcggctccagcaccagcaccagagatggctcctagttcaccgccggcagaaccaccagagacggcgacggaggctgctggttcagcggtgcgaccggcgtccatcaagttagagaaggacgacacgacgggcacatcgccagcggacaccgccaaatcctcctcctctaatcgctctcctcatccgtccagctgcagcttcctctttggattattattgccatctcttctcctcctccacctttatatttcagattgatcgatgaggcttttatccatctcatcaattcgatggtgctaatatacttttattcatggatggactccatgatccatatgcgcatctcttagctagctagctagtagtagcagcttccacgcaagcgcaatccatccggactcctgctaattaaatgttttgcacaattaactgtacacctagctagctattaccacttaatattagaatctcttgtagtaatggatgcatgcgtgcatgttgacatcaattaatttgtctttgagtctttcgatcttgtttcgttggtactacgttcgtgtcgatccattgggttgttcaaggaaaaaacaacaacttatgctatgcccagtagattagttgtgatcttaataaaagcaacgagctcgaaaagaaattcagaatccttctaccaccgagttaacagagcctgaattgaagcacaccttcctgcagggcgaacggctgcatagccgtctttcaaggacggcccactcaacgcccaacaacttttgcttacggcccaaaaacatttcatgtcacataaggccataaccttgccatctccgcccacataaggcccatatgactggcgtcagtccacttaaggcccaatattttccttcggcccatacatactccaggccgcacactcacagcccataaattctgcatttcgtcctggaataagttcaccggaggtcccttagcttgacagtgagattttttaagatcccttaaccacaaaaccagaaatgtgtacccataaactctcacaaaccgttcatcggaggtccctcgacagtatttttgtctggttttgctgacgtggcatcctagttagcaaaaaaaaataaaaaattaatatgtggggcccacatgtaaatgacacaaaaatgtgagctcaacattcctagtcagcactgatcttctcaatcgcttttttctttggcgcatagggggagcagcagcgacgcgcgtccaaggcaggcagagcggggcgcggtgggcgagcggcggttcgcgagttcggctgcggtgagcgcggcggcgacgggcgaggggcggcggcggtggcgcggcagcagctggtgccggccggagagggcggagatgaggccggcgggagagggggtg

SEQ ID NO: 583 - DNA, 1332 bp, Oryza sativa
cagcccagatataagttcatttttatttcagcttttgcactaatatgtcaccatgttttaattgcacgtttcctcatcgcaggacctcgtctgcttcgagcgcgttcgcaggcacgaccggcgcttccgcgagctccgcaggggcgttcgccacctcttcgggcgcgttcgccagctcttcctctcacggagcgtcgatccctcgcccacacggtactttactttttattactactgttaaatacttgtacgaaactgatggtccttgtccagcaggatttgcagccgggatcttcggtactggggcctcttcgtctcacgccggtaggactggtcctactagccagttctacgacgacgacttgcacggtgcacaccaccacgacgtactaggctcctctcagcttggaggagctccagaggcgcacactcaggagcagccagaggtcacacctgtacaggcaggacgggttggccgtgccgtacccccggaccgactcacgtactcccaggggcacattagggcgcagggtaggagggataggggtaagaggcctcgtcagtagtgttctacctcttcagtccttatgtgaccgtttcttttggcttacaaacttgtaaagcagtactacttttgctattactactgcagtactacttgtgtttgtctcgtctacatagttcttttcattcatatggtgctagaacaacttatgctcacgacaacacactttcggcgcttcacggtagtgtcagatccagtagcgcgcacagtccacaacagcacacatgaaaagcggcagctcgagttatcactatcaactttcggcgctgcctgttgacataaagtgaatcacgcccacgcgtgatcgtcttgtcacatctaatgaataatgtatctcattgagttcacatatattgcagtgaaaacgacgctatataattgacaatctgaaggcaacctcttcatatcttctttcccactagcacaccacacacgaaaatggaagcctattcattggtaatacgtaatctagatttgagattatgtagaacattcttcactacaattttacattttggcagcaaaccaaatatgatcaaatgcaattttaccttaccaaatatttggtagtgccaaaacttgcttatattttgggactaacaaaatatttgtacggtaacaatccaaatataccctaaaaaataataaaattgtattttaccagtcttggagattttaatcttgtatagttttcaatataaaaagatttgatagctattgatatttatacaaaaatatagagcacagtataaaatcgccctccccca

SEQ ID NO: 584 - DNA, 29232 bp, Oryza sativa
taagtaataaatgttgataagcgaattactaacacatattaaacaagagtacaaacaaacaaaagtgtttagtccgaacactcatcacgataacattatgatacaacacgaatagttcgcaatactactagtacaacaatagtcggaggtactcattacaacaacattgaattgaaattacacgatagaagtatttagtccgaacactcattacatcacaacagcattttatttcctaaatcgaaagcattgttacaccatggaatcgcctgctgcgcgacgacgccttggccttgcgcgcctgcttgttgttccttcaccaggtggtcgcctaccatcacttgcctgtccagatggactagcatctgcgccgcttggaacttctgcattcttcgggcatttcttgtaagtatggccgcgcagatcacacttgctgcagcgtaaagtcctcccacctgcttctgactcatccatatcatttctgatgcgtctagtttggcgtcgaccctttttcacccttaacttagatggatctggaatataaaaaacttgggcactcagcgttgtgtaagatcctgagatcccgaacccatatatctcctcactccatgtatgaaagattgcttctttcctgaaataatttgagacgtacacattgggagatatgccacaatcaccggcagcagcaagaacgtgtgagcaaggaaggtgatgaagcttcggcttcatacaactgcaggtacatccaccatccgccttcaagacacattcctgcacggcttgcttgcgatagataccacgcctgctcctatcaacacacattatttcataccgatgcacttgtgtgccttgagcaacaactcgatgtctccgtgcctttttgattttatcttccatgtactttgtcactacgttgccaacactatgttgttatcggccatggacggaccaattttcttgtatcgatccctaaagtacgcttgcgtgccgggaaggatgaattcaacaatagcaaccaatggaagtacccgaactcctcgcattacccagttgtacacctctgccaaattggttgtcattatgccataccgagatccatcggtgtcgaacaatagagaccacttctccttaggctcattctcaatccactgagtgaaatttctgatggacgaccctgacctccttctcattgttggtgggtcatcatgtaatgcaccaagaggtatgggaggctcgtcaccttcaactagtggtctgcgagattgctcatctgtttgcttcgttgtcaactcatccaacttgtcccacaactcattaaatttcttctcttggttctgtgcacagaacctcttaaagagctccataagatgcttgttcttgaattgcttgtagaaatttgcacccatgtgacgcatgcaccaccgactccgaacatcaggccacttagctggaagtcccttctcatcccaaccgttctgcaagtagtcaatagcccacaacatacccgcatgacgatcatgtataaggcaaacgttgggcctcatacgcaccactgcaatgtgcactctctctaggaaccagtaccagctttcagtgttctcactctctacaaatgcaaaagccataggtagaacctggttgttcccataacacccaattgctgtcaatatctgacctcggtatttacctgtcataaaagttccatctatgcatagaacaggtcgacaatgcacaaaagcattgatgcaagcacccaatgagaaaaaggctctttgcagcacactctttgttcgatcatcaaccgatgtaaatgtatgtaggtcataatacgtattattattcctctgggcaatggtggctaacaaacgaggcaaattatcataagaagcttcaaatgtgccatacctcatctcaatgatcttttgtttggctctccaggcctttgcatagcttatggtgtacttgaatttgttctcgatgtgcctaataattgattttggttcaaagccaatgttaccaacaacactgctgtacatctcacttgccacaaaagctgaagtgatgtttcggtgatacttctccaccccttgtaagtagcacttgtgctcggtcacaatgctaactttccaataatcattccatttacccttatatgcatggacacgccacggacaatcttccttcatgcacctcacttcatacacataatttgttgacttgaccaccctaaactctctctgcaaggaaactgcccaatgcttcaccgcctccttcatctcatccttatgagcataccttgcaccctcaattacctcgttctccttatactcccagggtacatgatcaccctctgatataacaagtccagagaagtcctcatttgcccaatcagtggccattacatcaccttcctcatcggatgatgcgtcgtcgtccgcttcctcattatccgaatcttccctctccatttcatcaacaattataccgactctctccccctcatccgccatgcccatagcctgctcctcccttggttgattttcctcattttgcatcgatggtccaacagcatcccctgcattgataggaccctctacatcttcggtttgcattgaaacatttatatctttctcttgtaccgacacaaatataacgaggggccatgaccgttcaaaagccatttccacataccgtctctaagcatcagtgctgtccatcggcattagttcccaaaaataaccttctgttgcacgactcactacaactgacactgacattgtgtagacttcttggtctattctaaatcctctcaacaacaaactataaattgactgaaatgttctctccgcaggcctatcgatgcccttagatgtcattacaaaatctgacagatcaacaccatctggaccaaatctaatatttccttcaccgtgaactatctgaaatgtgaccttacttgacattgtgcctgatgaaaacaataactgcgttaacctcgcatttctgtgctacgccctaagttacattctctacaacattgttctctaaatttctaaaattacgttacattctccagatcaaactaaactacatctgtctcaattcatactattatattctatgctctggatctacacatatgtgctgtgtgctacagatgtgctaaaatatatggaactaaaactaaaacgcaacatatatactcaaacataacatattagtacaaatgcaaaagatgtatgggagcatacatgtgatgaattagcgaaccagcagggcttcgccgctccccttctgctgccctcccctctctctctttcgttttttttggatttttagtgaatataatgaaatttcacagaggaggggctgggctttataggggggaggcaaaaatcgccctcccccagggcggcaagggggccgcctgcaaaattccatgccccatcgccgcccatttgcaggcggccccccccacagtacaaaatcgccctagcggagggtggcaagggggccgcctgcaaaattccatgcccccctcgccgcccatttgcaggcggccccccgcacagtataaaatcgccctagcggagggcggcaagggggccgcctgcaaatttcgttgacggctgtcgcccgagagcgaacggccggctgccacgtcattttcgccgccctctgggagcccagagggcggtaggcgactacttccgtcaattttcaaaatggaaaattatttttgtaaaacttttaataaaaaaaattataaataaaaaaaattcgagaaaagactagtgtgtgtgggctgggctagttagtgtccgggactgcctaaaccgtttattgggcctgtaaggactactcctactaattaaaaataaagttcacttcaaatcccatatcgtgtttcaatcgcaatccctcgaccactgactgaactagcagcagacaccattaatccttgccattgacagcggtgtgggaggacggttgatgcattgcctccactgcctagtaatggaggatgcaagtccatgaaaaaaaaggagatagatgcgcagagggaaggggtgaggaatggtaggaaaccttgatagggtgcatagagggggtgtttggatccagggactaaactttagtctctgtcatatcagatgaatttagagtattaaacatggactacttataaaactaattacataaatgagagctaattcgcgtgacaaattttttaagcctaattaatctgtaattagcgcatgtttactgtcgcatcccataggctaatcatggattaattaggctcaatagattcgtctcgcaaattagtccaggattatagaatgggttttattaatagtctatgtttaatatttataattagtgtctaaacatctgatgtgatagggacttaaaagttttagtcccatttaaacagggtcagattctcctctttaaatcactctcctcactgtcacacacacaagtggaacccagggttcccaacccctctccatcatattccgcgtacacgcttttcaaactattaaatggtgcgttttttataacaagtttttatatgaaagttgcttaaaaatcatattgatccatttttcttaaaaacaattagctactacttaattaatcgggcgctaatgaactgctccgttttcctgcgcccactgttccggatgggaactgccagcagtgaacacggtcagctgatgttggtttccactgaaaataaaaacaagaaaaatcattagtgcacgatcaatctaattttaattattaagagttaaaaattgtatttgatattttaaaagtaacttctatatagtattttccacgaaatgtaccgtttagcattttgaaaaacatgttaacggaaactgagataaattttgtatattaattagaaaataactggttttattgttaaaactccctctggcttaaaataaattaatttttcacgtactcatctcacacataccaatacaaaactaaaactaaaagaattagaatactcctaatttatcaaatcccaatgtaattaattttctctttatctacaattaatgtatttacccttagaaataaatttattctaagataaatggcggaagcttaaaaataaaacttgaagtattttgagacaccgggagcagacgatagtgggtttcctccagtccactcaactcaacagcatctgcacctgcacggctgcacgtacggtacgggcgtgttggagtaaaggaaggctgtatggttggctcgaaacaccacaactccctccctttgctgccgtctccaagttgtagccatttgctttatttgctctgctctgatcggctgctccaacaacaaaattcaaccactcgactgtcatgcttttttggtcccaaagagcatgggcaaaaataccattctcctgtgtacaaacagcacctgagccaaagccttgagaagacatactagtttcagggcttgtttgattttgaatgttgatgactaacgttgccacaactaggattgctaatggtatggcttaccacatgaagtgtgactaaccatcattggtcacaaggagggtagcaaagctggacaccagatcaagtgtatgacatgtgggacagcccctagtagttaacggacgggatcatgcatgccttggcaatgaattttcatactgccactcgatcagtcattaagctcatcgatcgagcccaagaattaacaataagcccactgctagctctagtatgcaataatgtactcctccttcagtagaagaaactaacaaacatctatctgattgtacaaattgattgatacgctgatcactagtcaataccgatcgatcgatcagatagtacaataatcagacattaacgatgaattaattaattataaatgggatcatcatcatcatcgatcgatcgattgattacatgcaattaacgaagagtgaaggaaatgatgctagctaagattattattattggttaatgatcactaatcgatcaggccctgtagacgacgacaaagcaagggagaatggctgtggggttgaagacgtccagctcgtccaggttggagtacagccccggcgtcgtcccggccaccgagtcgtactcctcctcctcttcctccgccgccgccgccgccgcctcctccctcctcacccggccggcgatcacccggcacaccagcatcgcccggcggtcgccctccgacccggacgagacgacggcgtcgtgggcgcggccgctggtggccatggtgcggatgccggcccccggcgcgggcggcctgaagccgtggcggatgatggcgcaggcggcgcaggagaggtggtcgcagaggtgggtggcgccgtggaggccgaggtcgcaggagagggtggcgcagtggaagcggaggagctcgttgccgtcggcggtgcagcgagggtggcggtgggccattgctttggccttgacggcggcgcggtagtcgtcgaagcgggcgagggtgcgggcggcgttgtggaccttgaggatgcggtcgatggcgcacacggggctctgcttcttcagccagctcgactggaatattatcgatattatgttcctgctcgtgtcctccgcccccagctccgacactgcagtgcacgcattccattcattcattcatttttcacattatagtgaattattttgttgcagcagcagctaaattaagcctaacctaattatacattttgctcatcatgcatgcacactccaacaacaatatactgctagtggtagtggctagtgcattcttcattcattctgttctggtcaaaatgaatgtactagtagcagtgtccttgtacagtactactacgagtatatgggtggctactttgcacttgagatttgacagcctgaaactagtatatgtgatgatggtgtggtgtgtgccatgatgaaaggaaccatgcaatcaatcttctccacccgcctgagcctgtactacactcaagttaatatgctgtctatagctacagagatgattgagagcgtgaaaagcagctcctagtacaaggaataaagctccatctcactttcagcaccgaccaacattacaattaacctcattcaatctgaccgcccagtacaacagggccaccacagctacttttatagctaagcacgagtaattttcaaggatatatactcgctcatctcatcacgatatctcatgatgtgatgatggtcaggaaataagactgtacatacatattgtaatgtataccaccaacttaccaagtgtggagtattactctagtacagataacataaagaatgcagcttagtagtctaattagctatgccaaaaaaaaaaacagggagctgatggagggagaaaattaattaattgaagaagggaacgatcgaacaatatgcaactacgcaagcaaattagctggtaattagtaagattaatgatacttcagtaattgaagtggagataataacctgcatgcctgatggactggtggaggtggagggagtcgggcctgacgaagatctcgccgcagtcggggcaggagcagatggtggccctcatggaggagctgtcccggaagacgccgctgatgggatccaccaccatgtggcactcgtagcaccccgacagccgcctcaggctcaactgctgcatcccccggaacgaccccccaccacccgccgtcgacgaacacgacgacgccgatatcgacgccgacgactgcaagctgctgctcgcctcctgctgctgctgcttcactgacttcttcaccgaccgctcgctgctgatgttgcacgcgctcaccgaagctctgcgcttgcagtacggctcggcgaccggcggcttgtccttcaccttgagctctcctccgccctgcgcatgtgctgctgcatcgggttgtcttgcttgaccttgcagatggaggcggaattgcagccgagcttcttgccgtcggcggcgcggtggtggtggtggccggcgtggctgctgctgctgctgtttctgcacgagaagaggctcctgagagctaacctgtaggaagggctctccggctctgtgcactgctgatgacggctctccaccttgcagcactcgtctctgccgctgcttctactgcacttgtaatccacctgcttcttgtctttctcatccaccttcctgcttgctaccaccagcttcttcttcttcttcttcttcttcttcatgacagcggcgtctgagcctgcagagcttgaggctgaggcggtgaccttcgtctcccgcgctctccccggttccaccattgctatcctttttgctagctcgtggagtgaatgatgctgcttcttagcttgttgcttccttatctaaagaggaggtctcggctcggctctgttgcttgctttttgctagatgctcttgccatgcatgctgctgaaatgtctttggaggatgcaaaggaaaagctctccgaattaagatagatggaggtaaatggctgcctgcctaattagttggttttgtacgtcaggttaactagaggagtataagagtgagcagtaatgatgttttggacatgcacacctctctcatgtcaggggactagcatcaaatcagatcatgcatatgttaaaataatcttgtttaagaactccatccctctcatccgtctcaaaatataaaagattttagatatcagatttatatttttaagatgtgtcatattcctctaaaatctcttatattataggacaaaggaattagtgagtactccctccatcccaaaatgtattaatctataatgaattggtatgcatactaatactaaatttaatagatctcttatccagatttacattagtagaataagtttcatccagattattatattttaggatagaggtagtatattttatctacctatctgcagttggaacaacactaggagacggatttttatcccttgaggaggtatctcctttatttctcgcatgtcacctaaatagatagaaaaaattaacatcatatattaatatgaaatatgtcactccacaaatatacgggactaaattcaacttctatatgttgcaatcgaaaggacaaattaaagtgaaaatggttaacgtacatcgacaattattgtagaagttgaaagcagtgatatatttcatattattttatcttattatttttaaaattcttttgatgacatgcaagaaataagcgactatccactccaggaatgaaaacactctccccacctaataacgtgctgatacgatattagctgacatttgttcgctatacagtcagtggcttcttgtctccaaagcagctgctgtctctttttcactccttcctacttattggataatgattggttacgttgagccatgttgttgttaagggctaactagaacatgatgaaagaacaaaagcatagcaaatattcttgcgtgcagagtagctgcgctcatgcatgttgtttgctcaactgatcgaatacagcctcgatatacgaacctagctcaagaagctggatcatatttgatactactagaaatcaaaggtggtagagtgctgacagttttaagtttgggatttatcatttatgtagagaagatgctttttgtctctgcatgcttgcaagggtcaagtgtgttaagttctattgtgtgtttgtatgtaagttgccgacaaactgaaggcgggtcaagcaggccgatggtaaaaaaacgacaggacagcgacgccacaccacacgacgacacggcttggacggggatccatcggagcagcataaacacagagacatacgcatatgctcacgctttggatgttgctggagcagagtactactactccactccatttgtgcagttcaggtgcagagctagtggccatggcagcggcagttgcagcatgatgtctatggatctgcatgctggaaagaaaagaaaaaaaaaaggagcaacacaagcctagaaagagagagagagagagagagagagagagagagagtgatgttggttttggtgattttcgattaaaaggacagggcagctgggcagggagggggagagggagcattgttgctgcattgcaattgcattgcattgcattgcattggggtccgtagaaagaaaaggctggctggcaaggcatggcatgggggcctgggagatgcccatgctggtgctggctgcagcaaccgcaagctgcctatagcagcagaagggaggcacttactacagtaactagtgtgatttactactccactaccactagacactatagcggccggcacggctgcagatgagatgaggcatcaacatcaacccggatgcacggtccgcctgttggaaaggaaataaagaataaagacgaccaaactttttttaaaaaaaagaagaagcatgagctacatgaagctagtagtaacatacagtacatatctgggactgagctgtgggtgtggttgctgcatttcttcatacaagaatacaatgcatgcttccgtagttccgttgatactttatgcgtcactcacacgtctgtgagcctcatcgctcatcgtttgtcctatggcttataagccaaaactaaaatttaaattttaaaacttaattttgaatttaaatttgattctttttcaacatagttttttttaactttagcttttcaatcactaagaacatatacatacaagatttttattcacatatcattttttaatcactaataaaccattatgacttataataaaactagaccaaccgatgaagatctgtctttatatctcgagttaacagtagagttggatatagtgctttctcacagacacacaaaaaaagcatacatagataagacgccgaggcggttacgagggtatgggggtgtttacaaaaacagaaactgagtagtctcctaacggaggggaaaagaaagataagctaggctatgtgcctaatagtccctcgaaggattggcaatcgcctccacccatccaccaattaccttccttcttgtacgatctgtgtcaccaccatcggcacatgtgacagaactccgcgggcattcctttccttctacaagtggcaggtaatcagaatgacaatggagtcgaaacccttcctatcatgcttgtgcaggagacgctgcgaggtttgccagcaatcttggatcattgcgtggtggtttggcgagagattagcgagtccgatcaaggatagcaggttgcaccatcacttgttcaacgaagacgcggtggacgataatatggttcacgctcagaaggggcacatggagtggctgtccattctcttgtcgagcaatcgatcgattggcctcgttgcagcgccaaccaaagaaaaatctttcatttggtcagcctgctgctgcatcaaaaggtttttggcataggagaatgaatggagctaggccaaggaagaaggtttaatttgtaggtcgactgatcgagctgaatatatatgcaccgccggtccagcgccaagcgaactcatcttaattcggtgttgtgaactcgatccaatatccgcgggaattgcgcgatcggactcgatagtgagcgcaccggtgatgtcctgaataatctacgttgatggctgaaccggccgggctccagggacaccatgcatgcatttaaccagtacacaagaaagaggaagtgcgaagacgaatataatcacgatctagtactcccgccagcacgggctgaaaccgatcgagatgatccagcacatccaagatcatcgagaaagggataaccaaccgtgtcaaacgccttggcatgcaattaatatccgacttgaggcgtagtcgcaactgccaacggcagtggacacctgcatgcatatagctagcgaaagtactcccttgatgaagacgctgtggttggccgccacgatcacgtcgagcctcggattgcatatagtattactcctaggcctagccgggattttcacttcacttgcttcatgcatgcatgggctttatgcttctcctttttctttgttctccttgcattggggaagtttccctctactgtgcctcactgttcccaattcctgcctttcacttgccatcccaatattcccaatatatatattccataggtagcctacctagctagcttgcatcagaggctcttcttcctcagccctttgagatgagaaagggataaaaaccaaccggatacaagcctgccttcaccttaatggttaatggttacctattaacccggttcaaggtaaactcaatggtggtggcattcaaccccttattatttattttggccaggaacaccttccaaagatgctgcctgcctctcctctgctgctcttaaaagaaacaaaagcataactcgattaaccaacaatgctatatacttgtactccataattaagcttttttcaggttcaatcatgcatgcatgtcgccatgcatcctcaaactaattaaccgatttcaagaatatatatatccttccctccagccgagacggacgtacgctagctaacatgcatcaccacgcaatcagtgcatccgaatcagctaatcttaacccttgtcgtcattagctagtcaacaaggatgaacagagacaaccatctcagtgcaatgataataggcagctcgtgttcgtaaaggagtactctctccgtccaaaaaaaatctaattctagatttgtatctagacataatggattaggtttttttaggacggaggaagtaataactagtactctttatctggagtactactcctattgtaaactctgaagttcaagacgacgagcgagagtgacgcgcggagatggagaaataattccagtccagtccatgcatctcgatccccatcatcactccatgtggggctggtcatgatcatatatggcttaggcaaacagatttcaacttttttctttaaacttctaactttttcgtcacattaaacttttctacaccacaaacctccaactttttcgtcacgtcgtttcaatttcttcaaacttctaattttagcgtgaaactaaacacagcctaagctagcatggatgggaaaagaaagatgcaatgcactcgaatataaacgcaatgcatgtggcatgttctcatgctctagctgccatgccatgttctatcgatgctagctagctccggcctcagctccttgctcgatctggtctcttgtttgatagtactactcactactcactatgcttgtacctggtcaagtgtgtttgaggctttgagctaggcgtatctgtcctcaggatctcctactgagacctgaggtcatgaacctgcttttgctgagctaacgtatactccctccatttcaaaatatttgacactgttaactttttagcacatattttaacattcgtcttattaaaagaatttgtgaaatatgtaaaactatatgtgtacatgaaagtatatttaacaatgaatcaaatgatatgaaaaaaataaataattacttaatttttttaataagacgaatagtcaaacacgtactaaaaagttaacggtgtcaaacattttgaaatagagggagtatatcctttcactgatatctcactctcatcaatagatcttgcaccatgaacccatactccatcattattatcgttcttgcacacgtgagctatttttgttggcacaattaactaatgttctctatcaatctgattactatttttttgccaccttatctactactacctccatcctatattaattgtggctttgaatttttgtttgtaatgtttgatcattcgtcttatttaaaaaaaattagaattattttttttggcttgctttattatcaaaaatattttaagtatgacttatccctttttatatttacactaatttttcaaataaaatgaatggtcaaataatacaagcaaaaagtgaaagcgaatttattataggacggaggtagtataacacattaacttgtgcacgaggatcatagcaaacacttactccctccgtatcaatttctgggattcaaattttacgtacaccataatataaggatttctgggttgattctcactaatcccatcatttcaatgattccaaagctaatcaaatgtctagaaaggaaatcttaccaatttaaaatacaaaaaataacaactatagtgactaaaaggggatcttttgagctaacctcattatttactaaacaacctgaaaatccatatattttgtaacaaagggagtaaaaatctaaaaatccatatattttggactgtcggatccgtgccaagattcgtataggcctccttttcctctagcttcggtgagacggcgacaaccccgatcagtaagggttttgggttgtggtcagggtgggtagggggagggaggtttccctgaggtttagaggaaaggcagtgggcggtggactcaggtgagtggcgagtcggtggtggtgccgctggagttgcaaggatggggatggtgaagccgccaaggcttccaactctctaatgctctcttctcttctcttcttcctcctctatgtgtttgtgtgtgtcaatggtggagagggtgcccaagtgcagttggtgctgctggtagggtcagctcatccgggcgagctgttgtgtggtgcgtggctgctctatacgtcaaccgtgctaggacgccgccttcatcacaggcaactcgggaagctgtcgttgtttatgttcggttagaggtagctggagttgaaagagaagatgtggagagaggatcccaatgcaaattttgtcccgaattatattctagcgtgtagccagaagtcaatagtgtcaatttatcgaatccctttgcgaagtggcatttagacaaagcccactttttaacactggcgttaatccaaatttctcaaggagggggaggggaaggaaaatgataagattgatgtgcgcttgaatcgtaacacaaatctagcggtccaaaattcatatgatgtggggtgtgattcactactagaaaaagcattttttttccgacgtgggggtctttttttcgcaggcggacatgacccttggagccaaacgaccgcctacaaaaatataaatcagggtgaagtttgctgcggaccacttaaacggcgtctacaaaaatgattttcacaggcagaccacttaagcgacgcaacgcaccttatgtggtccacctgcaaaagccatacctacccaaaaagaaaattttaatcttcccttatcttctcctcccacccctccccaccactcatttcctttcaactctctctctctctccctcaacactcaacctcagcccgtccccctccctccccgccgaagggggagcgacgacggtgcggggcagcggcggctcccctcccccctccctcgcagatctggtcggaggagggaggggggaggccgacgggggcggcggcgaggcgtgtcccgcgatttttttttgtgtgcatttattggattttcacaggcgggctgttaccccgactactgtaggtggttgtcccccacgtctggaaaaattacttttggccacctgcaaaaatactttttctagtagtgattttctgccatatgttgtgtagacaatctccttatatatttattttgtgtgggtgttgtgggcctttgggggctactgctcgatcgacgatcattggaagcaacagtagatcgcacgccaattgatagacttggctaatataatgcctctaagtacattctcaatcgatcgacctgcaacatgcatgaacgatagccccaagtcagaaatgcaagtacatgtctttgctcaaatctgagactacctatttaattagtcatcaatctaaggatcgtttaggaaatataccattgaaagtaattagggggttattcgatcgcaagaacacggacgacttcgttcatggcagggatggaaaaaaaatcgagaaccgcagaccgaaccgagccgactggactggcggtttcttcggtcttgagcttcggcgtcactttttaggaaaaagtataccgaaggtccctcaacttgtcatcgagttacaaaatcgttccccaactgcaaaaccagatatccggcatctcttaactaatcaaaaccgatcacaataggtcatttggtggttttgaccccggttttattctacatggcggctgagtcagcgtgggacccttgtgagccccacatgtgctacaactccctccgtttcaggttataagactttctagcattgcccacattcatatatatgttaatgaatctaggcacatatacatgtctagattcattatcatatatatggatatggacaatgctagaaaattttataatatgaaacggaggaagtagcaatgaatgatgggcttggcatatctgggctctcggctctcgtgcggcagccgccctcctcctctcccgcctcgccccagaggcctcctccctagccgccggccggcttgcccagaggagaggggaggagaggaaagaagagaagagagagaaaggagaaggaagggggatatgacatggcacccgacatgtggggcccacgtgggtctcacgctgactcaggcgccacgtaggataaaaccgggttcaaaaccactaaaggatctattgagaccgattttgattagttaaagaacgctcgatatttagttttacggttggaggacaattttgtaactcggtgtactttttcccagtttttatatcggtttttgatcgcctcttggctgcgtgtgctgggccggtgctatttcgctgggccgtaagcagaccgaattaacgtcgccgtcgtgagcaaaacattctaatattaaattagtatagtataatatacttccttcgtagtagtatcagaataaaacaacatagaataggagtacaaaataacctttggactcggagaaatggatcatatcatatcatgattcatgaggggtgcgtactgttgtctccattggactggcccgcagggtacatatatatgattgagaaaaaaacagaggaaaaggcacatccacttatgctactactgttgtctctctctactgaatgatatacgtatatatatacagtagtactgtattcacatgtgaatgaacaaatctcatgcgtgtgatgtgatgaaacgtacaagcaagcaccagctgtagcgcgcgcgtaccgtttgcttctcagatggatcgtccaggcaagaagactagagtactagcatatatgtcaggttggttttctcatccatgccaataatcaattaattaattagagcgaaaactgcaaagccagaaaagtgaagagcagcgcagaaatgacactaggccaagatcgggtggaggcgctgcagataaggcgattgttgtggtacgtgcacacaggtcgcttcctgaagatgattaatcgagcttaattaattagcaagaggagaaatactttggatggatgaaagaaagaaaggagatggaaacctggtggagcagaaggtgatggtgtagtcggcgttggagctggtgggatcgtcgtaggcgctgtaggcggtggggcaggcggccttgaacttcttggagtagaaggtgggctggcacgtcgacgggttgccgtacatccccctgcagcagtactggtcggtgtcgaagacgtcgcaggcgctccggcacgccaccgtcctcccgttcaccttcttcgacagctccgacgggcagctgtcccgcaggtcgccgtcgcacccggccaccgagcagttgccctccccgttgagagggcgcaccaccatggggaggttgaagccgtccacgaggctgacgtcgtagaagtccttggtggcgagggtgaactcggcgagcgtggccggggtggcgccggagccgccgcacttgagctccgacccgcaggaccccgtggcgcaggagccgttgcccgcctggtcgaagtcgcactccgtccgaccccagatgcgccccgaccaccccaccggcgccgtgaacaccatcgattgccccggcttcagcgcgaaccctccgccgccgaagctctcgccgggcgtcaccgccggccagaccatcgtcttgcactggttgatgatggtgaacacgcgggccgactcacaatgcctcacaaagcagcagcacaggagggccacagccaaccacacaacaccacctcttgccattcttactttattaggtaccaattggatcgatcgatcgatcaaattacagctcctagcttgattgtacgtaggatcggagcatgcatcaacacctgtctgtatgtgattgtatatataacctgccagaatgaagaagattgattgaggcatgcaacaaggaatacgtgcgacaacacattaggcatggccatagcagcaagcaagcaagcaatcatgcaaatcatcttgcttgcagtgcaggagaggcctggaacccctcgctcttccctccattcgcggttaactcatcgcatatttggacatccgtacattccagccggagttgaagctgaatgacaactttaagtggtgtttgtatcatggactaaacctatcacataggatgtttggacgttaatttgtaatattaaatatagactaattacaaaactaattacataaattagagctaattcgtgagataaattttttaagcctaattaatctataattagtacatatttactttagcatcacatacgctaatcatggattaatcactactacaaaatcgttttttcttgacaccacctttttttttctctagcggttatacgtgccagcaaaaatattacggtgggtgaggggctacggaccgccagcaaaaatagattttcgtgggtgaccgagttaagagggccgctagcaaaagtctactttgactccctccaatatatgtacaatttgatttgattcgtttccatctatctattaacttattaaagtaataaaaaaggagcctacatgttcactctcacggcctagaaattatcatattaatcgggaaaaaaaaacatagtcaatataataatacaatttactcccttctctttactctcttgttctgtaatgacacttattcctgtttctagtaatggaaatgggggcagcaagtgccctagttttttttaaaaaaatataaaaatataatttagaaatagctaaaattcggaataaaaaataaaggcaaaataaaaatgtctattttgcctccctctagtctgctttatatcctcacgcaaaactcggtatatcgattctctaatctaccaaaaccggttgttttgcaaaacggtttgtttgtaaggtggtttctgtcctaggtgacacccacaagacacataaacaaacacgttgacttacccttcgtctaatgtagcgtctacatggcgcttaaatattattagtcattcaaaaataaaaaaaataaaagctaagaacccacatgtcagagtcatttctccctcccttcgacaatctcgggccactcgatgcctcctcgggctcccgatacgcagtccacaggaaggaaatgatcaccatgtaaagataaatgaatttcatgcgcaccacaaccaacacgaaaacagaattatctactgtgcaggtaagatcttaaataaaaaacgaagcgacacaactcgaggcagcccttgtatactggagtaactactgtaatgggtaagcaggttatatattgcgctagtttgcttcaaccgggaacatcaaactactaggcggaacgtacacaaattgtctagtcatatacaggctggataaagagtatatattacatatagcgaatgaccaaatttgctgcaagtaggtaccactgtgaacattacacacctgagcagctggctaactgagaactattcaatattatcgcaattaagaagggaccaagcaacagttatttctacctcacagaagcctaatttgcatgtagcacagctttcccctgattttttgggcctgaagcgaaccttatccgttgtgaatagggcctcatcattttgtgcaatcccgccatcatcatctctagttcttttaccaacatgtgtggctgtcaaagaaactgtcagttctccacttaattctacagttacaacacgccttgatagcttgatcacatcatctgaaccaataggcattgtttctgcatcctgggaatcaagcaacataaagtcctcatggcatatactggaagttgtgcaaacaattcgtccttggtattcttttgtccacgatcctctaacaactttgactctgcagatagtcgcctcaactgccccattaagcaccgcatatgtgaacttaaacttgctgtaccacccaagcatgattgggtgaaatctacgaaccagcgttactgattgtctaccattaaaaaacccattttgtctgaagagttgaaagctcaatatttgatcatcggactctcttcttccctttacttttagttcaacgtcaaactcaactgggtcgacaatcagaattgcacgggatggacctgtcaactccaaaaatgaatcctgcaatcatcattcgtacgtcattataataataataataaaattaaatagcaatgcaaggataaaaccaatacacattgatgaaatagtaattgcttactttacaggactaaaattttagtggaagtgcatataagttctgtcgaaaatctcctaggttctagaagcgacaattttatgcatacatatgcatgtcttatgaattaatagtttagtacagtggccaaccatcccatgtctttatcattatatatttgcaagtcttctcttttttgttttccaatttgttattttatatcattagttgtttttgcatgtttgagttgaaataaatatgcttataagagcagttttactactaccacagtccatatatttcaaacattgaattgccaagaaggtttccagtttacagtagatattagagaacgtggcagaattaagaggcggaattgcattcatgataaaataaaatcgtgttatcgtgtacacagtagtaaggtgatttgaatgtttatagcacttgagagggagtacaaaataacagtacctgcagctagaaatgagcaaacaaaaactaaaaaaaatccaaataattaagataatttaaaaatggatggtactccaccttctgagtgagaatttgacaatcatctctagtgcggtggaacagaaggttgcgattatgatccacagagtccctgacagcaaccaagccatagacatgcaacggccactcgagaccctttttgattcttaccacctctatggagaagatctgcaaggtactatcacagcaagcatatcttgcgataggcccatgtgtatatcgcatggcgggcacagacgctgcaaacataagagttatgcatgcatgcaatcagaagacataagaatacattgattatgatccatctttacttataataattagaggctcttccagaagccctctgtcaatcctagataagaacattaatttaatttagaaaattaaaaaaagaaagctagaaatcgcacattaatcaaataaaaaaagatcttgatcacccaatatccataactaacgtaccatgtgaggatatacttatatagtacgtgtcgcaccttgtgaggagatacttatagagcgtcgcactatgttaatgcagaaaggatccaaaaaatatatagtgagtcatggacctcatggtagttgagaaaatggcccatgccacatgcgcacggcaacaaaaaaatttgatatatttgttattgggtttgattcgaaaaacgagttcaattttaagaagaactttggttggatacaagtttttccaaagcgtttaatagattctagttgttccttctttcttaggtacattcatccaactagagcttggagtctattctcttcattagtgatcataacaatgttttgtatgcatggttcctatactcctatgcacattgatgtacatgttctggtttcttaataacaaacaaatggaatgtagattgattcattgtactctccttttaacgcaaatagacatgcagcttatggtttccaaggagtcatattgaatattgagtgaattagctcctgccaaatctcatgcagcagcacataacaataacaagaatattaatctgacgagatattgatactaacagtaagagcacccgcaatggtaaagtaaggtgctctctataaaatatgtacatctcagcaatagacttagattaatagtaaactacctcaatagtatgtctacatgggtatctatagctctctaatccattgcctcgtttttctctatagactatctccaggttagtagatagttttgctctctctcttcatttaatctcttctaagtaggaaaatatgctgacatggatctcttgtagagaacatatagataaccattgcgggtgccctaataaaattggattacgtacttgtgcattggaagggaccataacgggaagacaaagaggaatcccaagatgtacggtagttgcgaatctgctcctcctcgtccacctcagtgtacttgtcctgcaactccaacttcacctgccgcaatttttcctccatctgcaccgggtccagctcctcctcctcaccgaacaccaattccgcgcacctcgaatccctacacccatcctcctcttcctccaacataggagtataattgttcatcctttcttcgtcatcctggtcatcgatcctccttgacttagcagcaaaggcctcctcctcctcacggcggcacttccggccttcgccgcctcctctccccttcgtctccgccgcctccatcgctaaatgtatgagatcagtttccttctctttcacttcttaaggcgttccaaatgtccagtgggccttgccctgggcggctgggccttcatcaacacaaattgaacggaatgcagcccattacggcttaggctcaggttttaatattctcattttcactccactattaatattgtttcagatggataaaaaattactcttctagtcgcgtatatatatatatatatatatatatatatatatatatatatatatatatatatatatatatatatatatatatatatttaacatcagttcccgtgatataaaataaaggattggcttgttcacttcgttcaacaaaagaaacttcaagaggtcaggtggagatgtgtagtagtagtgtttagtttgacacttgaccaaatattggtagcagttttgtgagtagaatggtctagaattatcaataattcgcaaggttgtgttggtaatgacatatttagtttgttatcttagtaaattttggtatcaccaaaatttcgaatagttgagaatggcaaggaagtaaacaaggccaaaattttaagacttccagttccatacactctacagctaacttcagtcaggcctacaacagacgccttctcctcctcgaaataacttatcaatacatccacgagtctctgaaactaagcaagaaaagcatcagcttctagtatacgacagcacagttcaatgcttggtaattaagcaggcttcatcatataaattaagacatacttatggtaaccatctcgcaggacgtcagagaatcacaaggaagaaaccagtgctgttgtcaatagcccctccagataaattatagcaggcaggcaactatctttacacaaaggatatgcctttgatcacgcctaatgcgtgcctcaaaccagtcattggattattacttcatctcacacattgacatgatttatcactgccctaaaggccgaaagagagaggtggggagggagagggagagggagagagaaaaaaaaaaggttattaggcatgttgctgcaccgggaaggcgggaactagaccggacttatgagtgagcgagcagctcatggattggattgtcaaaactcatcggccagactgactccataatgctgagctaggctcttcatgtttccgttctgtacgacattctccagcatgtcgtacttattgtaatttccatcgagtaattcctgttgctgctttgccagctccttctcctcttccaattgattctggcagaaaaaacacaaacaaaacacatcaatgccatgttacaagatcaaaacaacagcaacttggtcctggtaagcaatagcatcaagatcccaaaatactgtcctgctacaaacacaatacttggactaacaacgctgggcaagcgcataatagttctccagtcgcgcttacggttatagttactcgtgttaaatgcagaatgtgtactcaattatccatttctaaattacaatttacaatgtcccggcgaaaaaattagtggcctaccccactattctcctgagcaatggtctgccaactgattcataactgcatatcactacgcagaaactatgctgtttaaggcgtactgagcataaaacaaacataagatggcgattcttagaagcagtgaaataaatagttcatctaaaaaggagtcactaatttacctttatgagtgccatattttctacttcttgcctttttgctaggatcctcaatttcttcattccttgatactctgttccatcttcttgttttacccaccggaactctttcctgatgccagggtgaggagggcgctcccgaaacatctcgggctttgcacatatagctcttacaggccttggcatcccgccaattatgaaagggaaatcattcatcaagtctagtgcagccttagcttgtatttcgtcatccaattccaccaatgcagcagaaggaatgtcatacgggactgtgtaattaacaatgaactccacatcgacaacatttggacattgggcaagagctgctttaattactgagctcgtgacttgaggggaaagatgatcaatatagatcgtcctcttgaccttcttctcgaaatcagcatacgccttcttagcatcttcatcggatgtcaccatgggagcaggggcggatccaacttgagaacccccaaactgttacttgtattctgaaattaaaagaagagtctcttccagatctagaagagaagctagggttaacgaacgaacgcaagaattatccagacaaaagtagtcccgatgggagagaaagatgaatcagaaaggcgcctctcctcccttgttttgttcagctgcgactcgtcttggcggcgcaaggagcggaggagacagattttccttcttttatgccgccaaggtaaggagaagatactcggagaatagcgatggcgatgccgatgccgatgagaaggagcgatgggagggaagcagcggagattgcgcgattgcgcgtgaggggatttgcgatccgaggcattgttcgattacgcttagattcaatccggaccgggaataacaagttcagtaagaaatttatgatagatacaatgagagatcaggatttattttgggtcggaaaacaatttacttatgataaggacaataagagaccggaattagttccacacctcttgactagtggattgattcccggtctcttattgtccctattatgagtaaattggttcctggcccggaataaatcccggcatctcattgtatctatcataaataaatttcttgctatacttttcattcccggtccggattgaatcagcgtaaggccttgttcggggaccgagaggcccctcctttttcagttcggctaggggtagcgagtgtaggttgaggaactgggaatattagaagggatcgagggggtcgggcacgtgatctagcgggcgagacagaagggattataccacgtgatctagtgggcgagacggaagggattatacagattcaggccactaagaagcgtaataccctactcctgtgtatgatgatttttctgatatttgaaagcctctaaatctctggtgtacaagttagggttaagtgttcctattctaacttgttctcctccctctcactagacgtctacctccttttttactccaagaggttattatatgagttgggcgtgccgtccagcaagagagcaaacattctctatattaaatgtgtatcttgcgctacagcttggaaatcgtctgagcatcagctgtcgagcgaggccatcaaatcacgccggctgacgcaagccaacatggaggggggtccctgtcattcttcatttaatggttgtggaatggaggcttggatgcgcgggaatgacgttccggctgctgtgtctcccatcatcttgatgggacagggcatacctaccgcacgccgcctgacgtccgggcagagcagcttcagtcgacagcgagacgacgcgcttgacaacgtctccaaggtgttccactgatgatggatcggcggcggcgatttaggctgtgtttagattcaggggtgaaaatttttaccgtgtcacatcggatgtacggacatacatttgaagtattaaacgtagactaataacaaaacaaattacaaaatccgtctgtatactgcgagacgaatttattaagcctaatttaatccgtcattagcaaatgtttactgtagcaccacattataaaatcatggagcaattaggcttaaaatatttatctcgtaatttatatgcaaactttattttttttatctatatttaatactctgtccaaacatttgatataacggggtgaaaaacttcaagtgatctaaacaggcccttgggatttgtggagacttggggaaggacgggtcctagtcagcctcgctatgcacatcaatggatctacatccaccgattgattgtatagtagtactccgtatgtgctggtctggtagtttgcaacaatcattggcatatgtatactgacgactgtacacaaggggaaatctcgaaagataagcatactcagctcctgatcgatcgatctcatcaatctgcaacgaattgatcgtttggtataataacgaatctgactgggaaatacagtacatacatatttatggctgttgttggatccgcaaaaaggaaaaaagaaaaggaagaatgcacagatcagatcgtagagagaaaggaagaaagaagcagcaggaatggaggtgatccgaggagcaggtgataataatgaatgaatatgatggattcagaggtaaatgcaggacttgtcgagggagatgggcttgttgagcttggcggggttcatgaggaccttgcactcgatggcgcgtgtgaacttgggcttcaccagcgcccccagcacgtacgccctcgagtgcaccgtcgtcctcaggatcatcggcaccggagccatgctgccgctgcccttccccgccgtcagcgtcggccctccgccgtacagcggcaccttgttccccatcacccccacgctcaccgtcctccggctgctccgggcctggtagaacttgttgagatcgccggacgccagcgtcagctggctgtacgacagcgtgaacgggtccgccgtcacgtggatcccgaagaacgtgcccgtgttccggtacgtcagcttcaccgtcgagttggtcgtcgccatgtccgtcggcaccagcgacgcgtccgtccccgcctggattatgaagttgtcgaacgtgatgctctgcaatataatcaacagtaccattatttatttgtcatttcattctacgaagcactaatcaaatgaagaagaaagaagaatagttaccttgatgactatctgtggcttctgggagcggctggcgccccagaggacgagggcgaagaaggagaagaggacgacgaagccgaggacgaagatgaggaagtacttgcagcgcttggggatgcccctgcgctcgtcctcgtcgtcgaggaggccctcctcctcgatcacgccgatctcctgccaccccttccccgccggggcgcccttgcggccggagctggacttgtcgcccttgcgcttggggtggccggagaagcggctggacgaggagtccctgcccaccgagtgccgcggcgaccccatggggctcagcgccggcgtcgagtgcaccgacgtcgccgtcttctccccgtcatgcgagtccctcgacgggctctgcacgtagtacaccggccgcccgccgcgcgacgtcggggaccgcggcggcgacgatggcgccaggctcgtcacctccgagtccgtcttggcgtgcatcttcctcgtcttcttcttcttgatctgcttgctcctctgctctctctctagcttcttcttgatctggcagtggagctcgctaacactagctaagctaatgaccactccgtggtaggagtaatactaataactatagagaagagattcctaaatctaatacagtgatgactagcactagtagtacgtgacaaaggcaggaaggccgcggctaattaaagaataggaaagcaaaggaagcagcgtgtgttagttggatcaaagcgtcggtgctctttggactctggaggccaactaatttttagtttctttttcagatactagctagcagcactactagtggagtacaaacattgcactaccatgcataattagtatttagttttacacttggtttgtagcacattataccttcaaaaaagaatcatttttagtctatataaatgaagttatatcctactactatctattggaggaaagtactactggtatttattctgtaggattattaacaggctaatgtggggggtgaaaatgaaaatgcaaattttccgtataaagtgggtggttgcatgttacacggaagtgagcagagcactggtatggccatgtgacggtgatgtgccgggattcgtcggttgcggcatgagagagagagccggacggaccgacagttcatgcgaggctggctttcccattcccagccagctcaccatctcgcactcgctcgcagctggatcttgctttcctctcacctcttctgccctgccctaccctaccattccctcccagtcccccacatacacctaccatctactgcttgtaattacagagtatacatgtcacagtcaaaagccctcattgcaagcaaccacatgttgcatactcctatgtgtttaattagagtctcttcttccaaccaccattaatcacttgacacaaataatttaaagacaattgtgcggcaccaaccgctgaccataaaaaggtagtttatgcatctccgggctgcagg

SEQ ID NO: 585 - DNA, 680 bp, Oryza sativa
tgatctaaacaggcccttgggatttgtggagacttggggaaggacgggtcctagtcagcctcgctatgcacatcaatggatctacatccaccgattgattgtatagtagtactccgtatgtgctggtctggtagtttgcaacaatcattggcatatgtatactgacgactgtacacaaggggaaatctcgaaagataagcatactcagctctgtgtatttcattttctgccacctgatcgatcgatctcatcaatctgcaacgaattgatcgtttggtataataacgaatctgactgggaaatacagtacatacatatttatggctgttgttggatccgcaaaaaggaaaaaagaaaaggaagaatgcacagatcagatcgtagagagaaaggaagaaagaagcagcaggaatggaggtgatccgaggagcaggtgataataatgaatgaatatgatggattcagaggtaaatgcaggacttgtcgagggagatgggcttgttgagcttggcggggttcatgaggaccttgcactcgatggcgcgtgtgaacttgggcttcaccagcgcccccagcacgtacgccctcgagtgcaccgtcgtcctcaggatcatcggcaccggagccatgctgccgctgcccttccccgccgtcagcgtcggccctccgccgtacagcgg

SEQ ID NO: 586 - DNA, 1666 bp, Oryza sativa
cgacaggagaagacgcgcatgaccgcacgcatcttctcctgcatccggtcgaaggtcaccctctgctcaacgtcagtcaagtgcaaacctctgttcaacctcacttggactgcggtgatatcggcactgatatcccgtgcggcatcagcctatgcaagatggaaataaaaaattcagtagttgtcctatattatgcaagataaatgaaataattgtaagaagtaatacaaattggacgtactgccacgaagtagtctcggtcacggtgcgtgggatacgcgtccgtgacagcggcaacgtgcggctctggggcgtctggagtgaaggtcacacgcgcacgagtgcgaggaaggtaccagcgaaggtagtcacggtagttctcctccgtgtgtgggaagagctcgttgatcacctcctctgtagctaacacctagtcgtcaacgtactgctgtacacgtggaacccaaagtgcgcctgctagctgtccccgtcgagtcaacctgtgaagagaggtaaattatatggctcgatgaagtaattatcataaaaatttagaaatgaacaatccgaactcacgagtggtcggcagggaggacggtcggctgcacgttgcccggaaacacctgcctaagtccgaactgtctcatcacacgctgcgggcagtgaggctcaacgaaaatgtcgaacaccatcggcaggatggtgagccagtaagcctggtcgcgtgtgcacaaggacgaaagtcctagcggtgctctcgcagcgacggcctcttctgtgtacggctcccagatgacgtcgctcggctggagacggtcaaactcgaacacgaagtccgggtaaccacgtctcacctggacgtgagcgtaacgacgctgcaataaacatgatcggaattagacatgttatgtgaacaaaaaaaaagaagacgactgataaacttataacgcagcgaagttgcactaaccccacgtcgacaccagtaagtccccatcgtgggaccgtcctctggccactgcgcgctgcgaccaaccccgtagggtgcgctgtccaccactggtcgacctatggcaaacctctcggctgcccaaagctgaagcaacatagggcagccagcgatgatcgctcccgcgtcagtcttcgtgcacgcctcacagagggcacggtacgtggctgctagcacggcagaaccccagctccactgcggcacgtcctgtggctaagcatccgcgatggaccgtgcgtagtggaccagccggaagtccacagcgtgcccgtgggtgctagtgaacatcacccacccgaaaaaccacaacaggtacgcctcaagggagcgtcggaccgagtaatcatcagcgtcagggtgcagaaggtccgcctacaattaagaatgaaatgttagtacaaaacactcatccggtcgcaaataagcatgtatgataataacaacttatttacttacagtgaactggagcaaccaagccttgctaggcccgactgtagagtacggaggaagggtgttggccggtcctaggtgtggaaggcgcatcacctgctcgaagcgcgcagtgatatcctccttccacccaaaaacaccgtccacgggaccaactggtgctcccgccagcggtagcccgagcaggtacgacacgtcctgcagtgtcgg

SEQ ID NO: 587 - DNA, 25135 bp, Oryza sativa
aattctatgaaggattcaaactctgtcttctttatttgcttgatgatgaacctgtcatccaatgtttttgcaaagaaagccttactttttccaccttgagcatcccacttcatgcaccggctcaaggaagtgatatatgcaagctcagatgggcagcatttcttccgaagggtgtaaaactgattggcatgtacacaaataaccgagtatttccctttgagagatgatttcccattgacagatacttcaggatgaagtaaggatgacagaagtgagctatcatagctggagaagaggtcgtcagatgaaaagcttgcatctgagtctgaagatccaatagatgaccacgacgaagaggccgaagaagcttcagataatgagctgtaagatttctccatcttagagctctcactccccctgctgtaggctgcctcaccttcaaccatgagagcatctagtaaaagatggcgacgttcctccgatatggccagtgcgcgggatattatgctggatatttcatcctctgatatgcacaacacattgccacctggaccaactatgaactcagcagatgattgtttgtgcaggggggatagatgagatggagaatagttgttgacaagttcgaatctttccaaatacccggcctgcagttcatgcctgtaactctctcttaactcgtgcaatggactccaaatccatgtttccctgttatccccacattcaggatttatcaactgcgtatctgtaccttccaagactctgaaagaaggcacttttgtgatatgttgctcctcacgccgtgaattttcatcagttaaggtttcgctgctgtactgcatttccttgatatatccattctcaaagggcactgcactttcaccagttgcagctggttcaccggcaaattcagcagcttccttcttgccgacacaattagccattcttccagacttacactcaacaatttgatggaaacgacggtcccacacgtacagtcgaatcagaagatcctggtagagacaatttacaccaagaatctcattcacagaggagctagacatcccgctttcatcaacagccttcaccagagaatcctgtttgatgatattcatattggaattgacagttatcggagatgattagaatgcacacttatctctaggcttaccagttaccacaaggtaaagagaagaaaaaagaccagaaggtttaccacaaactgagctttttcttcaattagcatctcttcaagttgggaaacttctttgacaggaagagagtctccacagttaattgccacctcagagaaaatcttcatgtgctgtattaagctagaaacttcatagaaaagcttaactcctctcgcaagaaccttaaaaagtgcaacacaagcattaggcccaatctgacctatgaatgttcacaagataaatcatgtgatgaaaccgataaataaaatagtacatacatttcttccctcttgctcgaaccactcacgcatatcgggattgtgaaactcaagggttcgttgcggtttgcaggcagtgtaaatttcaactgatgaatattggaactttgcaactttggaacccaacctgaagtcaccattttttccaacaaaagaagaaagaaataaagaagggctaaaggatgtttagtatgtactacctccatattttaatgtatgatgccgttgattttttatccaacgtttgaccattcattttattcaaaaaatttatacaattatcatttattttattatgactcgattcatcatcaaatgttctttaagcatgatataaatactttcatatttgcacgaaaattttaaataaaacgaatggtcaaacgttggtcgaaaagtcaacggtgttatacattaaaatacggagggagtattatatagagagaacttttacacgacatgttcaaaatagttcttgagaaatgagaatacatacccaaaatatcgcaagcagtccctgttgaccaaatgcccacaaactgatagccttctagcagcagagtggcttgagaaactgagttcaaggaacttgccaaaggagagattacgcgcttcagttgatattagcactctccgagatgatttggatatccctctctcatgctcacatcttagacatctagtccacatccaaatttttccttcagattcaccaggcaaatgatgctgaggcagcaaacgcctcacattaatagttagatttccattgcggtgggtgtaagagtacatgtgagcatctggaggctctccacatgaggaacagcttaggttctgccacagttcagtaaaaaacatcacatcctgactagtagatatacaattgacctactatgtcatgtgttatcgaaattattcctaaaaaaatagataggtacctgattctgcaaaatgtcttgcaaatatcgtcctaaggagacatcgaaattcccataatagtttatgcggtatagatggctctcctcacagacaacctgcttcgtaacacattggctggataacaagatgagtatgctctgagaatccattacatcatcagcctcatctgtgtctgaatttatattttcgccggccctgtactgttccacattctgctgatgtttttcagtaccgaaaggatcaggctgtgacattttttggttggttttggcgaatacttgttcctggagatcatttaactgatccatatactcacaagaatgatcctttgttaaggtatcagacgccgtttcttggctggtttcagtatcttgttcattctgatgaccagttgtatcttgagaagaagttacaggtaaataaatattctgataacggaatatatcaatgaatcttctgagtgatccggagactgaggacagcaggttttcagatggaggtgcttcacagtggatggctgtaccctcatcttgtgtgtacgagtctggtttatttgtgaaaggaactgtagccttgtgatccccatcatggtattccagtaatgatcccctgctagtacaagtgacatcataatcagtaggaagtgaacgatttgagacaatggaagtctgatgagtgatttgtggtgtcccgtcaacatttgtatcattcaagaataccctctgatcttcaaagaaggatgtctcaacaaccagatggtatgcagcgaatattgtgtagtgcaagacttgcttgattttcttcagttcttgggtgcttgcgcctctgagcagtatctgcatgcgcgcgcgtattgagaataatgcagagtaattgatctaggtaattgaatgaaatggagtatttgatcgagtgcttacggtgcatcccaatgggttggaaaagccttccaagaacatcaatgttttagatggcttgttcagggcagcagcactagtagtggtggtggtgttatggtcctcgaagaacttgtcgatgtggaagtagtcgcagtgcttgaggtggttggggcaatcatggagaagctgggagaaggagagcaagggagcaccggaacagcgagcgattctctgcaagcggtggagcttcatgtcgagcagcagagtgacgccgtggtgcaggaggagctcctgaatgtcgcgggagacggtcttctcgaccatgacgacgttggggctgcaggtgtggatgatgtgggagatggaggctcggagaatgagcttgtcctgctccatggagtcgaaggaggagaagccgagatgggagtcgaggccgagggcgccgtggaggaggaggagggtggggcggtggcacttggtgggcatgtgcttgtgcgccgcgttcttgcggaacaccagcccccgcaccacctggctttgccgccgccttccggacgccacgcacttgatcttcacgtgggaggccgggtccatgtcgttgccggcggtgcaggcgtgggtctggatcagcagcgccgcctcccaggacagcgccgtcaccacctccagccactcctcctccacgcccgccgatgccaggaaccggctggccagcatgttcagctgcccgttcatggcgctcaccatctgcgccctctgccgctcctcctcctcgtcttcgcccctgctgccaggactaccagcaggagtcggatcgccatcgtcgtcgtcgtcgtccgccgcagcagcagcagcagcatcagcagggggtgggggtacccagtcccagtcccagtcgtcgtgggcgttagtatgatgggccgcaggtgaatcatcgccggcggcaacggaagaacagtagtaccggccatcctccggcgggtaactgatcgccatgatctctactacactattcatctatatatgcatgcacttacttgagttatttgctcgatcgaaagaagatcataaaaagaattgaaactaatgcaattaattagctagcgaagcgttaattaccttatagcaggaggagcaagtgtctaggtatctcttagaaatcgatcgagaatgagtatatcttgttgcagttggctcctgtcctgtccaccatcgataatctggaacaaaatatgcatgtactcctagctaggcacactcgtacagtatatagactgactagaagtatatattattattactcccctgtggctctgatcctaattaaattgcatgcatgatattgtttggtggtgttggtggctgggctgccttaactgtcatctatcatgcaattaggaagtactccagatcgatctggtactatcaatgttatataaggactcaaacgaaggactagctgatccaatcaaggcaaagcactacacacagactctaccggatctgccccctctgatgctcgatctgcttctcacactcacacgtcccattccagtgagactagagtatcttcgatattattattgtactccacctagctaaattaatacagtatatatatatccagcataaccaaaataataattcagacttttctttcctggctttttcttcaaattctttctttcttttgagcctaattaatgatttgttgtatagtatttgaccagaagaagaagaagataaagcagggcatgcatacgtggtgtgctgacaaatgtgtactagtagtacattatgtaagttccatccgatcatatatatgtgttgatgattgagtggagataaacatgcatgccgacgcgtggatgccgctcaggcttgactgcacagcagctacgtgtccggatggcaacaaagccacatacatacccccaatcagctactactactcatgcgtacatacggccggccggaggagtggacgactagtctgcattcatcatcatatgcaggtgaagcaaacccctagattttatattagtggagtagtaccacttaattactagctagtttatttaaactaattattactagctagctactagtagtatgtatgttatttcggcgaatgggggctgaattattgatccacatacacaatccaatcgaatggatgcaatgattgattagcttctcaataattctcacaaatacggacggatgtactacatgattaactagcaacgactaataccctgtttctttcagcttaaaattattataatctagattattgagccagattactataaactagattgttataatttgtaatataataagcagttagttgtttctttcctagattattgggtttgcaagtctaaagagggagtggggtggcatggtgggtaatttttcacccaataatctgaaaaaagctcatctaaataagcttatcagattataataagctgggctccagattataataagctacttcaataagttgtctgtttctttcagcttactcccaataatctggattataataatctcaagctgaaagaaatagggcctaatactagttatactccctcccagctttttaatggatgataacgttaaattttatcagacgtttgactattccttgtaaatatacattataagtaatatacataaagttactttaatgataaaccaaatcacaacaatataaaaggatatttacttaattttttaactaagataatgatcaaatatcatgcatgttaaaaatcaatggcattgtctattacaaaaggagagagtataagccccgttcttttctccaacaaaagttgaataaaattttggatacttgtagcatgcttttcaaactgctaaatggtgtgtttcgtgcaaaaactttctatatgaaagttactttaaaatatcatattaatctatttttcaagtttgtaataattaaaactcaattaagcatacgttaatatcacctcattttacgttaaaaacttaatcttcatctttatgttcattttcagaagaaaagaactcaattaatcatatatagataagtcgtaagtgattcttggatggaaaatcaagtgggcattaattccatgtattctccatgtgtgaaacagagactaataaggaattactaggttttatgtatcccaaatctcaatcacacgcttcatatccgttggatgtcagccaaaggagagggagtagtgggattcaggatggcttttgagggagggccaaggaggtggtggacatagatgggcgatggcagcagagttacgatgttatttaggaggataatgtgtaaggtcgatagtggagatgtcagatttgaagctgttaaaaggttggggcatctcgacaacgtgggtcggtagacaatgaagtcgagcaaggtaaagacatattggtgtcgtctaggctaaggtaggagaaataaggggagagggaaaggagagatgagtcagtcgggtagtgcatatcgacaccatcaaagccaaggaattggggcaggggagacgaggacgacgacattggtgtcgtagggtttcttatgagggtaatgggtgaggtttgtgctgggatgtcagacctaaagtggttaagaagtaagggtatctcaacaacgctaggtggcaaagatgggtgagacaagggcacctttgtgctgctaaggcttagggaggagggagcagagaagggaggagcgagaaaggaggcggtctgacatggcacgccggcgccgacgaggccgcagcatggagtgagaggtgaacggaaaaaaaaagaaaatataatattattgttctgcataaatcttcgcatatgatctgaattttctgaaatttatggttgtttttgtgtcactgaaaactaggcacccaaagtaataaaactcactgctgaacgtgtatatatctaagttgatcaatatgattcaggcgaatgtattttaatcagttcagttgatcgtgcgtgcatcctcgcggtccaagtgtacatcgtctggatatgccatgcaatcaggcaatcggccaacgtagcaatcagtaatcatgtatgtatactccagggcagccgaggctaattgtcaaattaattatcggacgacctcttgtggctatcgatagatccatcgatcaatggaatgggatgttgattcgccatcatcagaatagatcatagatctagctagcaagcaagcgcagaaattaagagagagacatggtaatataatcatgtatgcatggagattaattaatactcctaggtataactccaaggattagattgtaccacacatatggagtatgtagcagatagagaggaaaaattgtggaacatacattcagctggaatggaatgatgctgaacccctggaatcaactagaattcaatcattagctactgccatcgatccgattgctttcgattaatcgatggatggatatgattcaacattggtctggtggactatatagctagcttctgcagacctaattatcatcgtcgtggaaattggaattaatcatccgcatgcattgaatatttgaattcaagaaaatgtacatttagtgccatcgttgattaattacagatgaggatttcgtttcattttctcacgtcgatccagaaaacgggcgatttaatcttcaaagttttggggccttaatttgtctaaaagcgtaaatatatgggccaaattattctttatatgggctggattttgggccatatatctctgtgaaatatacatatgggctggatttcacatctcgaaaacaaataagtccactttgtcacatctcgaaaacaaataagaataccagatatcttatccgtaactattaaaaccaataaaaataaccctcttgatgtttttaaaagtggctttgaggttggttttttctgatgtggctcactaatctagtccaaccaactaaatcagcatgtgaaacccacatgtcatcatctctcttcttcccttcctcatcctcctatctcttgaaaaagtggacctctaaaaaattatcctagtacgcatgattgcagaagccagtccatgtatatgagactatccttcatttgccatattaggtcgatttggctcatgttcaacgtcatgggccaaaaatttagtatctcttctattactccaagacatatactctaataaattatttcatccgtttcaaagtataacaacatgtaacattcaatcataatataacaacttcttaacctacataatcttctcaaccaatcatcaatcacaaactgctatgttttagggctagttcactttattgctaattttaagcctatcaaattttagtagggtaaccaactaaacatagccggctagctgcaccattaccaccctatcgaaaattggtagtaatttcgaaagtttcctcctcacagtaactccaccaaaatttagcaaagctcccatccaaatacatccaatgcttctaaattttagtagcaccaaaacaagattgattttggtaataaagtgaacaagctattaatttattcacatattttctcttttcaacaaatcgtaacattctttcatttaaatcttcatactttcttaatacacatatccaactccagaacttcttatattgggtagtagtaattaacaaacacacgtttaaaggaagggagaaaattccttatatgaatgccattgaaagttcaccagtgtactagctcatatgccactgaaaatttgatattttcatatatgccacttaacgaatttttccttccctcatatgccatccttcatgtgatcattttagttagcatggaaagtacaaaatcaccctcagtttcctcctcttatgttatgcactagcactatctcccatttttgtcattgccaaggctcccatcgggcctaataagggcagttccaacccatagtggccataagcagtgtctatggtgacatgtcaataagacatcacaatagaaactacactctacaacccatagtttcttaaagtgtgccattaataaatacatcatctatcttctctactaatcatatttattctttatctattatgaagacactattctctcacaatgcaaaactttatagtgtctagtgcataggttattgtgttgaaactgtgtcttgcatgagacccagtttctttctctcttcactctctctcttaattaatatagtgtcacataagctaaaagtccgacatggcaatgtagttaatatcttaggtggagggttgggactgccctaagccaaggaaaaagcaaaaatttaaattttcaaacttaattttaagattgattttaagatatttttaacgtaatttcttttacagtattggcttttaagtcatcaagaacacatatataaaagttttacccacaaattcatttttattccctaataagtcgttttgacttattaaggaaaaggcaaacgatggagcctcaaatcttgtatggtactccacctccctccacatggctcaagaatagacaggtaaatagtccgaaatgactgctatctaccttaattttctcgctacgaataaatataaaactatctgttcaagaggttcggttggaaactcacctcccgggcacgtaaaacggagcgacatgttttcttataattaattaagtatttattattttttttaaaagaatatattaataatatttttaaagcaatttttgtatagaaaattttttaaataaaacacacaatttagcagtttgaaaagcgtgcgcgaaaaaataaggaagagagatgagttgggaaagttggggaaagaactcagccacccatggtgcaattcaattaagcattcaattaattcttcagttaaaatacaataatttgctaagtcgagaccctgttaccacacctcaattgctttgtaacgacatgaaaatggaataaacgaatgaagagaccgtaccgacgtaaggtggattagccggccgggcctgctactgcatatacacttatgttatactgccctactgtagaagtacgtgcagagagagagtcacggaggggcatgcatgcagggggcatttctacagttgcaggtagagacacgcacgtccaataattatgattctcttgtcgatccatcagctgatcgatcgcacgtcgctttctgatctctagatcaaagccccaaataacccacatattacatcatcacacatgcatatactccccgtcccataaaaatttagggccctttaaatcacagaaatgagaaaatatagaaatagaaaaaacgcagatttttataggaatgtaagtgtaaaacagaggattgcaaaacataggaaaaacagaggaatgaccgtttgatttgaccacggaaaaaacgcagaaattagaggagagataaagactcaaaggaaagtttccaagagattttacctaatgttagaattcctccaaaacttgtatggcattaggcaatccatgggatttttatatgattccataagatccattcctttgattcaaatggctatataggaaaaattcctatagtaatgaaatcctctaaaattcttatgaatttcctttgaatcaaaggggccttaacctaagataggatgttagatccttcctagtacaacgaatctggatttacgccgtgtttagttccaaaataattcttcaaccttccaacttttacatcacatcaaaacttttctacatacacaaactttcaacttttccatcacatcgtttcaatttcaaccaaacttctaattttgatgtgaactaaacacagctttacagtatgaggggttaagtttttttagatggagtatatatgcaggggtaaatgctctcgatctttcttgtagtcgtaattcctcacatatactccctccgtcccaaaatgtaagtattttttactatgaatctgaatagtaaaaaaatgatatattttgatatggaggtagtagaatatacttgaccaacaaaaggtcgattgatatacatcaagtggaagctagagcctagagctggggtatcgtgatgtacgcatgacatgtgcatatatatgaccaggttgatcttggccagttcttgacaaactcgagaaattattttgcacaagtatcacaataagcaagcaaaacattcatcatcgatcattcatgtgtgatctgcgtatacttatatactccttccatttctttttattatttcgattttttgggatttctcctgtgttgacgaggagaaggcacaggagcaaatatataatttcacagctttcttaattttgagggaaaggtcggaaacgtcaaataaaacgaaacggagggagtatatcgtccatcgtgccctgttaattagctctcggtcattaatggctgccctggcctgctgctggtacaatacaagtcggtcattgtgtttgttagcatgtcattctcctggcataaagagcacgcacccaatgccatgccgtatactccagtttgcatcattgcacttgcagactgcgtaccggccactggtggagaaagcgtttgtagtcccggttcgtaacctctctttagtcccggtttttaaaccgagactaccaatctgggactaaaaatcgctatctttagtcctgggtgaaataactgggactaaagatggctcagtcacgtggccggctgagccatctgttaccaaccgggactaaagatcgagctgaccttttttttgcatggccctgttgctgcatggtttatatatatatatatatatatatatataatatatatatttttatgtgcatatatatatatatgaccaaaatatatatttatattaaagaaaatatgtacatgcatatagaaaaatagacatgtattaattacaatccattatgatgtcctagctagctacgatttcgacgtagtagtaggcgtcatctcagaagctaaggacctatgaattgtatttccgtcgtagtagaattcacccttgggatcaaggatttgttcgttgatgaatcccatgagttgttcttgaaccgccgcgataaattccttgtgtgtgatcaggttatccctcatgcgaataaactatatgaatgtatgaaattaattagtaattaaacaaaaaatcgatacatacgcaatgaaattttgaatttatttgtacgtacatcgagctctcttgtgatgatgatttggtctgcaagacagtggcaatactcgcacacgtagtagccacacaagttagttccctgcttttgctttgcacactataaataaatgacaaacggcgagagatgtaattaatatacacttgtatgtatttgaattggaaattgaatataaatgtagagcatgtgtactcacaggaaaattgaacttccgcctaagtctttctctccatttgccgcggaccaaatgatggaaccgataccaagccctacatggagtttaaagctatgattcgtagtagcaattaattataacaagattcttaattaacataggaacttatgacagtacatgtctataagttcgaaaaccttgtcaaacgtagactcttttttatccattgagtcatatacgttgacggtgcaggcctccaggtcgaagagtaaaaggacctagtggaatctgcaatgtgcgtgggatgcattacatatgaaacacttagcatgttcgtacaggaatgaaatttgttataggaagacagtaaaaactaactctgtgttgtacggcaatagtatgaacgtcttgtaatgctgcgccttcaggagatggacgagattgtcctctgtggcttgcggatactggtcgagcattgcgacgtttactttccgagggtcgatgaatccagtatcgaaaaccccccaccgtcgggccctttgaatctccattctacaacgataaaaggaagtatatattatatatattctacttatatacaatgacctaattaattaaaggaaacgtaataagaaatctaactgaacgatacttacaatatccagtaactcataatagagacgtcgagggcatccagctggtatagttcgtagatacccttgaaattgatccagagaatgtcatctccttgcaagaagtccgtgtccctgatcctcactccgatcatctctctaccggtggcgctcatctccatgtacagttgatggaacttgtacatttgtgtgggtagggactacagctgcttaggcttgacaagcggtttactgagttcgtacatgtatttcactgacaggccctaacagcatttgaaccgggactaaagatgatctttagtcccggttatgcccgttaccctttttaatcgggactaaagatcatctttagctctggtttttattgcaaccgggattattgtagaattcggccgaccaacgaaagatgatttctccaccagtgggcctgaaggtggaggctatatatgctaattaacccatacctggcgaaatataaattgccgtttctaatacttcaattcaaatttacaaatttttaaataatatttttcctttgttcatattgaacacatgaaaaatatgttcgtaataatatacagcacgatgatcaaattattttttaatacatatatatactacatattttggtgaccgacaggatatgctagctaatgctaagccaacagttttcaaaccatcgcatcagcactaagtgtgtgcgtgcttgatcgcagaattgatatcgcgatcgatggtcctgtaaatgcatcatactcctatgtaataatggatggatgtgcacaggaattaataagatgggagcaactcccctccatccaagctatagaagatcactactagctcaggactcgtgttttcaaccgatcgttgatcgagcaatcacttcagatcgagtgtgtttaaaaaagattcaaattttgcctaaaaagggaactccaaatcgaggtggattactactacttatttgcctcaatgtatcatgtacttcatccattcgaaaatattactccctccgtttcaaaatatttgacaccgttgaatttttagctcatatttgaccgttcgtcttattaaaaaattatgaaatatgtaaaactatatgtatacatgaaagtatatttaacaatgaatcaaatgatatgaaaaaaaaataattacttaattttttttaataagacgaatggtcaaacacgtactaaaaagtaactgtgtcacatattttaaaacagaggagtatcatttctagctacaaagagcatcaatgtataattagcttacttatttgcctcgaccaaccgtggtagcaaataggaagagcgaagtaaacaagagctgtgcatgttttcctatagacatggattgaacgcttttcgaagatccaaaaaaaatagtaggagtaataagagcaagtttaatagtttaatagtatagccaactactagctccaattcatttataaacaatctaatagcttatccatacaatagttacatactacactattaatatatgatcccacctgtcatacacacactaagttttagagtccgtgctatagctggctacaaatctgtagcctgctacttttctctctcattatttatctcattaaaatatatttgcagttggcttatagcctgctattctatctgctctaagaagcatgagccagtggcatgtttgaagagagaaaatatggtgtagctagctaattaattgacttgctgtgcattagtgtaggtacttttgtgagggagaggaaagaaaagtatggcgcataggagtagaatagaatagaagcacgcgtgaagcagttggaacaagaacataggatacacaagtgcatttttggtaccacgtacgccacacaagtggtttatttatagaatgagtcgttagagtagagcaataccattacaggtagaactttattaataaagacaaaattattcttgtagtatgatgctagtactacacgtatgtactactagtatatatggagagatatgtcatggtacacacagtggcagtggcagaatgttcaatttctccacagagacgaccaaagggatagatgagaatatacacgcacattccacaggcacggaatgaaagaaaagagaaggaaaagaggaaaggcagaagaaactgcaggcgggcagcaagataggaatctcatcaagaaaaaaaagagaaaagaatggtgggcgaacgaaaagaatgtagcaacaaccaactttgctccttccagacttattagttgttcttcttctcttgcgcgcattatttgagcgcgaatgattgcgttggctcgccgggcggatggctgcctgtctgcgtctgcgtctaccaccgcccgggactggactggacctcgcgcgcgcgccttgtgaattttgagagtagaggacgggtaaaaactccccgtatgttatgatgcttctgctgcacgtacttggtccagatgacgagtgaattggcaaggacggacggacggacggaagggaacggaatgggtaggtacggtagtagttgtgttcagaggaggacgtcggacttggcgggtagtcgcttgtagaagttgaaggggacggacggctgcttgctgcggaagcgcggatggcggaggaggtacagccccaccaccaccgccaccacctggaacggcgtgacgtagagcaccaccgcgatgatgagcgagagcaggacgaagatggaggtggcacgggggtcgcgccagctgagcagcgcctgggcgcgctccccctgcgtggccaggtcacccaccaccgtctgcaccctcccggccacgctccgcagccggtcgtacctcatccgcaccacgtccccgggcttgctggtggggaacgtgtcgaactcctcgtccagctcgtccgggtgcacctgctccgcctccgcgtgcgacagcgccgtgtccatgtgcgccggcttccgcggccgcctccggtagttccacaccccgatgacgaacaggtagaggaagacggtggggaggatcagctccgggtagcacaccaggatgaggaacagcacgtgcaccaggatggtggtcaccgggttcttccacttgcagatcccatccatccaccgcgccaccgccaccgccccggagaagagcgacgtcatccgcttgaagttggccttgctccgacgcaggctgaacatgtgggagtccacgtccagcatgtactccaccacctcacggtgcagcgggggctccgcgcgacccagccgcgccgccaccatctgcatcgcctggaaccgcaggtagtccatctgcagcaccgagatggggtgggtgtagtgcatcttgggcagcagcggcttcccgtacatggccagcatgttggcccacgccgtgcacgtgaaccgcaccgccaggtggagctccccggtcttcttcaggccccccggcgtcagcgtcatcagcgggtagaagtgggtgtacacgcgctccgtctccagcgtcgacagccgcacccgcaccttgccgatccgctggtccttggcgtccccgccccccgtcaggtggcagttgtcgaacaccgccaccgtcaccaccgtgcacaggtcgaacacctcccacgtgtactgctcgttccaccggggcgccgccgtccccaccagcgtccgcgtccgcacccacttcgccccgtacttggccacgcagtaggggctcttcccgcccgccaggttccgcgccccgaggatgcccagctccaggatcccgatcgggctcttcctcagcttcttcgccgccggctgcaggtcgctgctgtagtgcgtcgactcgtccaacacgtggtacgccgtctccaggctcagccgcaggtggatcttgctcgcgaacgacgacttgagcttcgtcgcctccgccgccgcggcctcgtccgccgtcagcgcccgcgacaggctgaaccacttggcctcgatcgacttggccaggtcgttgcgaggcacgtagggcgccgccaccgggatgatcacgcgccccaccggctcgtcccgccccgccgccacgcgctcctccaccgtcaccaccagcggctcgtcgaacggctccgcggccacgaacaggaactcctcgttccacatcgggttggccgacccctgcgaccgcgtccgccgcgtctgcccgcccagctgtatcttgacgatggacggtgccagcgggcggcccttctcggcggggatgaggtcttgcgccgcgatggccaccaccttgaggtagatgagcttgggggagtagtacaccttggagcgcgtgctggcgaggctgtcaagggagacggagtgggcgtccgagtgccaggcctccgggaacgcctcgtcggcctgcgtgccgttccagacggcgagcatgatctcgccgtggcgaatcttctcgccggagcggtcggcgaggcggtaccactgcggggcgagggggctgtcgggcgggacgcggttggggatgtcggtcatgtcgaagacaacgcggccgacgaagtcgtccttgaggacgtccttgtccttgacgaccacctcaagctggctggactgcaggtgatcgcgggagaaggcgaagacctggcgccacaccgggttggggttcttctcgaggtggcgggtgacgcccttgaagttgccgagcctgacctcgacgtaggggtcgagcgcgccggtgatgtccatgttggggaggtcgcgcgccttgaccacgctcacgtacaggtacgacatgggctccaccatgtcgtaggtggaggcgatcttggccgcggcggccaccgcggcgcgtgggcccatcttggccggcagcggcggcttggtctccaccaggccgaacgccgaggggggggcccgggggcggggccgggagggcgcggcatgatcacggtctggcctggcggcggtggcggcgcggccaccgcgtggagcgtggcacgcctgggttgagaggcggcgggggcgggggcttggacggggacggagcggaacacacgaggaggctcgtggtcgtgggtggtcttgcccttggactccgactccgggggcggtggctgcgcctgcgcctgcgcctctccatggggaaaggcgggaggaggcctgctgtcgggttgctcggcggagacggactggggaggctggtgctggtggtggtggacagcgggagcaggaggaggatcaggggagtcgttggcgatgaggtagagtcggagggcgatgtcgccggagacgcgggagaagaggccgcgcttctcgagcgggtagcgctggaggagggcgtcctgcggggagggggcgagggaggcagcggagatgcggacgcggccgaggaaggtgtggaggcgggtggcgtggtggtcggtgaggctgcgatcgtggtggacggagacgtcgacggggagggaggggaggcgggaggggtcgcggacgtcgaacacgagggtgtggttccattgcggggaacgatcggcgggcttggtcggggtgcgctgcttctgcccgtcgaactccacctctacgaacgcgttgcaggcgccggcgccgtccttgggcgcaagctccgacgcgtccaatatctccacgcccaccttcatgctgcctctctgcttgctctctactctagtgctattccctcatctgcttctgctggaatgttgtggtctaatagcaggaggaattggagagggatgggcggcgtgggagagcatatcaacagggcagagcggcaccttccaacactctgtttggcggtggacatgatctccatccatccccaataatactccaaaacataatcaaggaggaagctaagggcctctatctaattgattgctagccattactgtacttgtactccttttcttatttatttatgggagtacctatacatctttcgaaagatttttataatcgtatcacacagatttttaatctttgtattaaaatccgatagatataataaaaagcaaaaagcaattaagaaacaccataataaacattaaattaccatatcctcaagaaaaagaccaaatccaatacaaaatttaaaatttacatgtgaagatttaaaaattacagtgtaacttacaaaagttacagtgtaagtttcataaattacactgtaacttacaagaaaatgcactgtaaatttgagtgagaaaatcgagtgagagataagaaaaaatctttcgagtgagatatagcaaaatcgtttatttattactactatacgctaataacaacaggccaccccgcccaggggaaaacgatggagtgacgccacacacacaccggtaacaaactctacttctacttttcatcttttcgtcggcagaatcgatcgggtcgggggggttttttcgaaccaaagaggccccttttccacagcgcacgctccctcccttggttctagaccatggagtaatggtcatggaatagtaaaaggtttactagtcctccttttcttccattccattcccttcccttccgttccaccaaacgcatgcatgattggatcaaattttatctctttcttctctatacatatgtatacttcaagataagatagatagatcacgcatggaaggcatgatcagacgatgtcatgttttcatttgcatcaatctcccaaacttgcttattttcattcattcctactgatacttttgcgagcacgggtagctttggaaagcagcacgacacgataagaaagagtatactagaacattcagagaatcaacctgctgctactacgactccagtagtattactaaaaaaaaggcacgcatgcatgccgagttgcctaactgcagcacaccgcgcagcgcaatccagcaaacccaaaaggttaacgttctaatagcagaccggcttcccgcccccccccccccccccctctctctctctctctccccctcaagtcttaactaaccgactagtacaacacaattccaaatcagataaacaaacgacttcgctctttcacttctccaaacctcacgattgcccagcaaattaacatccgcttatcaaactagttaggtactaatacatcgtatgttagctgtaggagaactatatatgaattataatttttttcttaggtactatacgattttttttcatgtgtttatatatttttgcaccttgataaattatctgaaggttataaatggtatatatgaattataatttttttacttattatatgattatgatttgctttcacgtgtttatatattttgtatcttgataaattatctacaagttataaatggttgtgttgtatggtgcgtttttagggagaacatatgcaatttgcatacttgataaatcatcaaaggctaaaaacaattaagatgacatgacttcttgagagaagagataattatcactaacttcacttggcaaggatgaactttatagatatatagcattatggagtatattttatcttgatcaattatctgaatgatatggtttgcatggtgtggtacatttttcaccattgatgaatcatccaaaactagaaacaattgagatgatgtctttacgagagaaaagataattaacattaactatacttattaggaaataacttatagatacataatattccaattacgtggaggtacctgcggacgatgcctccttccagcggcgcagtcacgacggtcgacagctaccaacacctccatacccgttgactagcagacgcacagaagttagagcacctcaaaaagcctctctacttaaatggctacttgagtgtgtgtgcgtgtgtgagagagagagagagagagagagaggagaatggacgagtggcgatagcggtatcgaggtgggagaagggagacgaggcggcgtgaaggagcggcggcgccagcgagatgggagacgaggcggtaaagaggccggtgcggtagggctccgtcgtcacctcacgcacgtacaaatccattgtcgccttcgctgttcgtcgccatcgttacctcacatggctcgaggaaaagggggagaaaagaggaggaagaataaggggtatttgaggctgacacacgggtcccactgtcatagacttataatagagagtgtagatggaaagtatgttggagtaagtaacgagtctgacttgacaaatcagatggagagttagctatattggagagttttttttatagtatgttgaagatgctcttagatgaccctaacaaattaccttggcgagcatgacacatgggttccatggagaggaagagaaaagaggagagggaagatgatatataggtctcactgttttttcagtttttttttctctggcttacatgtgtgtcacgtctatttctatcttttttaaaatatgtatattatgaaaaactgagtcaaagagccatgtaagcaccatatagcacgaaatcaccatagaaaaccacccacgaggttaaggaatgttaataaaactcggatcacagttgggggatatggaatagacttctttccttctagagaagtactgtgtggcgaagtatgtggtgagaattccataaatggcctaacccagtgaaagtccaatccggcccaacgtgaatcatcttaggctttaatatgtgggcatgcctgcctgccagcatgctttggattgctgagcatggccttctctaaactggccgtaaggcctgcataaatctgagagacagctttcagagacaaacatacatactaagtagtagtaaataagtctatattgcctccctcctctctttcaagccctcaaccgtaaaatttggttataacgtccatctttgaagctcggtgcaaaacgaatcattctatggttggtttttgctgacgtgaaaggttgaccatggttaactcgttgagtcagcagggggacccacatgttggagactcacatgcaaatctcttgggaaaaaaattagtagggtcaacatgtcattctctctacttccctccccttactctcttcccgtttttcttctccatctatcttaccgacgagagacagagagagggccagacgactacgagcagtggtagagcaaggcaacaacaattcgtggttgacgaggaggagaggagaggcaagggagaggggtggggaggatgaaggcgagggcaataaggggatgttctgtcaccacatgcaccttggtgtcgtgtgtggcagcgacgacgtctggcgcaactcctggccacgtgaaccctggaggccagggttaccgtgagcggcgggcgagggatcgcgctgatgcttcagcccgtgggtgacgttgtggtcctcctctagccaatgcggcgatgttttgcggttgtggcagcagcttgaccacaaggctactgaggagcggtgcacggggccacgacaccgacacaacggagtaagggtagtgtgggcaaggggaggaggagctcatgttgtcgaagtcagagttgaatgtgtctctgccacgcagccacattgatgtgttgtgtagtgcgcatgtgactagttgtcgggataacttggtccgagtcgctcgaacaaggcatggaggtgcgtgatgaatatttggattccatcgctgtgatgtccaccgccgcccacgtaggtctcacttgctaacttagtgagacaaccatatttattcaacctgccacgttagcataaaccacttcccaacccacggaagaagtatttgtaccgttttttgaagacggggagacactataccccggttttacaattgagggagatgattcaatgcaagaaacaagggagacggaatagacttattccaatatacgagtgatttggttccttaggttgtgtttagaggagaggttaggaacatttctctcgtgcacggaaatcagggttacttatttgcacatgattaattaaatattagctaaaaaaactgagaaatggattaatacgattttttttacaaaagaactttcttatagaaaattctggcaaaacaaacaccatttagtagttcggaaagtatgcgtgtggaaaatgagagagtggaggttaggaatctacgcttgcgaacatagccttagctactattccaaatggagtaactgcacttgtgtataaatccactcattttgcttacatcctttagtcataaatatttgacattttgaataaaattatatcaaaattttaaaattccaaccataaataacttctcaaatgctaagtttctttttttaaaaaagctaaatgtaaagttaacttgaaaagtactactgtaatattatacagtactagaagtattactcgctccatcttaaaacataataaaatatcagattggacatgtcgtactactacgaatcattggaaagacattattgtccgtataaagtttatgtacttaagaaaatgtgctgcgataaatccatctagggaatgcgatccccactttagatgatggcctaaactcaggtcaaacccaataagcagctcatgtgcaagtagtactgctatgcaactagtagtagtactgaaaatgagggcaaattggtaggtttggagcgcaaaagcgaaattcaaaatttgacctcatatcgtcatccaatcacacattttgaggaatatagaattttcttcttcttttgcttatctttaggaggatatagatttatttttaaaaaatagtaaagtgagagaggagtgagctgtgagcgaatcagggaggaattgtccccaagtccaagtgaagagaagaggtgtgagagaagagaagagaagcggcgcgggggagctctgctctgctcactactagtgtttctctactcgccgacggggcgccgggcgccgccaccccacccccccgagctcgccgtcagccgcaaccgccggggctggggctccctcctccactctaagcttgctgcaagggaagggttccgccggccggctgcatccatcccatcccctcccggccaattggggaactggaatcccgatttcatccaggtgagtgagtatcccactgcatctgcatctgcatccgcatctctccgtcgccgcctgctcatctgctcatctggatctgcagctaaattacctgccaccgcagatggccgccgcccacaagctagggttcagggaggaggacgccctcaggttcctcttcggcgaggatctcctcgccatgcaccactccgccgcagcctcctccttcgacaggtcgcaacccgaggtccaggtcttcagggacgtcttctctccgtctccacctcttcttcatgtggccgagacttcatccctgctccccactgctgctgctgctgcgcctgcgcctccgcctccgcctgcgcctgcgccttcactccaccaccacctgcacgcgctgcagcctcaacccgcgcccgtggaggtcgacgccgccgccatcgatcccaaacattctcacggccccgtgctacatgggaatgggaatgggaatgggaatggaggcctcgagttggacgccgcattgcagggcttcgttgcttactggcaaggcggaggcagctctctaagtgtaaccgacgctgacctcttccatgacatgatgcaaccaacgccgccgcaacactccgctggacctcctcctcctccccctcctgctgctgctggaatgtgcaccgccttggctgccagcagcagcaacagtggagtcgaagatcctttgccttcctatatggaggcactagcagacttctctgatttccacaatgacgctcttctttccgatccc

SEQ ID NO: 588 - DNA, 610 bp, Oryza sativa
catcacgatcgccagatgcctccccgtcaccaccacctccttgaaccttattatgttcgggtgacgcagcgaacgatgattcacgatctcccggaacacgttctcgtcgatctgtaccaatttcatttcatgctatttctttctttcttttcatatatcattccaaaagtaatagttgcttgcttaccctgttccctctctcgatgaacttcatcggcaccagctcccgcgtctccttgttccgcatcagcttcgctaccccgaagttgccctccccgatctaccgaactggctcgtatttctccatatcctacctccttttcttctacagtcacttaaaatcttgctttcaattctgcttctccttctgcttctgcttctgcaagaggaacagtctctggaggaaagaagcagagcagagcaagaagatgaggaggagatgacagacgacgacgcatataacctgcagacagatagacgacggacaggctgaaagaataagaggaaagccaaccggccggtcttgggcgaaaaggatggatgcaaccagcgcacgactcggtcggaattaccatatttcttctcaattgcatgctcattaattttcaac

SEQ ID NO: 589 - DNA, 705 bp, Oryza sativa
attatatctcttatgattatacacccccgttgctgtagaagcggggtttaaaaattcccattatctaaaaaaatctcttatgattataatatggtactcctatattttgctggttatctgaatcttttgttttcaaacaaagcagagtatcatttaataaaaaggacttcagtattttatgattaacaatatggttcattttactggtgatctgagctttttggtttcaaaacattgcagagtatggcatgggcagtcaaatctcaactgagggtgatgtctatagttatggcattattcttctggaaatgctaacaggaagacaccctaccaatgaaatatttactgatggcttcacactccgcatgtatgtcaatgcatcactttcacagatcaaagacatacttgaccccaggcttattcctgaaatgacagaacaaccttctaatcataccctgcaattgcatgaacacaagacaggtataatggatatctgtgctctacaactccttaaacttggcctggaatgctctgaagagtcgccaaaagatcggccattgatacatgatgtatatagtgaggtaatgtcaataaaggaagcatttttcgccacgagcatttgacgttaggtaataaaatggtgtcaatagaagtggaacactgaggaatgaagcatgaacgttaggtaataagggctgcaggaat

SEQ ID NO: 590 - DNA, 1701 bp, Oryza sativa
  unsure (1)..(1701): unsure at all n locations
agtggttgttcagattggagataagatatatcgatttgttagctatttgctggatcttggagaaaagtttgtaaggagtagtccttattctctccctccctggtgccaccatggctaggtccaggaaacctcaacaaggactaatgtccctcagcccaattatgcccgttacatacacacgacaaagataaacatgcatttaccctgaatttgtagtacgagaggaatgcctgtaacactgatattcacctgagcatatgcttattccagcttcacggacatgctcaagagtctgcagtctatcgtcatatgatcttgtggaaataatgttggggtaatattctcttgatgtatctaaattatgattatatgctgtaagcccagccttcttgagttcttcagcttgttgcttctctagcatgccaagagtgcaacagacctccatgcccatacctctgcagagatttatccacagaatggtaaatcgaagtcaagatagtgataaagcaagaaaactaccttcatgcaaatattctatcgtaatgtatgcagaggcttaagtcagtgtcctatatggctcaagattacgtctgtttgtaagtgaacaggcaaagaatagtttaatttttacattcaagattgacaatactaatatgtttggaaatacaaaaaaacagacgaataaactaatgatgacatagcaatggcatggaagagagcatgcgcatcagtgcatggttatgcaagactctgccaaatacttgcacacaataattctattgtgctatctttcaaaaataatacctaatgtccttgacatattcaaggatctgattaaaatttgttttcctcccaatggtttctctccatgctgctcccatgcaaaagcgggtgctcccagcctcctttgcctgagcggaaatagatcagaagaaataatgtgaaatgatattacaacccataattttctgaactaaagctgaagtcctcagtctgtaagaactcatgttaccacttcgcaagatttttaaaaacaacaacataaatgaacttggtcaccttgagataaagttacaaaaacagtaccttttttgctgcttctaagacagcatctttattcattaatttttgtgccttcaatcctgtactgtatcttgaggactgggggcagtatgaacaatcttcgctgcacccacctgtctttattgaaagaagagtgcactgttgcacttctctgaatttatggacacttctatggacttgagcctatagaaaatgcaagcattatctggttaaatgaaaatacattgcaattgagagctatttccctattgactaatgtgaaggctggacatagttttccttcccctttgaggctttgactaaaatgatcaacgaaaagcttgggaaatatgttcaacatatnnaaccaacagagatgcactttaagctaataatgcgaactaagatatgcatttgaatgaatgctgacaagctatcgtgcatcaagccagtcagatcgttgcagattgttgtgaccaaacatgtttgatatgggccattcattactcaagctaaatttgcaatatcaagtccgaattgtctgaagcccctatatgggaaatccttagcaccaatttccagattataaatgcccttgagggcattacttcctattaatactagagcttgaccaagcaa

SEQ ID NO: 591 - DNA, 511 bp, Oryza sativa
gattgtggggtatcagacacatcctccatcggcattcaaacatgttttattaatgccactaaagatgatgctgttataactaaatcagttttgcgtattgagcgatctgcttcttctaaacctctggaaaagaaacttgagttctctgatgagaacaaggaaaatttggacaacacaattgaacaggcaaaagatggacagagtgcaggaaattacaaacacattgacgagcaggcaaggggggaacggcgtactgcaacaaatataactactacttatgatgatctgccaggcaatttagtaagtacttccagtttttgatgatatttagccagttagtatgtgtatcatatttcgttgaggataaaaggtagcacctgtatagtttgtgaggtgaaccaatcagagtgggtccagtaacacaattaaatttagcattaggccagtcccattgggtgccacataagcaacaaggtatttaatggatgattgaaatatctcttacaatgca

SEQ ID NO: 592 - DNA, 574 bp, Oryza sativa
gcatggcccagccgcccttgagcacgcagataaagcagctggagcgggagctgggggtacggctgttcgaccggacgagccggggcgtgaggctcacggaggcgggggagcttctgctggaggaggcacggcggttgttcgtgcagctggatcagacgacccgcctgatccagcgggttgggcacggcgaggtgggtcgtctggcgctggggttcgtgccgtcggccacgaacgaggtgcttccgccgatcctgcgggagttcacgaaccgcttcccgggggtggagctgtttctgcgggagatgcgcccggacatggtggtgcagcggctgcacgagcagcagatcgacgcgggcttcctgttcctgccactggaggacgcggcgctccaggtggagcgcatctcgcgggagccgctggtgctcgcgctcccggagtcgcatcctctggcctcccgccggcaagtgcggctgcaggaggtctccgaagagccgttcatcctccccgcccgctacccgatgcccgggctctacggccaggtgacggaagcgtgccgggcagcgggcttcgagcc

SEQ ID NO: 593 - DNA, 2901 bp, Oryza sativa
gagttaaatttaggagttggagctataccaaacaggccctatgttttgcaatggacacgaattgaatcggcactgttacttctgtaccggaagaacgaatcaatcccaatttaattatcagattgattccgttattactccagtaacagacggattgatttctctccctctcgcgcactatataatcccaccaccgggacagacagaggatgcacttctctgctctcttctcttcttctctcctgcactgattctcctcggcacatcctgattcttctgttcatgcgctaagattctgcttccccagtaacgaacacttgcgcgcatgagtgattgggacgagcaggccttcgaaactccgtccgcttaagtacatgcacgggtaggcggcaatcaagtttttgggagcgcgactgctctgcatcggttctccacggtattgtcttcttcctctacatcgactccctactctgcttcgtctacttccactacttcaacatatctattggtggaggcgctggtggaggtggcggcaaggacactggagaaggtgagaacgtcaacatcaacggaggcaacaacaccaataatgcctcatctagtaccaaagcgttctccgggtatgtttccttcttcactatagcgttaaaacatgtttctcgatgatgcttttctagttattagcatgtacatgtttagcacttttagtagatcaattcctattacacatgtcatgtttattatcttatttttctggattaaaatatgttgaattatgatcaaattttcaacaacggccatatttctttttagaaaatggattaaaaccggcctctacatccaaaacacatgtatacggtcatgaaacatataaacccaaactcgtcacaataaggtttcaacaaagtaccatagacaacacccaacaaaagagacaacaagactatgcttccaatctccttctaaagtcccaccccaaacctttgcataaatctctctgacccttgcttccaacatttttcagcactccttttcaactggtgaccatccttttctttaagcaacgatcaccactagcgtgcccagtatgtcttcttgaagatcacctgtaaaaataaattagttttggagccattaaagaccacactatctctagttaaccatactgcccaacataaagccgcaacgtccacaaaaatttggtattctagcctagttccaactaccaaaaagattaacaacaatagcaagcaattgatcaatcccacaggctataaggacaatattccatacacattttaccaaacgataataaaaaaatagaggtgttgtattatttcattagaattacaaaagcaatatttaatgctacccttctactttctttttgctagattatgtttggtcaaaatgaccctctctttaggtaccaatggaagatcttgattttcaacgaaattctaagcttccaaatgaactatatgtcattgtagtcacatataataaaggtgaatggagaattggcagagtctatgatcccctctagatgtttaatgcagggagatcctctctttccatacctattcttgatatatgcatatggtttttatccttgctaattgttggtgaaaagggagggtacaatacaccaagttgtttgtttgcaaccttaagtcacacatctgctatgttgacttattttgctgaagttgaatgcacataatttagaacatatccttgaggtgtatgagaaatgttcaggccaagcaataaacaaggaaacacagccattatgttcagcaagaacttaagtcagaccggtaaatctcaagtaatggtactataatgctagatctgataagtacttgggacttccactatacacttatcaataaagaaaacgagaacctttgcttatatcaaagaaagaatttagcaaagcgtaaaggggtggaaaaaggagatgcatgccaccaaaggaggggaaggagataaggattaaagctataacattttaccaactgagggaaatgtctatcgtgcactacatgtgatgtgtaggcaaaagtgacatcttctaaccaaacggtagtgtgaagaaattaatatcatgattagacgatattgaaggagctagaaaataaatagaacaagatgcactaggtgtcatggggctgggcagaatgaggaaacagatgagtggagatggtttgtacggcttcaacctcagcatgcttgccagacaaggttggaaattactgcagcaaccggattcactatgtgctaatgccaagaattttattcagtgctggaggctagacaagtgtgaggtatgtcttattcatggaggagcattcgtaaagaaaagtgttaaagcaagagattatttggatgatcaggaatgtaaaaacactttgaatttggaaagatccatggttactagtaggtatcactaggaggccgacatcagcccagggcaaccactaggtaggcggtaggcaccggtgctggtagcaacaagcacgtgagagaggtgctactgaactcctattgcctaatccactttacacgtgaggtagttggtacaagtgaaacacaagtcggggctaaacaaaacaaagatagggttggtaggcacgggaaaaaaaacattgaagccaacaacacttacgtagctagtttcatgccttattgcttagcgttgctgtcaaaaaatatgatccaaaatcgagaaaagaacaagtatccatccaagttttcttactaattaaaatgaacttccatttatcttgaacctaattatactttttatccaacacattttttcaacaaaataataatatattcatgaggatatgacaacgcagataggggaaagtcattagtagagcatgttttctt

SEQ ID NO: 594 - DNA, 559 bp, Oryza sativa
aacctaactgttcttctagtttgttcaaagcacgccttattccttgctttccaaatcgaccacgtcacagcaactacccccactaacaggacggagttgttttgtatctttgtcacagtgttgtccatataccaaaagtatgttgaatatttctcacaggtttcaaatcgaaagcacaagccaccacatttcaagtaaagtcatggggcagtaaaaaaacagatgttgtattgtctcttttttatcacagaactggaaagtttcagtcccttttttctatcctcttttcttaaaattatctttagttaacacgttgtttctcagtagtaaccacacaaagatcctaattttaagaggtactttgatattccgaattttttttatgcatccccccaccgtgccgggaaagggatcctctgacttaaccgccatgtagttaagtcactgacatgtgggccatagcaaagtaggacccacatgtcagtgactcaactgcatgtgcagttaagtcagaggatctgctccccccccctccccaaccattgaggctgtctcttgc

SEQ ID NO: 595 - DNA, 6797 bp, Oryza sativa
aatatacttagatgcaataagatcttgacataaagggcagatttaacatgtcaataaaacacataaagcaaatgtagttaaatcaggtaagattggctaaaaccccgatgctaccctaatcggcaaccagaaggcaggctagagttgatattctaagcacgacttaatagatcaaactcaattgatgcagcattaagtatgaaaagaagaacaatatctagacaatcaagccgctagaagtttcatagagtggtagatatcttatataatctaaatcaacgtcgatgtctaacctaatcggttgtcctctactgaaagatgttagccgattgtaggttagatagcgatattgccagagattatgtaagatatatgataactcgacgaattacataaacaagattagagtgtcataaaaatggaagcactaatcccgagaacgcaagccgtcataacaagttttacctcttgttgaagatcgaaaccgatgcagctcaacccgaaagcaagaactcgtcgaaataaaactaaagaaaaagggtggcgatgcgccgagattgtatcgaacgtgtgtgttaaataattacaaggggttcggggtcaatttatacccgagaattacaaactatctccatatcggacacgactcttatctctaacaaactctaagatatcataagtctttgcggcagacatttgcccaaacatatctctaaggaaattacataaaatatcctaattaatagatacaattgccttctcaagactctacccacgtgtggcaatcatcttgaagcatatcaactcaacccgatgacgtacaccgagttgtattgacggattcaactcaatcggctaacctcgtccgactcgaactctgccgatcttagccgtagccgactcggacttcagccgattcttactctgttcccgaattgatctttgcctttgactccgcttcgatctaatcctcttttctgatggtgatattaccaaattcggtcgttaacaccacaaaaataaattttccatgcttccatgtgctttcttctcagaaaaaaagctccttttgaaaaaaaaagaaaggggagggaaaggcatggttatgaaatgaaaaaaaaataaataaagttatactccatcaagcatgagcatgatgttaaaagaaatttttgtagccatgcccacttccaataaaagaaggatttttgggagaaagaaagtaaatcaaaaaggagaagcattaagaaagtaaatcaaaaaggagaagcattttctttattttcttcatgcaccatttacaccatatatcacacactttatgcacgatcttgatcttgagtatgtttagttatctgctttagtctaagtttttgacttagtaataaatgtgaatgcaagtataccatgattgatccctaccgagcgccacatatcaaaaccttagagtaggaatcaacaaggcaacatttggtgaggaattcattttgatacacttagagagactgagtgaatcacttgaggaacttggttttgtttttcaaaatcatttgaaaacttccggaacaagagttgaataaagatcgggtgattggtgctttaattgctgttctgtctttcaaccgctcaaggcaaggagaagcagtgtctcgtgggaatcaggggtaagggtaagccaccgtgccaaaaattatttaatctaagagagagtacatataccttgcacctgtatctttgagatatgcagcatagtagcaactcctgatcaacaaccaagtcattgtttcctttcgtccttcactcgggacgagcaaaggttcaagcttgggggttttgttgacggtcattaacgatcagtttcgaccatcaatattactaaaacatgagagaactagtgatgcttgcaatgcataaatatgttagaataataatattccactagtattaggtctactaaccttttgcagagaatgacaataaagtgaaggagaatcgacatcaagtcagacgataaatcaatcggacgatgtcgagaaccagacttgtgtatgaatgggccaagaacgcagacttgacacgatgaatcaggccaaaattcacaagtctacgaagtgaagcagcagaggaggccgccagccaaagttgggctggattgggccagccccatgttcggacgaaccttgtggttcggccgaacctgcctcgcctccgttggatctaggttttggttgtacggtgtagatgaagcccctatgacggttggagggtattaccgaccattccaatcgtcacaaccgtcatagttcagctagaaaaggacttcaccttctcacttcacccacacacttcaagcaagagctctctcattcctctcaagtttagtttagtagtatctagctggtggaatagaattagaataggaagcaggagtctggaagccttcggaagagttcgggtacggctctagtagcttttctttcctcttttgtaagctttgtacttttattaaatactcttctatatacatttatggtattgaaatactttccgagtatatgagtaccaactttacattatgttcatgttatactaactgtacggctagcttatctgggagatgctttggtgcgggtatagtgtttgcatatgcaattactctatgtcatgacgatgatattagagtagtatctggtaagttagacgtggtgtctagattatgggatatcattatttggggttatatattgcggatgagaggtgggccgctgatggtgacagctcagtacgggtattcctccgcgcctatatataatcctaagttaatttcatggggcgggtattcctccgtatttagccctggttggatggtcatgacaggctgtcgtaaggaactcggcaatcaggggtggcttctcgaagtactaggagggcatcggatagagggtaagccaccgtgccaaagattatttaatctgagagagagtacatataccttgcacctgtatctttgagatatgcagcaaaatagcaactcctaatcaacaaccaagtctttgtttcctttcgtccttcactcgggacgagcaaaggttctagcttggggggttttgttgacggtcgttatcaatcagtttcgaccgtcaatattaccaaaatagaggagaactagtgatgcttgcaatgcatatatctgttagaataataaacttccactagtattaggtatactaaccatttgcagagaatgacaataaagtggaggagaatcgacatcaactcagacgataaatcaatcggacgatatcgagaaccagacttgtgtatgaaaagggccaagaactcataattgacatgatgaattgggccaaaattcacatgtctgtggagaagagaagtccaggaggccacagccaaattgtgggctggttgggccggccccaggttcggccgaacccatttctcgaccgttggatgaggggtttggtagggacgcgccagatctactccagatggcggttgcggggtacatcggaaaattccccttccacaaccatcataactacctatatataaggagctcactctcttcacttcaacacacacctcaagcaatagctctctcatttctctcaagtttagtttagtagtatctagctagtggaatagtaatagagtagaaatcaggagtccggaagccttcggaagagttcgggtatggctctagttgcttttctcttctcttttgtaagctttgtacttttattagaatactcttctatatacatttatggtattgaaatactttccgagtatatgagtaccaattttacattatgttcatgttatactgaatataccgctagcttatctgggagatgctttggtacgggtataatgtttgcttatgcaattactttatgtcatgaaaatgatattagagtagtatttggtagtttagacgtggtgtctagattaggggatattatttgggattacatattgcggatgagaggtgggccactgatggtgatataatcctaagttaatttcctggggagggtattcctccgtatttagccctggttgtatggtcatcacgggctgtcgtaaggaactcggcagtcaggggtggcttctcgaagtaccaagagggcatcggatagagggtattagctagtatatcagttaactagaatgtatgtatacgtatcatggttcaagaaggcgctaggcgctagttgggcggatagggggcgcctagcgcctaattggcgcctaggccccgcctaggcggcgcctagcgggcgcctaggtcgggtcaaatagttaaattcaagaaattagtaggcatattgcatagaaattagactatataacactaaaatagcaataaaacacaacctaagtaatttaaccgcctaatgcaccattgaatgcctaatcgcggcggctacccggcgcctagcgcctaatgggcgcctaggcggcgcctagggccgatttttagaacactgatacgtatattaaaagtataggaatatattatctttctcttttctttctacttagctcacataatatattacgagaatgagtagtaatgcttgtgtcactctacccttggattatcttaacctttgcttagaatatgattatcacaagtaatatataaattattagttgagttctctctacatgatctttccacgggataaaataaatacgatacccttggaatattctcaggtaaaatgctacaatggtatatccgtgtgcttgcggatgaactctgtaaccataatataccaggagtatttctgcgccattgctgggaattatatttctagtaatatcgttaagaaataccaacaaccatcatcttgagggcagcctcctcgcaagcatgatcaactatgcctgcacaagctgtcaccaccatgttgggtaggtaggagggaataccatggacctcacaacggacctggtgtgggaacttgctactgagaggacaaatcctggtgcactccagctctgctgggaaaccaaccacaaatgccatgcagacgagctcagcaacgaaaccttccatgtcctgaccatggtgcgtgttggggcggctggccatctatagaagacaaaggagagagaatcaatgcatgctcaaatccaaatataagcgaaacgataaaggactcaagtaaaacaaacaaataagagcaaaattttgtacatatattattttgcatgaacgaataaatataactgacataactgagcaataaagtaatgcggaaattagatacataataataatcacaacataaataaactttgcaaccaatacacctcagctaggacctaatgcattcctcccattaaatctcgactgactgtcaaataagtcccaaataattttactaaaacccttgactgacctctttaataaatttcaattgaacgagcgatcaagatttttcccataaaccgaaggaacgaatcccaattttcctgaaacaaatccaattgcacagaacaaatgcaataaaaaggattcggagggctcttaggtttccatttggcttgtcctacgatcaaggtcggctctaagaccagcttgtcatgcccagaaattcccgaatagaactccaagcagaatgtgcattaaaacccattcccaggaccggccagggtacacaaacgacaatattgacatacagatccacgtcttacaaacattataaaagtcttacataaatgcagtggaaaagaaaaggtaaaataaaactaattcttgtcttggatagtgagcggcgctattccacaagcatcctcgacggcacggaccaagcctactcctctgagtagccaccatcaaaagcgtactcgaactctagggttgggagatagagcaagactgagtactacccactgtactcagcaagtcataccggaatagagggtatgatacaggatataaccaaggatagctaaaggggttcatttgcataaagctagcatttaagaataatagttgaaagcagtaaaacagttgtagttaattaatcaatattaaatcatcactgctcaacgctacaccacgttgagacaaacccaaaccaccacctgaactaaccagttcattaagccaatttattaagtgggattaatcacagtgaatctggtcaaccgcccataaccgtgggcacggctattcgaatagttctactctgatcagaggtgtacaatggtacacacaagatagccccacgacacgttttcgtgcgccgacatgccaccacggcatatcggaaagaggccgtgacaggaccattcgcataatcccctctaaccaatcgcaccgcaccctagcaggcaacgggcagcttcttcttgtgccacggtgaatccggaagctgcatagacgtcgcatggcccatccaaactccatcacgctcaccctagcctgggtacgtcagctagaggaaagctacactacaatctcagccgttgccaacgctggcttgtggtaagtacactaaattcttccagggtttcccgcgaaacggtccttaacctccatgggtgcgactagcaaaaccatgcacccacagcccaccatttagtgtattttagttgattaacaccatcatggtggtacatgtccaaagttatgctaaaccaatgtctaagcatttagcgagaatcccccattgtgtgctagttcgactaagcaaggctaagcaagtcctaatccaacatctaatcatattacaacccaagatagcggggtgcaggaa

SEQ ID NO: 596 - DNA, 11912 bp, Oryza sativa
ccgtgtttatataggggcggggagctcggacgtggccgggaggagcacgaaatggccggcgaagtgggggaggtgtgagaggagagagaggcgggattcagatttcgaatcccgggcatctcgtgggcgcgggcgagtggggaagggggtagtggggcgcgggggaaggcggggcatgctcgttcgttggcgacgtggctcgggaggggcgaagaaggtgggagaggcggttgcagcatgggcgtcgacggcgtccggaggttgtgggaggacctgacaagtgggccctacctgttggtgaccccgggagagaaaggagggggcacgtgggctgcgggcttggcctcgggccagcccagcaaggcgcgcgggcggaggggaaatgggctgacggcccaacaaggggaaaaaagagagaaaaaggggaaaaagagagaaaggatttccaggggattatttaatgcttgtgcttaattttaattgattaaaattatctccaaggctctgaaaattccactaaaatttttgttagtatattttgacatgtagaactcaagaaaaatttcacatgccattttacggtttctctcttgacttaaaaattttcttgagatgatttattaattttaatttctgcttaggaagaacttcaggttgtggcatgctgtaactcccgtaatctgaaactccctcctctaactcctcctttcgtgatcgtgatcgctgtaactcctctaactcctcctttatgtcccgtactctgtaacgtaattgctgtaactctgactccccctcttggctactcccacgtaagcgctgtaactcctctaactcctcctctcggtgtcgcgcctgctttaactcctcctctagcttactcgctaacactggtggagaaaccatcttttatcggtcagccaaattccacaataatcctggttctaataaaaactgggactaaaaagcatctttagtcccggtttaaaagttgaggggtacttattaccaaccgggactaaagatcatttttagtcccggttcaagaagttgaggggttcaagacagaccccgattatttttactaccggttggtataaacaaccgggactaaaaacagatctttagtcccggttgtttatatcaaccgggagtaaagagtaccccgaaccgcgcgccagatattatccgtgcgccacaaaaataattgtttataccaattgtttttacttccggttggtataaacaaccgggactaaagatatctcccccttcatccccttcctctcccctttcccctcccgtacctccccttcctctccccttcccccttcatcccgggcgggctggcgcggcggccagctggccgggcgggcgcggcgggcgcggcgctcgggcaggctggcgtggcggccggccggccgagctcgcgcggaggccgcaaggacggtggccgggaggccggcggcgccctcctctctgctgctgattttttttgaatttttgattcattggatttgatctgtgatttatgtgatattagatctgatgtgggagttgtgatgtatttcttttaggatttgtgatgtattttttgtttgagattttgtgatgtgatgtattgtgatctgtgatgcatttctttccaatatgtgatgtatttctttccagatctgtgatgctactttgatttggggatgatttgggaatatgatcggggatatttagggagcagatcgatttgagaaaaaaaaataaccggaactgctcctgatggatttttagtcccggttattttacccgggagcgtaactcctctgactctttcaataggtgtgtctgcgcaattcccgttccagttgctcatccacttgctgcagtagaagcaagcgccctcgttcccgttccagttgctcatgctccacttgcagctcctctattgtctggcgttttccctgacgcccgcgttccagttgctgcacgatttcctgatcctgctgcggcacatccactccaagcttcaatcgtaacttccgaagactttctcgcccctccttgatctccttctgtaggcgcccacgttccacttcttccttctttttctcttcttctatttgacgcaggtccatgcgcagaggcgacgcccggtaaacgcggacgccctgcctgcgcatgctatcatagaacctctcgggattccagacggcgacgtaaacgccgatggcgtccgtgaagttgccactccggccgcagaagccgacgatggaccccgagtgctccatggagacctcgaaccgcgtccatccagctctgtcttctccaagattgccgtatggtccgaacgtcctgttccggttgctcctgaactgcaaccaccggatgaggtggttgtcatggtagccgcacatgtgcgtcaacacctccccatggaagtcgagctcctcctgtgtgcgtccatgcatcaggttatttgtcagtcagtgattaattagtacaaagcatctctctgcaagctgtttgttttaacggaaaggctatatggctgttgacagaaaaaggatggatggatcattcgttttttgggccatccattcatctttgagattagtgctgattatgttcgggctttgatagacatgcagtttttagtcctttgactgaccttcgtgggacccacattaactattgaattttgaaattcgcgcctgcattatctctgtttgagagagagaaacgtagagatttttctatccctgagacagaaatcgagaggggaggacacaagagaacagatttttgatatttgacttgttctttcggatattgcactacgattcgtcctagaacagtgcgagatgaggatgagggcccgtgtttcgacatgcctcgtggtatcgtggtagtcaacgtgactcgatctccgtgcgaaatttctgattttgcgcgacgtgactcgatctctgttcaaaattttcgatttttcacgctgtgtctatagagtggtttttttttctattgtatttaacgttttcttagccgtaggattatgcgctaagattagtgcagaaaattacagtgctatataactaaaattacattcgtaaattcagttgatacgatatgtaagtgcactgtaattttgataaaaatactgtgtaaataaatatgtatttattatttcctttaaaatataaaattacaattctatagacctaatattacatttgtaagttaagttgatatgacatgtaagtgtattgtaatttcactatagttatactgtaattacaatgtaactataatagaattacactgtaacttttagtgtaattgcagtgtaactatagtgaaatttatcttctatgcattagcatatacctaattgagtatatgtctatgggtaattcaatatggaagtttgctagttttatggatatgggcattttagtagatctgaaagtttgttcttggatatttgacatgtttttgtttagcttatttgagctttaaattgtgcttcctgttttttttctcgctatatttttgggccagtgattgctcctctaggtttatttgggcatgtgatttattagatattgaatttgggctttagaatcagtttgttgtactttctggtttgggctcaagaaatttgggccttcgtatgggcatgtgtttgggctcaggaaaaaaaattgggcctccaataaaatcatatatgaaatttgctcttttattttttcagtttgttttttatgtcaaatatttccagcggttagatctttatcctaaggctataaaatctgcatgatttgagcataaaaattctgtcaaataattttctcccaaattaaaccgttcaatcgacgactgagtatttgtctgtgtttttacataattaaaacagtggaaaaattaatacaactccacgattaaagaagagtccctactgattctataatacaactagttgataagttctattagatcatgattaaatgaactagtcaccggctcaccgctcatgaaaacctttatgagattgtcagaagcaagaagcagaggccttgggctttaataaattggtcatgatctgtgcccatcgtcgttaccaggagttgttttacgatacacggtacaagtgacaaggggcactggtgtgagtaaattctaaccattcatttgcgtgggcatttctttaaatggtatattaattgtaaaatttacccacctttccaccgaaggtaattaagtcaatagtttctttctctacagctacagtactgaacccttagcgcatcattactgcaaaagcctcataggtgtgagttcatttaaaaccggcacatataaacctttccctaaatccacaggatgaaaaaggatacaaaaacgtcacctttgggtaactatatatgctggttgtagaggaaaatcaacacaaatactataggtgtcggttttttttagaaaaacttgtacctataatttataggtactggttaagtaaaagccacccggagcgggcgacgaataggacgatgtcggatgttggtggcgacggtggctaggtttgcggttcgatgacggcagcgacgacaacaacctccagcatgctcgatgttgacacgagggtggcactggcagcggaggggtgaaggcggatcaggtgggagtggaggatgcgcagcgatgggcatctaatctggtggaggctggcctttagtgagcccgttccggttttggccagccttgagcttcttggatccggtggctgtgggttgcggctcagaaaggcaggaccacgatgtagtcagatggatctagcccgccgtactcttcatcttctgcgggagaccttgatcgtctgggagaccaccgagcggtgtcgagccttggggcatgccggatctggcggttgtgggttgggtggatgtagaaggtagagggagaggaaaaagagataagacgagaaacaaaagagcaaaagattattattttaagggtttgagagaaacgaggttacgagagctggggtgttttttaatctcattggagcatgatttgatcactaacgctaaacaaatttagccatattccattttagcaatgtgattttggaatttattttagtcatcttatactgcttctagattttgatataatcattagatttgagcttagttttttttttagattacgtagtgaactctagtttatacctatgatgcagttctatggttagtttttaatctatctagattttactgaactcctggttcagactaaaatttttttagatcccattcatctgttgtttttcgtatttattgattaaaattaaatatgtatataacttatgttgaaagttatacatcaagcggatttgaataggtgatgttctaatgattttcagttgtagtggtttgctgatttcactgttcacgcattgtagcatcgcgtgattgtcgacggtgttgtgaatttaagtattgtgtttggtcttcttttttttattagggtggttaatttagggctgtcatagcattataacagattaacagtactagaatgattatttgttttatttctgccgcttgtttgtttttgttgtatacattgaaattaaaattaagcgataaccattcacccccttctgatcaaggcaacctcgctacaagtgccatgcgtacatcaagccgctcctccaaagagtagtccaaagagtagagtatatatagaattttgaatccaggatgctataatcgatttttaattgtcaacaaaaagtatttagattttgggtagacatggcagtaataaatataagtttctaataagatagagtagatcctataaggagtggagaaattgttttcacttggaaaatcacttcctaagaacaaatctatcaagtattgcttgctacatacctcgggtattccattgcctccctctccttgcagggtacctttcacacgtttgccattgtcgtcgtattcaaacaacattgagctgacacaccaggaagaccctatactcattcggcgtacaccggtgtaaccgccagcactggcaccatggcctccctcatcccaagcatggcctccagttccaccccacggccctatcttcacacgctgaagtgtcaagaccattaatacacctatcactggtggagaaaccctttgtagtcccggttcgtaacccccctttagtcccggtttccaaaccgggagtaccaatccgggactaaagatcgctatctttagtcccgggtgaaataaccgggactaaagatagagctgacctttttttttttgcatgcccctgttgctgcatggtttatatatatatatatatatatatatatatatatataaaccatgcatatatatgtttcaatacatatatatgcatacatatatatatatatgtatttatacatatatatgttatgcaaatgcatatgtatatagatatatatatgaacaaaatatatttacattatagaaaatgtgtacacatgcatatagaaacatatgtagtcatgtattaattacaatccattatatgtcctagctagctacgatttcgacgtagtagtactcgctgctagctcagaagctaaggaccggtgaattgtgtttccgtcgtagtagaattcacccttgggatcaaggatttcttcgttgatgaatcccatgagttgttcttgaaccgccgcgataaattccttgtgtgtggtcaggttatccctcatgcgaataaactatatgaatgtatgaaattgattagtaattaaacaagaaatcgctacgtaatgaaattttgaatttatttgtacgtacatcgagctctcttgtggtgatgatttggtctgcaaggcagtggcaatactcgcacacgtaatagccgcacaagttagttccctgcttttgctttgcgcactacaaataaatgacaaacaacgagagatctaattaatatacacttgtatgtatttgaatcggagaaatataaatgtagagcatgtgtactcacaggaaatttgaacttccgcctaagtctttctctccatttgccgcggaccaaatgacggaaccgataccaagccctacatggagtttaaagctatgattcgtagtagcaattaacataacaagattttcttaattaacaaaggaacttatgacggtacctgtctataagttcgaaaaccttgtcaaacgtagactcttttttatccattgagtcatatacgttgacggtgcaggcctccaggtcgatgagtaaaagcacccagtggaatctgtaatgtgcgtgggatgcattacatatgaaacacttagcaagttcgtacgggaatgaaatttggtatgtaggaagacagtaaaattaaactaactctgtgttgtatggcaacagtatgaacgtcttgtaatgctgcgccttcaggagatggacgagattgtcctctgtttcttgtggatattggtcgagcattgcgacgtttactttccgagggtcgatgaatccagtatcgaaaaccctccgccgtcgggccctttgaatctccattctacaacgataaaagggagtatattattttctatggtctacttatatacaaggacctaattaattaaaggagacgtatagtaagaaatctaactgaacgatatacttacaaaatccagcaactcataatacagacgtcgagggcgtccagctggtatagttcgtagattcccctgaaattgatccagagaatgtcatctccttgcaagaagtccgtgtccctgatcctcgctccgatcatctctctaccggtggcgctcatctccatgtacagctgatggaacttgtacatttgtgtgggtagggactgcagcagctcaggcttgacaagcggtttaccgagttcgtacatgtatttcacttccgccttttcgattggtgcgactcctagcaattgatccgtagttagaccggtgtcagtaataaattgttctatcgtcatttctttaccggtcaccaacggctcgatctcctggtttggttgctctccaagctgagggactggtttggactttccagaagatgctttcttcagcgttcgctcatagtccgatagcttgatggcctccttgacagatgcagacatacccctgaagaagttcctgacactggggtctataggaatcttcttttctggacttcgaggcttgaattgtctcttgacttctgatgcaacgtaagcgtcaagctcctcttgcgtgcaatcgtaccccgggtccttgttcttggcggcgtcaactttcgccttctttgttgcccttgtgtgggcaagcggtggagctgggggggcccttgactttgaaggtgccggaagaggagcttgcgggggagtaggtgtaggagcacgaggaggagtcggtgcaggatcctgaggagtcgatgctggagcctgaggtggagacggtgctggcggagcacgaggaggagacggtgcaggatcctgaggaggagatggcggagccggaggagatggtgcacgagacgccgcttgtcgcccagggaggatgatgtaccgcctgcgccatagaataatggcatggcatgtgtctcgtagatgcgtctcactgtctcctccagggtaatccagctcgaggtcctcgtacgcgccttcgaccaactcaacttcgaccttggagtatcctgctggaatcggcctgcagtggtaagtacctgaagggtccgttgggatggccatgcccgacgccaccttcatgttgtgagagattatttattagtaatcaacatatataagcagcaactagcggaatggctaaatcttacctttattgataagtttttgaaaggaatatgcagctcacatggtgtccgctgagtgatgtcatcaacgggacaggtcgattcgtcctgtgtttgcatggcgtccatgctctgtgatcctacctgccccgttgaggcgcagctgctacggtttcctgacgggctcaccattgcaggaggaatggtcggctggggatcatgggaccgatgtgcggccatgcgttcatcaaccttccttgcaacctcctcttgcatgttgagttcgtagctcgatacccggaactctaggtctgcaatcttcgcctcggtatctctcttgctcctcatccgactcctgtacgtgtggatgtcctccttgaaaccaatcttccaaggaatcacccctttccctcgagttcgtcctggatgctctggagtctgcagggcgagtgtcagctcgtccctatctctgtctggtcggaacgtgccctgagaggaggcctccactgcatctgttagtcgtcgcgcagcctcttgtatctgatagccgaagaccagtgagccatcagctgggttgagcgttccaccgtgagcatagtaccagaacttcgatcgttccggccaattggctgttgccggttcgatacccctctcaatcaagctagcctccatctgctcccacttcggcatcgcgacgctatagcctcctgaccccaagtggtgatggtacttcttcttggcggcattttctttgtttctttccatcatcgccttcccttgttcacctgtcttatatgcaacgaactcgtcccagtgatcccttagctttgggaatgtgtcgaagttcggtgtctgccccttcagtatatacttctggtacagatctcccttgaagctctgaaactgttctgccattttcttcagagtccaccttttcactttgtcctctgtacccgcaggaagggtgaatgtctcgagcattgtggtccacagcatctctttctccgaatctgggacaaagctctcatgatctccgcgtgcccttgttcttcgccagtacaccgtactgacaggcacgttatcccgcacaacccaaccgctgtgacgtacatagttcttggcggcttcggccggggcactaggacgtccatcttcttccacttccgttatgatgtgccgaccctcaagcttcttcgctgcacctcgttgcccgcgtgccctcttctgtccaacggagggttgactaccactagcctcctcctcctggttcccctccacatccctttccacgtgcccctgctggttcccctccgcatccctctccacgttcccttcctcgttcaagtactggtttggatcctcgttcccctcttcttcattccagtactggctgcttccctccgcgattgtatcgtacaatatctgttcctcatcgcggtcagccatctgttgatacaagaaacatctgctaagtcacgagacatttatgttttaacaatctaattcatgtatgctaagtgtaaatgtcgtacattagaaccctacacaaccttacgtgctaagtctaattacaaatcgtgatataagctaagtctaggtgacgtatattatacaaccctagctagtaaataattatatactaagtctaattacaaataaaataatcttatattaaaactcaaataatattacatgctaatactaaaatagtcatgtatatgctaagtgtttcgtgcgtatatgctaagtctaattaagactacaatagtcaattgctacttgtcacaccaattccgtagtcaataattacataccaagtctaattacaaataaagtaatattatattaaaactcaaataatattacatgctaagactaaaatagtaatgtatgctaagtgtttcgtgcgtatatgctaagtctaattaagactacaatagtcaattcctaggagtcgcaccaattccgtagtcaataatgtcatactaagtctaatttgcaataaaataatcttatattaaaactcaaataatattagaacactacacaatcttatatgataagtctaattacaggtctaataatcttaattacattgcattacaaatataacaatcatttatattattacgtcacttgcctgctccaattccttctagggctagctcttccactcaggcttgacggacgactccgacaacacgtcttttctgcaagataaaaaaatgtattaggataaatgcgaagtaacatatatatatatatatatatatatatacatgtatatatatatacatgtatatatatatatatattgcatttcacgttaacgttcgtcctcgttcgttcgctcgttcacgttccctagctcgttcacgttcgttcgatcgttctcgttctcgttcacgttgtcgcggcaacgtacgttgacgtgttcgttctcgctctcgttcgttcgatcgttctcgttctcgttcgttaacggcggtgtggcggcatcggggcggcggttggcgcggcggcgtggcgacggcggcggcggcgtggcgttgtggggccgtggcggcggcggcgtggcgtggcggcggtggcgtggcgtggcgtggcggcggcggcgtggcgtggcggcggcggcgtggcgttgtggggccgtggcggcggcggcgtggcgtggcggcggtggcgtggcgtggcgtggcatggcgacggcggcgtggcgtggcggcggcggcattgcgcgcgcggcggcgaaggcggcggcggcgtggcgacggcggcggcggcgtggcgttggcatgcggcggcggcgttgcgcggcgtcaaaggcggcggcgtcgaaggcgacggagagagatcgagatcggagagatcgagatgcatgaagggagatgcggcggctctcaccccagagatgcggcggcagcggaggaggcggaggcggcggcgaggaccacgagctcgagacgacggcgagatacggcggcgtcggcgcgggcatttgccctaggcagtggcggcgaaggagagaggccgagagagatcgatcggccgagaacgtttaagtgttggttaagaag

SEQ ID NO: 597 - DNA, 536 bp, Oryza sativa
acccaaccccacctacagccggaaccttcgggacaggtaggtaggactgagcccctagcagcaggacaccagccttgtgccatgacatctcgactaccgggccgcagctcgtgtagccttcatttgtcctagagatgtccatcgacccccgacttcgtccatctccatccgtgtacttttgtttataaccagactgagccacaaactaagccttacccactatacatgtggaagtacggtagtgctttgcaacagaggcccgaagaccggtccttatgtggccgaggtgctactatcaaaaccatgcaccccaagcccagcctataaccattttgagagttttgaatagagggagaggtgtgcatccaattccacaatagtccaaccatttcataaagtccaagagatatgaatatttccaaagtctaaagttataaaaaccacctaatgttgtcttattaatcagcgaagcatctatctaaattcatactaggggaaccatgagtagagcgcccactagttggggttttgtttat

SEQ ID NO: 598 - DNA, 3464 bp, Oryza sativa
gcaagttgttggttgatcgactcgttacccatgagatgttgtcgtagccacgcggggaaagtatcaatgtgatgccgtgtaatccatgcatcggacttaccgatgttcctggcgcgaactagagccaagtgctcctcgatgtaaggagctaccaatgaagagtgttgcagaacagtgaaatgggctttacggaataaattgttgtctaccgtcattattgctttccttccgagagttccctttccccgtagtctcccttcatggcgtgattcaggtaccccgattgggcgaaggtcttcgataaattctacgcaaaattcgatgacctcctctgttccataacccttggcgatgcttgcctctggacgagcacggttacgaacatacttcttcagaacgcccatgtacctctcgaaaggaaacatgttgtgtaggtacataggcccgagaatacggatctctttcacaaggtgacaaagcagatgcgtcattatattgaaaaatgaaggtggaaatatcaactcaaaactgacgagacattgcaccacttcattttgaagggcttctaatctatccggatcgatgaccttctgcgaaattgcgttcatgaatgcacatagctttgttattgttgcccggacattgtctggaaggataccccttattacaactggtagcagttgtgtcatcaacacgtgacagtcatgagactttaggtttatgaacttcttctccttcgtgcttattattcgcttgatattcgtggagtatccagacggtacctttatgctctccaagcattcaaacatactttccttctctgccttgctaagagtgtagctggctggactcaagtaatggcttcctttctcctttggttccgggtgaaggtcgccgcgttgttccatatgcttcagatcattacgtgcttccagtgtatctttcgactttccgtatacacctaggaagccaagaaggtttacgcaaaggttcttagtgaggtgcatcacgtcgattgcgtggcgtacgtccaagaattctcaatatggtaactcccaaaatatagagttctttttccacatcgccgcgtgacaatcttcgctctctatatgctggcttccaggcccctttccgaacactactttaagatctttaaccatagcaaacactgttttcccgctgcgatgtttaggattcgtacggtggtcggccttatgttcgaagtgcttgcctttcttccgtaccgggtggtttgctgcaaggaatcgacgatgacccatgtatacaaccttcctacagtgcttaagatacgtactttctgtttcatccatacagtgagtgcaagccttgtaccccttgttggactgtccggataggttgctaagtgcaggccaatcgttgatggttacgaacagcagcgctcgtaggttaaactcctcctgtttgtcctcgtcccacacggggacaccttccttcttccacaactgtttaagatcttcgaccagtggtcttaggtacacgtcgatgtcgttaccaggttgcttggggccttgaataataatcggcatcattatgtacttcctcttcatgcatagccagggggggaggttgtagatacacatcgtaacgggccaagtgctatggccgctgctcatctctccaaaaggattcatgccatccgtactcaaaccaaaccgtatgtttcgtgcgtcctttccaaattctttaaattttctgtcgatgtttcgccactgcgaaccatcggcggggtgtctcagcatcccgtcctgttgacgctcttcagcgtgccatcgcaacattctagcattccccttgttcctgaacaaacgccttagccgtggtattatagggaaataccacatcaccttagcaggaattctcttctttgttagctgcccgtcaacttctcctggatcgtcccgtctaatcttgtatcgtagtgctttgcaaacagggcatgcttctaggttctcatactcctcaccgcgatataggatacaatcgttcggacatgcgtgaatcttatgaacttccagtcctaacgggcagactatcttcttagcctcgtacgttgtctcgggcaatttgtttccccccggaagaatgttcttgacgagtttcaataaatcgccaaatgccttgtcactaaccccattttttgccttccattgcaacaactccagagtggtatccaactttttgtgcccctgctcgcaacctgggtacaacgaagttctgtggtcctccaacatcttgtccaatttatgggcctccttttcactttcgcagtcttccctggcgtcctgcaacatctgaccaagatcatccgcaacgtcgttaccatcagcagctatttcctcctcgcccgtttgatttccttcaaatccaacatactgagcaaagtccggaatattgtcgtcttccacttcaccttcttccatttcaacaccttgctctccgtgggatgtccaacaattatagcttggcatgaaccccgactcaaacaagtggaaatgaatagtcctggatgcagaatactccttctgattcttacacttattgcatggacaacaaataaaacccctttgcctgttagcttcggccactctcaaaaaatagtgcacgccgtcaataaactctttggaccgccggtcagcgtacatccattgccgatccatctacatgagtcaaaaaaaccgcacacaaataattattcttacaataatgacagtcatacaataattataagatatctttattcatacaaaaatcataaaatatcacaccaaataattcttaaaaactatttgtaaagttttaaactaattttaatgtgttttacttcttttaatttttattttagtttgttttctattatttaatattaactttcactagagttttccttctcaactattttataaaaccttgtttagcaaatgaactaaatttctatatattctttcttccccacacacattttctctctcatcaacttacaactaaattttggagacaaaaaaagtgtgcaaaacataggtgcaaatgtagtatgacaaaaaaaaacattggaggatgaagttgcaaaccttttaggcacctccgatttgtatgtaatcaccaaaataaattcaatagaaattttggcatgacctcccctcttttttgaagaaattttgaagcttgctcgggcagctggaggaggaagaagacatatatataggggtgggactttagtcccggttggtagcaccaaccggggctaaagatcaccgggatctttagccccggttggtgctaccaaccgggactaaagtcccacccctatatatatgtcggcttccccctccagctgcccgagcaagcttcacaatttcctcattaaaagaggggaggtcatgccataatttctattgaatttattttggtgattacatacaagt

SEQ ID NO: 599 - DNA, 10445 bp, Oryza sativa
agctgatacccatcagtaaacttgtacatggccaaaaaacagatttacagcggcgatacctaacactcatctaattaccttttaagtacccggagagatctatacaggccacagtaaaaaagaagagaacacatccagtctccaccaggacacccctattggctattacagtgtatctcaaaacaaaaatctccacatttgtcaattcaccagatttgcttattgatgccaatgcttaaaaaggattagcgtcaacatctgtacagcttagtgactgctgacattggctagtcttggaccccatccgcactcggttttctgaaaatcaaggagaaacgttagaagttggaaagatttcggtcccgattgcatgtcacgataaacaaacttatccgctcacctcctgtaatgattaacttctccacacgcgcaactatatgcttcccgaaagtgtagttcttcagttcgttcaaatgcatcttgatgcttgagaggatcacaactaggaatttgtcatcacatgtctgaaggattctctgtacaacataattgccaaactgatccttcatcagtccctgcatagattggtcaaaatgtgttattacaatcactgaaaaatcattgtgcatcaagacattgtcatacagtactagtacaaatacagtgaacattatattaaaacccagtgccatactgccatgtgttctgtatgaacaataaatcctaaaggctcttgtgcacttacttgacatacaaaatgaaactaaacacaataaatacagcattgatgtccgtgtggaaaacatagggttgtggaatcatttgatagaaaatatgctttcagttaacagctcaaggaagttgcttgttggacaaacctggaatgtttggccagaggatacaatctctcttataaggccttcacgttcatcaggagttccaaaagatagacacttttccacaacattagaagcatacttctgctggctcaagttcaccacttgcccagaaagcttttgaataatggatgaccgctcctctggcctaccatgttctaagacgtgctgaaaattgtttgaaaaggttcatcagtaaccatcaattagaaccgttaaatgctcattgaaggaaatgaaaaaaaataatactacattccaaactgggcctaaaagatataacattctttttaccatgctgcaatgtatcaacttatttaaaataataacaagaaacatttacaagttaattgagcccaggaacatcataagctggtgctgttttatatattttaattcccagtaggtaaaatgataatccgctggtgtcaaagtactcagttaatcagttaatgattgtttccagagtatgaagaatatatcgtatttcaggaggttactgttgtatttatatgtaaccatttcaaatggagataaaaatagccctaatacatagaagaaatgtggtaatcctagtaaccgctggcaaccagccacatccaacaaaagtttgaaccctggctccacacacataatttattttactaattttatccacaatatctgtaaactactaggttttttaatgatcaaggcagtgtaactatttttatacagggttaagtcaaaagtttgacaattgcagcaagtgaataaataaatggaatatgttaacctacttgaacaacatagtttccaaatttatcttctgtcaaatcaaaagcacgttcgacaatttcatccatcacagcactttgagttgctggattatggcaatgctccaaaactctctgcaaagataaggttagaaactaccatttaaagttacagaatttaatgcttaggaaacagaaggttgcaatttgtacctgaataactctgcagccatattggtgagtgcaaagcggataaattttctgaagtatatcctcaattacaaatggaatgtgatcttctggaacacactctatgcacttctggattacgtggttaccattctgatcagaaatacatctgagaacagaattcttaagctcaccaacaatagatatctttctctccaagtcaaccacatcaatgacctgtggcaaatgcatggataaaattccaatcaagcacctctaaagtgaaatgactcgtgcctcatcaatgtctcactcataatgctgacagagtgacaccaattttagttaaggtggcattccatgcatggacttttggtgaagacataacgctcataacgcaaacaaagaacaaagcatgttcattttttttaataaacagagattcattatctcttgtcagccaccatgaaaaaatgatttgccacataacaattagaaaaatcataaatggtaaatcatttgtcatcaattgtagcttttacacattagctcaatgctagtagtgagataagattgagtgttaaaagcagcggatgatttaatcttggttcaggcttccactcaaattatttttgtgtacattaaaattcttttttgtacattactaacagatttactttaggagactacactgctgtccacaataaacttgtaggaaattgattataaacttgtagagtttgcatgggttacagatttacatgaaccccaagaaaaaaaaagataacttaccttctgaacaactctgcaaccatacatctgaaagctgagttgcaaaaagtgacctctgagctgatctgctaactggcttaactggctttctgtagcaaactcaaaaaactgcaaatgtacaattctgaatgttaggtttcaaaatataaatatgagtaatcaaattagcaggacagataggcgtaccttctgaatcacataattgccaaatacatcagttgtcagagcaatagcattggtcagtatctctggaaagattttttccctgtcatcagctgaggcaacctctagtttttgttgaataaaacgacttccaaattgatccatactgcattaagataagaagtagataatgtgacaaagcattaaagttgaaaatctacaacaggagaatggaagagaaatgtacctaacttccataacatggcccactacattaacaagctccaagggacaagcaccacttctatttgcaagatccaaagaagacagatccaggcagtttgctacaggattatcttggtagatttgtgatcccatatttctaccaggtgtcctcctactagaggataacatccgcgattgctgatcaccaagatatggaatgcccctcaaatgtgaataagcatgggaccctgatctttgcattcttgaatatggaaaacgaggtccatcatgatatagtatgttgtcattatatgagggaccagattttgactgaaagacattatcttcctgcaaacaacgctgtgcaataagttcttcaaggaaatggttcctactcctgattaagtccaagtctgtgatgttgcgtctgtttctcaaggggttgattatatttaccatatctgcattgctatggtaattattctcgtcaagattgcttagctgcatcaaagctagttgatcagcaagagataggcgatccacattcttcatgtgatggttattattccttgaaacatagggactatccataatactgttctgcctgcgtagaagaccatctccatatgaaggtagtgaatgaacatccaagtgctcacaaccaagcgtacacaaagcattgccagataaaggagaacggcagtcattggcaatcttagaggaaaaatgcctgtcgtgattacgcatttccatttcatcaagcaggtctttggcaaggcccctttcatcatattctaaatgattagacaagttcaccctagataaagcatttgaaagatcagagtcagagagataggtggactgaaggtcccttctagcaaaagcattcatctttcccatgtttggcatgaagcgattctcggcatgcctatgaaagtcagcatcatctgttttggtctgtatccatggggaaccaacattaactgcagagtgatccagcatagcgccaacactatgaacccgggttggtccaaattgctgtccattaaactctctcgtaccattaaggtggaggcctggtgctccattagataatgactcagaatttccaaaatgatcctacaacaaacgaaataaattcaaattcaaataaccaatgcataaacatcaaacaaaacgtaagtctggaattggtgttgttgtattggactaaatagctcatcagccaatcctttagctcctctgagccatgcacattaattaatatccaaccgaaatgagagtcaatctcatacatgcacagggcagcagttaattctttgacagcgaagaatttatggcggtatacgcggagtcaaaatggaacccaaaactaaaatacctgggcagaagggctgcgatctatgtatctggaaaacacaggagcaaacacccaagaacatggatggatgtttttataaaaaaaaaaactgaaaacaaatgcacatcaacaataaattgcaaatcaaatatacaaaaacaaacaagcagattattttacaaactttagttcgctcactatgggccaaacggcaatcctcaaactctcctccccatccctgtgaaattccccaatccagcaaccaccaccatctccttttgatctcattgaaacagagaagagaccagatggacggtgactctgtgaatcactggatcttaagcagtggaagcaacatgagtgggagatacatattgtgtgagatcgcatgggtcctgcaaatcacacacaggttcacacttcacacacgaagtaacccacatgaagtcagatagaacatttcttatcttccgttagaaatttaggaaccgcaaaaaaatatccagaggaactgttgacagaactttctacaggaaataatggacagaaactatcactagaaacttaagaaattgttcagagaatctttccataacaaaacattgcatagcaaactttccatcaaaagatcattctacagcagatcttaaaactttcttaacaaaacttagaaactatcttcaagacaactttctacggaatactactttctgttgaaaaagcttgttagtaccaagtacaaacttttattcaaaatctaaatctattcgaattaactatcatgaagtgatgatttttttaaaaaaaaaaagtattggccaatgtggcacgctgcccctcaaactccaacagtcaacagagcggccacccaggaacaaaaattgaaaacatgtgtgcaggaaaaacacattaaacattcaatggacacaagtgttccacgattaggaattatgcatgactggattgaggagattacatagcaaggagcaactaggttcatattctctcttgattttgggcatttcatctaaacaagtataagtatctatggggaaaaataaacacccaaacaaataggtccaaaatatacttaggcatatacgagaatgggaactgaaaaggctcaaaagcaatttatgtacaagctatataataaatgtttacagcacatacagcctggtaagataattacatgatatttacgacatataagaacagaaatagcaaattctaatggcaggaaaataaagcctatatataattaacagaggaactaaagagcccaatggttcaactaagttgaagttgtctccatgagttaatcgaagcaatccactgaacatcaacatgatgaaagcacaaagataacacaattttcatgtgagttctagaaagatagctaacaagcataataagcatttagtagttctttaaggacgccatatgcactagtatggcatgggaacccatattttgcggaggaaaaaagtgaatcttttggccgaaagacattggttttacaacttttaacaattagtagcaaacttgaacgtacataggcagcacaaccgagagaaccaacatagataaatcaatagactaaagccacacaggataaattgaaataaaaacgatatgacaagaacaccaccaaacacttcatccaagcatccaaggtacagaacttaaaatccaaaagaactaacaaagaaaaatttacctacatagctacacctgaaaaattgcaacatgaacccacgcgagcaaaagaaaaaaacttcttttcataatttcgctgcgcatgattattactggaacgattcagcccatcagactgatgaaacccctaacaaacccaaaccaaataagccatgccaacaaagctcatccaagaatcgaagaaaagagagatcgataaaaatcggaacaacccaaccccacaacttgcatctgtcaggacacacaatcagtaaaacaaattcaagaaaaagaaatcacgcttcgtgcacataccacgcaccgccatccaatctacaccacgcgcacaactcaaaaaaaaagaaaagaaaggcaggaagccaagaaccgctcacctgcgcggcggcgccgcgccgccggccgacctcgtcgagcctcgcgccgaacccatccatcccggagaagaacgacccgccgccgccgcctccgccgcccccgtaaaccccctccacctcctgctgcgccaccgccgaagccgccgccgccgcggcgccctccatggtcggcggcgcgctgccgctcctcatcgggtcccacccccaccccgcatccccctccctcttctcctcctcccctccgccgccgccgccatcgccgaagggagccatcccctctctctcccccacaacgcgcgcgcaagcgaaacgaaaactcgcgtgtggttttgaacccaaaaccccacccccgcggtcgcgccgaaatgggtgggtgcggtttttggggtggtggcggcgccgagttagggttagggttttggttgggttttagggcggagagggtgggggcgcgcgggcgggagaggagaggaggggagggaatggaaattggggcccaaaatctggtttttttggggtggtttatatagagagaggatttcaggttgtgggtttgtttccttcagcttaaacctggagataaataaagaaagaaaacccttttctttctgataattccgtgcagtttttttttttggtataggagttacatgatgggactgggtagattcatagacactggatgtggggccagggtggtcgtgttttttttcccggtcagtgcttgggcccaactgtcagtgatgttgtttaaggtgggtttgttcgagtggatttaaattaataaaaaaatatgatttctctttttctaatataatataatacaaagaaggacgctgatatacatacactccctccggttctattactctttacgttttagacaatgtaacagtctcaaaatatatctttgactatattttttattataatacatataataaataaatatgaatacattgttatagttacttataagataaatctatatatattgttcttgagtctttaaactaattatttttaaattcattgctagtcaaagttataaaagtttgacctaacgttatccaaaacataaaaaattatgtaaccggaggaagcaaatgctattgtcgaaaaataaacacttatatgtagaatagattaaaacaccaaagtagtgtattgatttcttgatctcttccctgcatcatactactaggttatatttatatttataggtttatatagctctaactacaaatccaagtatataggtttttacatgcttatcttgtagatatggacatgtatagggctggttgtgtctttccacttcatattcagcttccaaggttatcctaggccgaacccaggtcgttagggagctggcttttttggaaggtcacttttcagggcaggccttcggcatcatggccccgacggcctcttcctgtcccagcgacagtacgccatcgatcttctgcagcgagccggcatgtttgaatgccacccaactgccaacccggttgatgctcgcgccaagctctccgcctaggagggtgcccccgtcgccgatcctactgagtacaggagcctcgccggtgcgctccagtatctcactctcacccgtcctgagatcgcctatgtcgttcaacaggtctcttcatgcatgaccctcgcgagcctcacctcgccttggttaaacgcatcctgcgctacatcaagggctcactctctgccggcctccacatcggcaccgtccggtcggttctctgactgactactccgacgccgactgggccagctgccccgactctcgtcgctccacctccggctactacatcttcctcggcgataacctggtgtcttagtcctccaagcgacagacgacggtctcatgctccagtgccgaagcgaagtatcgtgccgttgctcacgcggttgccgagtaatgttggctccaccagctactccaggagttgcatgctcccatctccactgcgactgttgtcttctgcgacaatgtcagtgctgtctacatgaccaccaacccggttcaccattgccgcaccaagcacattgagatcgacatcctttttgttcgggaaaaggtggctctgggataggtccgtgtgctccatgttccgtctacacaccagttcgccgatatcatgaccaaaggcttgccagtgcagttatttacagattttcggtccagcctttgcatccgtgagcctctcgctgcgactgcgggtgggtattaggaatactttgccatatatgtacagattgtattgtattgtttctttccttgtattctcctctaattgaggatcttgtacatgtgcttcctatatcaatacatggtcacccctcccattgggtgtgaggtgttctccccattccattctacacatacaaggacacgaagcaaatgtaggcaaaagggtaaagatgatttccaaatgagaaacagtgtctacggaaagcaaagtttaatcccaacgcgagactttaggcactagccagcccgctgctcctagatgtcgctctactgtgtactcctagatgtcactctgctcctagatgtcgctagagtagtaattaattgcatagacacggtctctaggttgttaattaccagtgattgctgcgtatcccacagttcgttagaggctggtgtagaggtggtgatagcccccaagatcaccgtagtcctccctgtccgggtacgaagtagagcgtgttctggtagcagcaagcaagccagtgcctgaagtattgagataggattaaatttaagctttctgtagacactgtcctcacttaggaaattctctctaccctttgcccatctttgccttgtgtcattggatgaacttgaaaaggaactagacacacatgtttcctgtggaaaatcgatgccttggaatagtcccgggtgaagtgctacatcgtagcaccctgcgcctgtggattttatttatgaccataagaaataccaacacttaccagtattgactcttgcttattgattattttgctgcttaggttgagtgatgcgggaatcatggatctttaggatagttcttactaggtgtctatccctagtcggtttgcctgtgtggtaagggcaggcaggttttccgctgaacttctattgaccggtcaactgcatatagatgatttagaccaatgtttctagctattcttaagttactttaattcgtgccttcatgtttctgatatcttggctaagataacagtgtgaagctagcaacctcctgagactagccgatcacaagttagagttttgagcaattgagatggtcgtgaaatttagcgatatgagtcaagtcccctgatgtaatacatttggtcgtcaccttcgagtagtttgatgggcatattttaagttgaagttgactgtcgggctattccatcgaagatctcctgtgctcactactcggtgctttgggttttatgttgtgtttggtgtttcgcatgctagatcaacgatgaggttggatggttactactattattatttaggtttaatttaatatcccatccaactaaatatttcatgttgtcatacttagtagcctactcaatatctagcccaggtgtcctgacaagagttgaatccatggaagcctaatggcgatggtattttttagataaattaacttgtgatggcattttgtgggactaacattcgtcgatggcaaaacatggaataaggttaatggcaacacttagaatatctcatgtaacattgccccctgtaaagaagttacttgacactcgactggagaatgacacacacgaaatggacagtcatggataccaaaaaatgatgcatgtcaaaattgaatatgccaaccttaccatgactaacaaaacttacacaaagaaaaccaaggtgggttcaccctaatgtcctcccttttgcaaagcacctcagactaatacacctttgagatta

SEQ ID NO: 600 - DNA, 955 bp, Oryza sativa
cgcttacatatgtgtttataaaacagaagttaatgcattaacattatttaaagtacaaagattgatgacaattacttcgaaaaattatttttgtctgtaataaattaagtggataaatcgtaataagcaaatatatgacttataattaataaaaattccaatatatatatattcttagcatatatatgaatgatattattatattggtaaaactctaattaagatattaatgtacatactgcatgatttaaaattaataaaaattgtaatcatcatatgtacttagcgtaggaattatattaaattaaatgctaacaactctaattaacatatgtaaatgccacatgcatgatttaaaccttttaaaaattcgaatagtcatatataagtagcatatgaaagatagtaaattaaattgtgaaaaactctaatatatgaatgatagttttaaaaatatattaaatgtaatacttttaaaaattctccagtcaattataattagcatatgaatgatagtaaattaaatgttaaaaactctaattaacatatgaaattgccacttgcgtgatttaaaacttttaaaaatcctctagtcaattataattagcatatgaatgctagtaaattaaatgttaaaaactctaattaacatacatatgaaattgccacctgtgtgatttaaaacttttaaaaattgtaagtatcacatataactaacatatacatgatttaaacttgttgaaacctctaataatcgtgcgtaattaacatatgccatacatcaattgatttatatggataatcaatacatccaaaatagtttacatcgtgtacacaataattacggcattacatcggcggtgacggttgaccgcacgtactttctcctcactattgttccctccttgtgatcgctgcgtgagtaaggggtgtcttcatttgataggaggatgct

SEQ ID NO: 601 - DNA, 4811 bp, Oryza sativa
tttagtgtttttgagcagaattttttggaaggccgtagtaacgcatgtaggggtgaaaaaaaagctcgggctcgtgagctcagcttgggcttggctcgagctcaaatgccaaaggagccaagcccatgcctccttttcagctcgttgctgaaatgagccaagcccgagctagctcgtgagtcgctggtttggctcatgagcctaggctatcatgtatttatatggatgattttattttatagtgaagttattatttgtaattatgcaatttataatttataatttgtagaattgaatatataaacttattttagttatacatgtcgacgatttattattgatcatctacaaattatatatgaagagatgcttcaatgggaaggctcgcaagcctgctcgatctggcttgagccaggaaacgagccgagccgagctcatgcttgagcctagtttattgcgagccattgcaagccaagcctcgtttccacccctgcacgcccggcgcctcaggtctccatgctcaacctctcccgatctctttctcttcctattcttttatgttaccaaattaaaagcaagaaaagctataattttagtattaaggtgaccataattttaaatgtacatatctaatttctattctatctaaattgttcctgtatttataattaaattgacaattttagatccaatgttttgctatacataagtaatatgtcattgtggtcttcttaacgtctggtattctcggaggcattcggatgggcgatttctggtgatcttcaatggtgactccggcaccgccgggagggtggaatttctctcccggggatgcaatctgcgatgaagcttggcattgtttccgaccgccggttcatttctcctctaagttcagctcggttcctttccggttagtggtggatctacctcgctcaaattttcgtttaacaacttcttcggtggccttagccctcagggctgtgattggtggttcgcctgctgatctctctgtttcccttctcaaagatcgttctttctcttttttttgtctgctccaaacaagtgggtttatggatttatcgtttgagatcttatacttgcaatgattttgttctgcgcttctttctttggagaaatggtggaccaaattggtagtgggaacttgatgtttagagtcgtgaacaagagaaagaatgggtttttgtggctcctaagaaacgtgtttctgattctttgaggcaacctggtcgttcttatgctcaagctactcagcagcgggttattcctatgaagagtgtttttgatagattaaaggagtccttgaaggtgactggcggtgatactccggcaatcactgttccggtgaccaaagttccggagactaagctggtggctaatcccaaaattcaaaatgttagaggtaatcgggatcaactttctaagcaagttttaaattctaatttaatttgtgggcgttgctcagagaagggtcattctttgtctgtttgtgttgggccctttcggtgccgaatttgtaagagttcgggtcatgctgcccgtttctgtagctcaaagcaatctccctctgagggtaaattgccaaagtctgtttctaccccccgcattaatgcagttgctacggtcctaaactcccggggtaattgcaatcttgtttggagacctaaaaagcttgcgccggttatctcgtagccttctcgccttctccaatctactgttgagaatattgttcaagcctccccagcccaaagttccatgccaatggcagacctcaaccctaaccctcatcgtttccgccatcaaggtcacattgtgcatttgggaggaaatttgcgtgtccctagagttgatctcaccatccctcaaaggcctgttcgagttttgtgttgctttggtggagccgccggtgtcggagcaagattgggatcaccaccgcatgctaattcttcatcacattcttgatgagcgtctttttgaggtcagaaatagctaccgtcatgcttctgcggtgggtatgtatcaactccattctgctatgcatagagatgccctggtccatagtgggccgtttgtttatgatggagtgcattcggtaacttttgtgaagcatgatcaaggcccaaattggagagcatctcaatgccatagagagggttggttccttttcttggattaccaccttgactttattgattgggaccatctaaaccttgctacggctacatttggccaactttctttttggcttgaaagggatcagatcaaggggagagttctgataagggctaagttaaaggataatgattttgtgcctccaaaaattgtttttgcatgatccggtgggtatgggcggaggaggagaatcatggacagtttccgtgtttttgttggaaggggatttcattaacatggctcctgatgaagatctgccccctgcgggcccccaaccaaatcctaatggtctagatgatgatgatgatcctaatgtgggcaacatttggcagatggggcagcctcctgttggtccaggtgactgggatgatttggtccaacagcagcaagctgcagaggctgaggtagaggatgcttggggctaagactatccaatgggccaagtaatggaggtaaatcctgatggtctgcttgctttggtacctattgtttcagaggatgctagcccttctgttcctgctgttgctatgcctaatagggggaaaaaggttcaggacccagtccaagacccgaagatccaggaattcttagctaacttggataaactgactagaagtgaatatcctagacacccttatttttatccaatgtctggcctgaatgagaagattgacctcttgtgcaaagaaaagggaaccatgcaccaatttcttgcttctagttctgttcctgctgccatagatgtggtcaatccttttactgctcttgttttgcccaaaaagacaatgtttgatttttctcccttagtgggtcaagagacaagtgtttgggctccggattcaacaaagtctgatgttggccccctggaggcctagacccaagctgctatggaagtacttgatgtcatgcccttgtctattcagcctcccttcagcccagtttgtgaagcaccagctcttcctgtgttacctaaggctccaattaagaaaagagatgtcaaaactttgctttataacccttacaggaggcagagtgcaaggttgcagcagaataaggaggaagcagaactgcaagtggatcccagaatggacattggcaagccaaggggtaaatctgcaaagaaattgaaagagcttgcaggcttgcaggtatagcaaaaatctttgatgatagtagcattaaagagtctgattttactaaaagtgcctatgatgatattcattctgattcctttccatctgattgttctatctcattgttgcaaaagatgggagtggacatgtgcggcttaactcctgaggaggaagttgaatccagcatggggagtgagagaagaaagaagatgcccaggcctgacatggaggaaaaatgattttagttttcagatgtgttttagtagacctgtacttcccttttaattatcatgtaagggtctgtatttggaacttcccttttaattatcatgtaagggtctgtatttggacaagagcttttcagactttgtcatattttggttcagttgtatgcactataaggttatgttatttcaggctagttgtactagctctggttggtttctctttcaatcctgctttattcatgagtaattatataaatcttggaatgtgctttgctggaatattaggggaaagaatgcagagccaaaattgctctctttgagacagaaaattgaggactgtgagtgccaggttttttttgcattcaggagacaaaaaaaggatcattttgatctctcagatatcaggaagtttgccccaaaacgttttgattcgtttgcttttgcaccctctagtggtgcctcaggggcattttggttgtttagtcttcaagggtttttgtcggagctgtggcggaaattaatctgttctctgtgtttgttgatttcaatttgaggcatactgctcaaacctggtccttgacttgtgtttatggcccttgtggtggcccagagagatctgattttgttacttggtttaagaacattggcaaaatttgctataggacatccaaaaaatgcgtaattagctatgggacaccgtaaaaacgtgtatttgctgtagggcattgcaaaaacctggtaattagctgttggacacccacgacattattttattatttttggaggaataggagagagaaacagttgtgtaaatacggttatacccttcgattttttttctttttctttattcttccttattttttttttctctctaattctctttctctgctcttcattcaagcgagccccagggagagggagagcgtcgtgacggcgtggaccagtgcagcgcctcggctggggcggcgttgcgcggtcgtgcgcaagggtcgaggccagcacgacgcggcggaggtggcgcccgagctggagggttaggtggtgccggcggggttgggcggcgtcagcgcgcacgcaaggacggccgggctcagcgggcgcgaccacgccgggagcgcagcggctccgggccggatttgggaggctggaccagatggcgcgaggcggccgccaacggcgacgcggcgaggctcaagccatcgcagcgggcgctcttctcatgcatggaccttcagcacctgcaaacccgatgctgagc

SEQ ID NO: 602 - DNA, 2569 bp, Oryza sativa
caaatttgtctttaatgattgtttctctctcctattcgtccgaaaataataaaataatgtcgcgggtgtccagcagctaattaccagttttttgcgatgccctacagcaaatacgcgtttttacggtgtcccctagctaattacacgttttttagatgtcctgtagcaaattttgccaagaacattagcattggtgatcagcaaaattggctttatttttagtgacttcgatttctatagatcagtgcaggatagaaacaaatctggagcagatatgaatgatatctttttcaatgacattatcagctcccttggcttgcttgagatccctcttaagggtagaaaatacacatggagtaacacgcaacaaaaccctcttcttgaaaggttagattgggtgttcacttcagctccatggaccttggctttcccaaacactacagtggtgcctttaactagaaatatctctgatcatgtgccatgtgtagtgaagattgatacaaaaattccaaaatcccctatttttagatttgagaattattgcgtgcagatggagggattttttgacattgttcagcaggtctggtctttggatccagggtttgaggaccctgctaaatgcatttcttttaagcttaaattgctaagaaagagattacttgcatggagcaaaaatctgtccaaattactgttgcttctgaccaactgtaacaaagtgattgattttttggatttggtggaagaaacaagaattctctcagtctttgaatggaatctaacagaaattgtaaaagtgcaaattctcaagttgcaggaatttagaaagatctattattagaagaagaggtgcactaacaggtggatgatgcttggagaggaaaatactaaatttttccaatctattgcaactgagagatacataatcaatgcagtgtcacaagttttggatcaaaatgggtagattgtgcagctacatgcacaaaaggcatctctttttcttcacagttttaagaatagaatgggagttacagctggtcctcaaatggcctttgatttgagtactctcttctcccgaagcacagatttggaatgtttggtggacatgttttccacacaggaaattgacagtcttatatccattgtcccagcagataaagcgcttggaccagatgggttcaatggtttctttatgaaaaaatgttggcatataatagctcaggactactacagattggcatctcattttcatgctggatgcacaatttggaaatcttgtagttcttatataactttggtttcaaagaagaattcaccagagacggtcaatgattacggacctatatctcttatggggctcagtttaaagttcctaaccaagctaaaggcaaacagacttcaaggggtaattctcaagctagtaagtgaaaattaatatggttttattaagggaaagacaatacaggattgccttgcttggtcttttgagtacatccatcagtgtcagcaatcgaagagggaaattgtttttttgaaattggactttgaaaaagcttttgatactattgaacactctgctattctttctgtcctgcaacatatggattttcctgaaaaatggatgcaatgggtgcaaatggttttctcttcagcttcttctactgttctgttaaatggtgttccaggaaattcttttaaatgtaggaggggtgtaagacaaggtgatcccctatcaccacttctttttgtccgtggagctgagctgttacagagagtaatgaataaagcttttgagttggacttaatctctaagccaattaatgaaaatgatgggagtgggttccctatcatacaatatgctgatgacaccctgatcttactcaaagcttctcaaaaggaaatcttctgtttcaaaactatcctgaacatgtttgcacagtccacgggtctaaaggtgaattttaacaaatccagtttgtatcctttgaatctttctcatgacaatgcttctttgctcgctggtattttgggatgctccattggttccttgcctttcacttatttggggttgcctcttggtaccactaggtctagagtggttgattttgcaccattggtggacagagtagaaatgagattgacagcaagctctatgtttttgcctcaatggggaaggttaacattgattaattcagttctttcttctattccaacttattatatgtgctctttgcaacttccagtcactgtcataaaggcaattgatacagcaaggaagagttgtctttggagaggcaacaacccatcctcaactagaaaagtttttagctttttgggacagagtatgcacacctaaagataagggaggtatgggtgtgattaacctgagagttcagaacattgctttgcttttcaagcatatggtaaaattatataatggtgttgagctgccatgggtgaaactgatctcacagacttattatgtttctagagcaccccatctggttttgaacaagggttctttctggtggagggaatcacatctctttcagatattttcgggctgcaggaa

SEQ ID NO: 603 - DNA, 2411 bp, Oryza sativa
tgtgatagacttaacacaagggatatgcttgacagaaggcttggtgcaaaagaagatgatgatctcacatgtgctttatgcaatacacaccaccagacttcatctcttcttcacatgtcctttcagtatggcttgttggcaatagctaggcattcattgggattgtaatttggaattctttcagatgattgttttggcaagaatcaggtttgcacaaaggggtttccttgaggttttctttctggcaacatggcatatttggaagcaaagaaatgggctaatttttcagaatattcagccttcattccaatcatggaagtctttgcttatgaaagaagttcttctgcatatgtacagaatgaaagatcctctcaagcaatctctttttgattggttgcaaactttataggattgctgtttttgcagtttttatttatccctttgtaactttgtacatattttttgatctataaaatttaaaactgctgggcatagtcctggcagtacttccagtcaaaaaaaaatatcattgtggttatagacccatgcactttgcaagtttgcatgtcatctaaatataaataaaatacttaaaaattttgacaacgtgttgtgtttttataggtcaacctttaaacgtgtcaccgttggttccaatgacaggggcacatacgtttcatgtgtttgcttacaccgtggtctcgggctcaccatctggaaaataaagaactaactcaaatattaatagcacaaaccacaacataaaaaaaatatctggtgtctttacgggtggtttcaagtttgaagcacacgtaagatagcagcctctcgcgtcgtccctcccccacgaaagacccaggaggcgacgccctcaccggtgctcgtctccccttacctcctcctctacctggccgccacccgagcggccgtgcggccacaaggacagcggcggcggggcttcgtcctcgcgctcgggcgggggggggggagggggggctgctcggggcaggggaaccgcccggccagatctagcggtgggtcagccagcggcggggctgagcgatgcggtggcagtgacgtctggtggtggtggcggcggcgtttcgagcctagatctggcaggatggcgactgcggcgggggtggcgaggggatggcaacggtgaggcgaacccggccgcgctggctgcggagttctggacaccctgtggtggctcggagttcgtggcgatggcggcctagagctcgcggcgacgacggcaggtcgactgcgccgtgtgccgtcggagctcatcgacggcgagaagatgcaggagttgcccaccacgtggagtgcgttgatgcgtggctctctagaaccacttgcccgctctgcccaaggcgagggctccgatggcagcgcagtcgtcgttggtgacaccgcctggcggcagcggcggctggaagtgtggctgcagcggcggcgactgggacgcaaggaggcacggaggtgcggcacggctggtggctgcgtaggctggcgaggcacggacaaaggcggcatgtggtgacatgcggcgggcggcggtggcgtgcggaggcaggccggcggggggcgccggtgcagtggtgcccacgcgctagcagaggttaagttggtggtggagcatcggtgtgtcaacggtggatggcgggtgaaaactgtaacgccccgatttttgttcgggattaaaaatcattaaataaagcatttccataaattaaataaaagttaaagcaatttaatcaagtgaattatggaggaaattaaaatttcctttaaaaatcattggtcgagaattttttgtaatattctttgtgccctaatgaactctctgaaatttcccgagaattttcggagctcgagaaataattttaatagcacaacatcatttaactaattaaataaaaagaaaacaaattaaaaccctctctttgtctttgggccgccccggcctaatcccccttcccctccccgtggcctcttcctccctcctcttctctcggcctagcccgcaacccggcctgctcctctcctttcttgcaaaagtctattcccccccagctcctctctctccctggctgacatatgggaaccaaggctccacatgtcagaacctcctcctacctccagccgcccgcgggcaactgccatgccgcccacaccgctgccaaaaccgccgcctcccgcctcctgcctcccgcacgcacgtccaaccgtgtggacgtggttgccacccactcctcctcattttcccccacttttccccaaaaattacgccggtttgacctccctcgagctccacgtcgccaccccacatcgccggccggttgccgcccgattctgcccctctcggccacgatttcccctcccgtagctataaaaacaccccc

SEQ ID NO: 604 - DNA, 2130 bp, Oryza sativa
gccacagcccggcccctactgcatttcccctctccgcctccggaacaccaccgtcacgcgcaccacctctcttcgccgccgccgccgactccagccgcgcgccaccaacactcccaccgccgccgtgctgcgccgtcgcgcgccgcacatcgtcccccatctcctttccccaaatcccccaccaaaactccctcctcactgccaacctgagaccgccgccgctttcgccgcctcggccgccgtttaccgccgctcccagccatcccgagccatgccgtggccacccccagcgtcgctgtgttgtgccgcacctcggccgctgcccctcgctgccggaatcccacgggagcccgcttttccccgttcaaggtgagcttcaccattccttgccgcctccggccgctgttttcctcggcaccacgccttccccgtgccacctaaactctctatccccttccccagggtcccggaggtccccggccatcactcgtcgcccatcggccgccgttggagcaccaccgctatctcgcctccgtccggtgccgtgccgcttggtgagcatctgtaacaccctgaaaattcgaccaataaaaacaaaactctaaaaatacggaccttcgaaaactttttaaattaattgcatcatgccaattttattcgcctattttatttggatttgatttcgaagttcattaatcgcaaataaagaatagttaattaggaataaaccctaaaaataaattggcaaaataaatataatttaaaataaatattaggtaaggatagaaataaataaaatattattgcgaccatatttgtatgaattaaatttaaatgcgatggaataagaattaactctaattacattcaagtaaattatataaaaaaataaaaaaatgggtaatattaatcttgagtgaatccattggttggaataacacaaatattgagtaaaattcatatatgcaaaaattaggaattatagaatcaaatttatataggaaatagactaaaatagggttaaataggaaaagtcactattcattgccccctaggtgttcgatcgcgttccctagccctaacccctcctctgccgcatgcgcctggccgccccgagccccgtgccgcccgccgtcgtgtcgcgctgccgcccgtcgtgtcgtcgctttgcgccccgtgccgccgcgcgccgtcgccgtcgctgtcacgccgccatgcgccctgtgcgccgcgcgccgatgccgtcgcgttttgtcgccgctgccgcgccgcgcgccgtcgcccgtcccgtcgccgcgccgtcgtcccgtcgccgcgcgctgctttcccaggccccacgccccgtgccctgtcgcgcgtcaccgcgccgccgtcccgtcgccgcgcgccgttccctcgccgcctcgcgcccgtgcgccgctcgcccgtcctctcgccgcctcgcgccccgcgcccgcgcgccgctcgcccgtcgcgtcgccacctcgcgccccgcgctgctgccgcgccgcgtcgtcatcgcatagccgtcgccgtcgcgccgagccccgcgccgacccgcccatcgcgtcgccataaggccgcccgcccctctccacgccctattaagcccgaccgctccttttttccaccccacacacatcccctccatctttccccctctccctctcccccttctccacgcgccgccgttgttgtgccgccacgccgccgccctttgagccgccacgccgccgccaagaagccgccgcgccgcgacttgcaccgttgtcgccatcatcgccgccgccgccgctgtcggtaagccgccgccccccccccccccctcgcgttcactgccgttgccgcccgggtgggcaaggagccgagagagagagggagaaaggagccgggagggagagaaaaagaaaagaagagggagaggaaaagaaagaaagaaaaaaaagaaagaaagagaagagagaaaaagaaaggagaaggagaaaaaaaaggaaaggaggaaaagaaagaaaaagaaagaagagagaaagaggaagggaaaaataaatagaaaattagagagaaattaaggaggattagaaaatttaaaataattagaatttaattatagattaattatagtcgtagaat

SEQ ID NO: 605 - DNA, 12728 bp, Oryza sativa
  unsure (1)..(12728): unsure at all n locations
gaattcgtccgatatttaagcttcgcgatagaaatttctaacctattatacggatataatactcgggctgattaaattaaaaacttgtgctaataaaatatttataccgcgaaatagcttaggatggataaattaagatcggattagctctaattcacgaacaaaaataggtaatgtaagaaactgacttccgctctcgatatcttcgtggatttacttggatctttatttgaaatctaaccgaattcaaatcgtttcttcgcacgtaattttagagccagagggagttgcggatccgagcgaggatcaagacccacagaactacgagcaaggcaagtcatcactattctttaaacatgttgatcccaattgcgaaactattttgtttacaaataaaattgcatgcaatgatgaacatcccacttgtgattatgccatgccttgattattgtttatccttaaatctttgtaaccatgattatgtatgagtccctagtcaaccatgacaattgcttagaaatgctactctagattcatgcatgctcatatttagcaaatgctatatgcctgggcaattacctttgggaaggtaattgagatgcgacatgtggagacaggagcgccacattgccatgataatgatgacatgatttatcaaagggaaataaaattaaacaactatttttgactaggacggacggaggatttgggtggtatctggaaaaggctagtaccgtccccggtcaattaaagaccgagccatgaagttaagcatgaaacaacccccgtacaaccgtacttctcgaatgggtatagacctagcggattagatagccgagcggaggcagtatccctgcatagatggttcacccctgagtgagacaggtgcgctacggtggggcagccgttgaggtagggccgagaggcgtgccctacattggtgtcgccattggtaggactgccatgagtgtgtgagagagagaacttaacttgaaccataatttaatatgtgtgtgagacttctctttcccgggagcgccagaactcctctcactgctagaaacatggacgcctagagtgcatgaggatttgagttcatggagcgggtactgccaatgcaaggttatcgaaaagctttgccgtgacgcgtctcatgtgttgagacgaggcttatgtgttgggcagtcgcggagtgcgggtaaagtgtacatccactgcagtgtgagtaaaccaaatctattcgaatagtcgtgctcgcggttactgagcaccgggacatgtattacacttggctagactctaaattcttaacctgtgtgggatgggatattgcatgatgatttttatgctgttggagccacttcctgagagacgggaaggtggacgtcctcagaaaaccatgacgattcaatggcgggaagctatccttgggatcacaatggatggtggacagaaccgtcgttgtctaatgtgaacactagtattaaaacttgatcagtctatgctaggtcttaggcttgtgaaaagaattacaaaacttgctttgtgcaaaagaaccatagccattccttgaataccctctatcatgtgcattgttgctgtggtggcttgctgagtacggttggtgctcacccttgcaatatacaaacttaatcagaggtcggagatgaagcttcggaggatccctacgcttactaccaggaggatgatgaagacgatggcgctcagtaggtcttagttacggtcgttacctgtggcaatggcgtgccgctgtcttaactccgctaccttatctacttctgcttttggaatgtatcccggaccgctcggtccgatgatctaagactatgcctgcgggcttatgatgtaataattagcactagactctcgtgtatgtgcatttggtatgttagctatgaactcgtgtgtaccagactacttgatccagggaaatggtactgtttacacgattgattcctgttacaaaaatgggagtccacagcatcccccttcctcctctcctttccgtcgcccttcgcgcgccctctcgcgccaccgctcaccgccggtggccgtgcaccgtcgcatgtcatgtctcggctgggccggctctgagccgtgcccgtgccctgggcgccctgccctgtggccgcccgtggaccacccgtggtctcggtccatggtgccgtcccggccgcagtggaccgtgtccaccgtgcgccctcccccttgtgtcactgacatgtgggacccgcctgtcggcaccggcttcccttgctgacgtcagcggcggtccttttcctttgtaaaaataaatattaatcgcgcaataatgcgttaataattatagaaatttatttaaatggctcaaaacttctaaaattcatatctaattcattcgaactccaaattgggccgttcaacttgcaaaattcatctaaaattgaggtctacatgattgtttacttttttatgtactatttgtttggtttttattagagtttttcctcgttttgcgtgccagcgagtagaatccatcgtttcggaagtccgcggtcgctaggaaaagagttcagaagatcaaagttaagaagcaagcaagtcacacattccccttgagcattttgatcctaatttacaaatgttttaccgtttgcaaataaaatttcatgtcttgctaattacatgggatcagggtttacctatctgctcgcttgtgccatgtttacttgatatctgtcctttgtcaaccgtgggtaataaatcgcctagcttgtattacttatgtgacctagctagaactttatgcttagccatgcttaattaccactagctcaattgatgggataattacagttttagacatctagtatcttgacaagctgcgtgctcgagacatctagccatgtttcatggtcgtaattatccaactaaaatgcaactgaatggtgggctgtgggtgcatggttttgttagttgtgcccatggcaattaaggaccggttcacgagaaaccctagaagaattacagtgcttaccacaagcgggagtgggtaactgcttgatctggagtatagctcgaccctttcctaggcaccggtggcgagggtgggcgtcatggagttgggtcggccggggtgtccggttgtccagctgccggattcaccgcggcgcacgaggggactgccggctgccttgcgaggagtgcaggtgaaaccttagcgtggtgtggatggttaggggagagttatatgaagggtcttgtcacaatcactcgacatggtgacgtgttcatcatgggcacatgatgacacggtgacatgccggtggattgtgtcttgtgggtacagttgtgcacctctggccagagtaaaactattcgaatagccatgcccacggttataggcgatcaaccagattcaccgtgattagtctcacacttaataaatcgacccaatgcactgtagttcaggtggattggttgggcctgttcaatgtggtgtagcgttgttcagtcgagagttaatattaccttaattactcaactgttttactgttttgatcaataaaatgttctacaaccgcctttatgcaaatagccacaaaccatcctcgtatccccttgcacgtctgcatcattggtatggcttgctgagtacggtggttgtacttagccttgctattgttcccccttttcagaagtgtagtgcttctgagctgaagccgaagttagaagaccaaggctcagaccccagttgagttttgcctgtggagtggagctgaagccccgctaggatcgccttttttcgctgctgtcgttctctttcggtgtgaggactaagtgcctcttctgtaagtattttacgctttatttacgtttggaactgtatattacttgtcgttttgtgtaccctggttggtcctggacagggatttagtacacaaaatagtctagaaatttgggctaaatttctgggcgtgacaaaaacccagcccggccgaggccgggctggcaacgatggcactcgatcgtcattccccctactgagggtgttgtcgtgccgtctcaccccatctagtggtggctgccgggtgaaagccctgtcaaggtttctccagaccttgacagacagcagcggcgatgctactgtcgcttctctccatggagacgccgtctaggtagcacccttgccaaaacctcccaaacatctgttgcaagctcgttctagagtcatttcctcttgtatcggcgtcctagtttatacaagttggctatgtcgaagggcctaggggggagagcggttctattattctctctcaccctctcttcctaaatccctaagatgtggatagagtgtgtttttgtgtcggttgtaagggttgggttttgagcgatcctagttgtagttcctttgttggcttagcggcggtcggccaagcttagaggcagccggtccgatgctagtcttctcctgggattgtgtttggcgtcgtcagtgtgtgggtggtggtattcttttttccttttcctggttacgatgtcccaggattgtaatcttataatttttttctattgtatcaatatgaactttgcactgactagttcaaaaaaaaatcttgtgtctttaggtagaccaaacaatccaattagtctgtgattttttttaaaatatgctcaaataataaaagcaaggccaatgaatcagggaagcattcaaaaaaatcacatcccaaaagtaatggtgcatctttagttatactagaaaaaattatctgggcattgcaacaggtgaaggctattttattttaatcttattattgtccactctgaaattcattgtgagaattcgatgttatatggtttagttaaggtgagattcactatgggaatttgcttggatatataattttttagaaaattatgagctgcagttaggagtccgttcgtatcaagttagcatgcgagtttttttacgactccttctgtattttcattcaaaagtgaacgaacttaaaacccgacttaaatacggatctgtattttcaaaagcaaacgaactaaaaaccgactcatacacggatgacgtacaaaattaccggtaaaaacattttatagtagtagagagttgccaaacttaaaaaccgactcatacacggatgacgttcaaaattaccggtaaaaacattttatagtagtagagagttctaaaaacattttatagtagtagagagttcccgtctgtgttctcgctgagctccttgaatcgatcccaaacgggtgtctcctacactgtgcagtacaattgaactctaaggccccatgaatttagccctcacatcccacagccaatccattcattaacttatataaaaggtgattgacttttttaaaaaagttggcaccttaggtgtaacatctttatttatcatctcacgtcatttgaacttaaaaaaaatgcttgcataaaataaaacaaaaaataggaaatgccaataagagtaaagcggaccaattagggaaaatcttataaggtcttagaaaaaattggttcttccttttcaccaaaattggaacacccgttaccatatccattgcgtcattttttagtgtttagatgctaatacccttcaggtggcattattagtttcactacatcatgcacacaaaagacataacccactaaggtagaaatatataattggtttaaaagttatattaaacttgatattcactttgtttttttcttaaaaaaatactatgggtctaacacatcgtagggaagcaggggctagataagtattcgaattatgtcaatatgaatcagtaagagggattgttaacttcatggaacaactgaaacataattatttgcaataatagttttaaaaattttgttaaaaaagagagcccgtaaacattccatttgaataaaaactacttacttttaatttacacttacctgtttccaaaacaaagtatacttttcttttgaatgataagtcagatcatagttaatttcttaccgaatgaatattgtatagtatgtagtgtaaagccaacgaatagcttagaaaaagttacccaagcaataccgattaataccgattaagaaggtttttcagacaagtcacaatttttgaaatatagtatgaataatccggttgatggtatataagtctctaaagctgacaataagatacacgcccgcacatttgcgtgggttacctttctagtctaatttaagaaactgttgggaacaaactcgatacaaattggtaaaacacctggagaatataataataaacaaactcgacaaagacagggttttggtgctgtcaagcagcagcattttctggtttatactcaatttaaaatagcaaatcaacatacatatcatgggagggcaatgccaccatgtgcgccacccccgtccacgtcatgtgccatcccacacgccaagcatgccacgcaactagacgcactccggcttgagccagcaagccacaagcaaatacagacgcaacaagacaaggaaaaaaaacagaaaaaaaaaaagaaccaacaagaaatgttccatcagaaatagacttcaaaaccattagttcattacaaacaatctagatcagtcatatgctgaacccagataagagataaacttgatatatccaccaatgaccaatcactgtagggactttagtgttgttcttccaagtatatgaatcttgtatggatcgatcatcgatgtcggtgaccgttgtagtcaattgaatctacctgcagttggaattatagaagaaatatatcagatttgcagaaaagaagttgtgccctttcaatatgctccatatatgataagttcacaatgcactataaaaacaggttctagtttttgacctcctggtataaaagtttgaatatttggtacaaacataatgtctgacatatgtacatgtctatataaatagaaggctactgcagaacactataccattccaacagaatagattatatataacgacatcagcacggtatcttagttagatctgatatttttaatactagataggtaccagatctagtaccgtggtacctgatacaatacccataggtattatatttggtgccaatgataccagatgatactgcatggtactaaatcctgctacctaggtaccnnnnnnnnnnnnnnnnnnnnnnnnnnattccgttagaacagtgtatcgttttgtagtattatgatataaataccatgcaattaaaatatcagaagaacaaataattttgaaataaacattttcatgtttaaatttatctaaacttggtgaaaggattccataggttatgaataaaaataatatagatgcatatgggttgcacactagtaaactagaccatatagcctttgcttaccgtactactaagtaacctagttgaaaacaaaatggctaattctgtgtatcttttctacacctccatcttggtgtgcgcacataattgttgctgatttactatgcagataaacaaggagtaccaaatgacagcaggccgccattatagccagcactcaaaagttagccacttagcttcaaacagtcttatcatttttttttttgccgaactaatattttggtgcgacttttcatcagatattttacagtgctggaacttcaaaagagtgcaaaaatagtttttctaggggaagtattgagaggttaaataactattcctgaatcctgaacagtgccaattaaaatgtagggcctgggtactgtgggcctgctggtttcctattagttggaaaatacagataagaatagtttgtttccttgctaatttggtttccctcagatatattcacatgtattaaagataaaaattacattgtagatagagttttatcttgtggggccaagccaagtaatctgtacaaaaaggtagagtgctagcatgtataactattactagtaagcaagcaatgaagatgaattaacctagtctctccccctttctcaaaattgttcatccaaatctatgatctcccatcatgtacatacatacatacacatacacgcacacacatatatatacctcactatgttacctctcaattaacactaaaaacatttctagttcccaaggtccggagaaaaccacgcaaggaaaattaacactaaacattttacaaattgcacttgtattcttctcttaccaacctgttacaaccaagaatcgcatgcctagtggtattgctagccatgcaattcatttccaataaatccctaaatttcaaataggacctttactttatttcccactatacaccactgtcctccataacttcatttggggtttctcaaaaaaaaaaaaacttcatttggaaaaatcaaccaatgatggaatcagcatgatcaacaaaataaagaggaaaatataataaagcagtgttgcagtaacggaaacaaacttgaaatggaattctgttatactagccatgcaaatctatagaatattttttgcttattggcttatagaggtatgtggatagatttgacctgagaatagagcctttgggcaaggccttcttatagtattgcgctgactgccgcttgtagagcaatgactgatcatagccaccttctttctgaggccacactaggttatcccaccaatccttctcacagtatactatgggtcttggttcatgcaatccttggacgtcaggcaggtgtctaagactacagcagcccctgatcatgatggcctccagcatgggagctgacattatttttgcctcacatatccctttcaagctgggaagctcatgcaggtggacgtgcttcagctttgggaaatcaatagcatcattgcttactgtccccttggagtttgctgtgttcaaagggaaaacatatatgaggctggtgcagtacaggatctgaatggtctccaagcttggtaagttgttggacaagggaagtacatggatgagcctaggacaggaatccagatgtatatactgcagtttcttgaaggaatcaacatttacatgcttgacttccatgctccaaatgcagtgggctgtttggagatgtgatgcccagaaggtctctagccaagagaaagctacgatttggtcatggtctctgagtttgaatacagaatgtaacttggggcatctctcaatacagcaccacttaatccgaccccaatttgatccaggaatactagtcatccaagagtcatcatgcacgtttagagagtgtacaatgtctatgaaatttcccaagatattgtcattcccctgcaattgttttctgtttctgatctctaccttgcagcttctgttgcactttgactctaaaggcagaggcgggcaaggacaaatcacaggggcaacactaagtgcaacaactctgtcaaatatatcactgcacatattccctgcaactgttcgatcaacatgggcattccttatttgttcactactgcactgcttactttgtccttcatctttgcaataattaacaaaaacaggtgacatgcagaaatgcacatggtgactttgcattgcaaacaactgtagaaaccgaagaagcctaggatccatgataacaacatgtgattggaataatttatcatcatcctggacaggtgacaagctattttgtcgtttgccttccagatgtactccaactgtatctacatgtaactcatccaattgtggttttgtaacatctgaccactttattgcacaaagatgcagacaaccaaacagaagaagacgattaagtttttctgcctgcatggcatccaggtcaagtttttccaatattgtgccggaaagatccaattcctcaagttttggcagtccactcaagattagcttttttaaccggcaacatccagataatgagatttttgtaatatttgctgcctttggatactgttctgatgctgcaactaagctgaattcctcaagtgataccggaaggttgctatcactgacagaatccaacccaacacaaccatcaagagtgacagtcttcagacatgttgccttggacaggtcaggaaaagcttgcatggtagagttacctgacaagtctagaatctccatcttttccatacctgagaatgtgaatgtgaatggatccttttcatctttggttgccgtatagtcttgatcaatcgtcttgattacacgaagcttctgtatcttgttatgctgccgtttccaaatatgtctcaagttgtgcagtttcactcccttaacattgagctccctgacattgttcatttcctcaatcatctgtggggagaaaacccactgtgtgtactgtaggtctagcacccacaaaccatgaaaacagttccaagactgaacctcctctccagcatcaatgttcagatcaaggcagttatcaagcccaaggaatctcaatccgcggcaacagaggaaaggaggtgaagcaaatctaaaggtacagaggctaagttttagcactctaaggttctctgcatgttgaaacatgtcattataattttgtaaaagatgtgcagggttgagctttgacttaaaaaaatattctactagttccaccgtgtcttttgattctgtgtcaatttggtgttctgccaagaaaaatgatgacactgtttgagccactgctgaggcagccaggaacccataattacttgaaatcaggtgacttgttgaaatccagttgtcagtgttccgcatcatgtggtaaagtccagggtcgtcccattcttgccacatctcttgttgtagagcatcagcaatctcccattcctgaatgatcccatcacacacccaatagtttgaagcatgaactgcccagtcatagtcaatgatgtctctgccaacaaaattaagtttcgatatatacaaccaacatttggcaattgttgtagggtgcagcttggctactccggaacatgtgttggaagcaatttctgccgcctcctcacacaatatatcccaccaatggctttgatcctggaactccatcccatatattttgttatggaattcggcagcaagaaaaacatctgccttttgcaccttgtcctgaattttggtactcagccgaaacctgcccctgaaggtccacaatattttgtttcccttatacagctgatatagaggcagaccaaaattagttacatcttttatttcattatcactcccattatgaaaaaccacaagaaatcttccactcattaggacatcattaacagctattccaacatcattgatcacgtctctggagctttcatcttttccattgatatcatcagcctcatcctgctcatcaataagatcttttgcttgggtcatctctagtttctctgcaattttcctctgcatttcccttatgcttttccacctcgagcaatcaatgtggattatcttttcaaacctcaattctgggtccgtgatctggcccagtgtaagccgttcggcaacagctctgaggacagcagatacacccaatccttcccaaccatcaaaatagaccacatttgatacatctgatttctttagtttgtcaattatactatcaacagcctcagcaacattctctgcggtaattacctgcagtggttaacagtaattaactgaggttagctcagctcagctgggttgcgtacaaagtaacacgactgtctagaagaagaaaaatcaaatgaacactatattcagagaaaaaaaaatgaaactatatatttagagggggggaaatccttatttgctactccactttgagctgtcaccaaactaggtatgccgatgtaggcgaggctggtgatgtggagacttgttgccgcagccaccgtcccccacctcgtccatggctggcgccgcctccccatcctaagcatcatcgcccagatctagtttggtgtcaagcgcatgcgaatggctgctacttggggccatcagcaactggatggcaactgtggcgggctggcggcaaggtcaggaagccgatggaggcgggagaggaagagttgatcagcaaatgggagacgaggatgggcggccaacggccatactgcccatcagccatggggatgggagaaatagcaagaaagaaaatgaagagggaggaaggcgatggttcatggaaatttaagtatttgctactattctatttatcaattatccaaatgccaattttaattttgtgctggtaaatttaacgccccgcgctttgttacgggatatatattagatagcgtagaaataataaaatgatttggattgaaatatcgtgaaaaagatgatttggcatgtgcatatttattttgggagtacctatagaacatttgacatttttctaggagaaaaacttaaatgtaattacaatctaactagtgtgtaactagaggtttactctgatctaacaaaaagtatcaaaaagtatcttgagtatcagtacatccaacgatcggaaacgatttggtaccgtgagataccagtacctcgaggtactttttgtttgaatagcgcaaatctcacgtaactaagatgtacttactccgtttcacaatgtaagtcattgtagcattctccacatttatattgatgttaatgaatctagatagatatatatgtctagattcattaacatcaatatgaatgtgggaaatgctagaatgacttacattgtgaaacggatggagtaatttatatgtaagaa

SEQ ID NO: 606 - DNA, 12010 bp, Oryza sativa
ctcatactgtgccatggaagctgcctcatccaaatcacagctttgtagctcgaagtccggtctgcgcctctgtacttcctcacctcatcaaagaacgagtactgctccgggcacacacagcttgtctggttgttgctgccatcaaacatgcagtaactattgaatccacaggtgccactgcctacttttgtctgagcattgcagatgttttcaggttggatgctcactgctgtccatgcctgactcatgctgctgggcttcttcgggtacacatattgcctgaacacaccatctgggtcaagcgtagcacgatggtagtagtcctccatggagcggatcaccccagatgtcatgttgaattgtgttccattcttcatgctcacgtatatcctaccggtagtattgaacaccagattggtgacctgatttgtgacattctcatctatgggtgtggaccaatatgggtcataaaggtttccagatggaactgccatggtataaagtgcagctcgttgagtttccatgttaagaagaaacctgccattggagtaatctgtggtaaggagtcggctgcggagcttcattccaggggacagcgcttgtgtgaccaggatggtgtctgttgggttcttgaaagtttcccagctgatagtagagcctcctgcagcagcaatcacaaaattcccggtgtcgagcatgctggcatagggtgcaccagttgctcctggattccatacctctctattggtgggatctcggagagaaagtacaccagttgaggtaaactggaggatggagccaatggcacttgtatcggctgtggttcttgctcactggtcttggcataccatgttgccgtcttgtcgctgatcttgttgaaccagatggcgaggaggtagaaggaggagttgccatcgatgggccggaatccaaacgcgaagtcgcctgatggcgagagccatgcgttgtttggcccttgggttgttaatgatgtgcccaagctgatgttctgagcttgagcagatggggaggacagtagcaccaacaattggagggagagcaagaagagtggaggtgccatattgcttgttctgattattgcttccatttcctactttttattgcacaccgaagagttgacttgaccttacaagttatttttttttgaacttgtaaggtcaagtcaactcgagatcctgcccaccttacaagttatttctaaggtaaaatgtcacgaggaatagtatctgtaggtaaatggtcattgtcttagctggccttctatataccacctggattttgtgaactgaaatttgcatatacatacaacatcccttgcatcctccattctaagaaagaccatgatagccacatactttttctaagattgaactggtctgtcagtaagactattccatgcttgacttgctaaagtcttccaacttttcgagtcttccaaggtggtcaccacatcaggtcaagacgaattttagatagagcttcttctttggcactttacagggtagaagacaaactcttgttcagtttctgtttatctttatggtagtgagtatacaatgtccctatttctttctaagcttacaacttgaattccagttggatggtcttacaataatctctgctggatatctgtctatcagatcactgggtctgttactgacagtcaggctagctcaagctaatattccgttgtttgcctgtttgtcaggttgtaacaaggagtcaaaattttcagctaagtagctaatatatcaattttctttgcaaaatccgtagagattttctatgggtacattatttactcaaatttccttggaatctatattttttctccttcagagaattaagtaaacaagccataccaagtcttgtttggtgacagctgagaaagctttgaccttgtccttaataatgatgctgtgattggaaatgcgattgaccataactatttgtattgtacttagcattatttctccttgtctagcacaccagactactgaccaacgatcacatcatctgcagctgaaaagaacttgttttgcctgcattttgtacatctcagtctacatgttttgccaatatactcagttctagatactctggtcaaatttgttttagagcaattttttgttttatcttggttcaagtttctagtttttaccacaataagtaaccttcagttttttatatagctttgcttaggagagctcatgggtgtatctaatattttaaatttctaatatgcaccatacctatcggggtgacctgttcatcggcacaggctgttttacttggctgaccccatatctttgtcccacaatgcttgtctgaagggccaaaaggcctatgatatattgtaattgtaaagcaataaaaataagcatgttattgaaatagttttatttcgaaaatgacaaaatatctgggtttgtttgactttgggactactttgtcatgtgaagttaatctgggcttaaacctgttttaggatctccttttatctgttgcatggatggtaccttagtttcattctttcattctaggtatttggtgagttcctcaatttgcagcaagtgttacttgactgcatgggttttttcagaaatcaaggattcttggtgagctttgttggggtatatggcatgagaatataaggtagactaatctgttatgatgaacatgtatctgattctttctgtttacatctaaatttggcacctatggatgaaatagggaaaaattgccaaagtttagaaagtgacgggtttccttcacagggccggtcagaccacaggtgtatgggcggtctgaccggctagtagggccggtctgaccgcaggtatgtggcggttagaccgtcagggtccgagtccgagtctgttttcgtcgggtctcgggtttccttacttgggaaggcatgtttcgtgtttcctttggtttctatccctatttaagggacaaggccggttcactgtaaaacccccgaatacaatctacttgaatagttcttttactatgttttctattttaccctaatttagtccatctttgtcggtttgcgccgtaaaccgtccgtcgccgctgcgagactgcgacacccttttataggtttgtctgaaaaccttccgtttgcccacgagacgggtagttatcctcatatcgatctaaatcggcctagaggctgattttgagctctaaatcggctccgctagtcggtttagctgtttttctacagtacccatgttgatctggccctttggctagattgaggtggttggcgactccatatcaccacaaggcgtttaggtgttgcgatcgtacttgtcgacttgtcataaaaagttgccaacgtgatttttgacgactccgctggggaacgatctaatcggccatatcacggccgaatttcgtttaatctagtaattactgttcatcaaatcaggagtttcggcggcgaagttaattatctagtcgtcactgaatccatctgaatacttgccgttcagcacgccgcgtataccgaggatcatcgtcaggaggcagaggccggctcgatggcctcgtttctttttgtttcataaggcaaacagagaaaatatcaggcttctagagccgatctacctggcagacaagcagcaggagctttgtttctttttattactgtgcacgtgctaaaacaaagatcaggctatccaagccgatctacttctgttcacataaaaaaaaagccgattcctgctatatcggttattcccgagaagcttcaaattctccaatttttttgctaagtacagtagcatacaaggaaaattacaagaccgtatattaatctattcggtcagcgatttcggctatgatctatatggccggaattaatcaaggaatttcttcatcaaccatgatgagcgggaataagatcgacgaggtcacatgggaggatcttgacgcggagcaacacaagatgatggtggttacgcaggagctgttgatgaaatcatacatcaggaccaatcaaggcatcgtgaaggaaaacgtctcgcttcctcaagttgtagttttaccaaaggtaacctccgattcgcccaacccgtcctttgctaataatcactgtgtagatgtatatactacttctagttttactcctatacaatatgcttataatgctatggggggtcaatgagtgtttatacggctgattacacaggaatcggctatatgcaaaacctagataacggtatgactggtcatgacaccggtctaaccgcatcctatgccggttagaccgtgcccaccatggccggtcagaccgtgtactacgccggtcagaccatgcctaccataaacggtcagaccgtgtcctatcctggccagatcgcgcctcctgtggccggtctgaccgtaccattgaccaccggtcagactgggcatgggctggtcagactgggtgcttggccggtcatacctcagactggttccctggaaatttctccaggttttcataccacgactagcagtgctgattttaattattattcatcatctgttaatactgttagtcatgctactccacatgtccctaatgcttacaatgatcataatagaggatattctcatgacaccgggtacggccaatatgacaatattgcgccgcaacaaccaccttttaggccatcaaatccaccaccaaatccaccaaggcctgaaatcatggaggtaaggaatcatgctagggtttaccaaatgccgtatcctaatttttatgatgttgtcccatatcctcctgattataaaattcctgaatttgccaagtttagtggtaaggatagtaggaccacatgcgaacatgtaggtcaattcttagcgcaatgtggtagggctagtagtatggatacatgtaaattgcgcttgttttctttatctttgtctggtactgcttttacatggtttacttctttaccatcaaattctatttctgcttgggctcaattagaacaaaaatttcatgattattttcacactaatgaaactgagcttaagttgtctgatttaacattggttagacataaatacaatgaatctgttgttgattatattgaaaggattggagatgttaaaaaccgatgcttcaatttgaaaataactgacaaagatttggccgacattgcatataatggattgcttgattctattaaagagaaattgaatggccagatatttcttgatattgatcatgtgttgcatgaagctctggctcaggaaagccgagtggatgacaatagcttacaagctagtttagatgaaaatgcaatatcatgcatagccgaaccaagcgatggttcggattgtgttaataatttgtgcaatgatgctgtgacaagtatagctgaatcaaatgttggtccggattgtcttactagcttggatgataatgcaacaaccattatagccgaaccaagtattggttcggattttgttactagtttagacaacgatggaatagccgaaccaagtaatggttcggattgtgttgctagcttagagaatagcatcattgaaaatatagccgaactaagtgacggttcaggttatatcacaagcatagcattatcacctaagaccgagtcactaatcggttatgtggatgttggaaaagatgatgacaatgtcttgcgggatagtagtgagatagaacccaaagtagctatgcatacgtatcaaaggccgtatcctgaacatgtagattcggtcccatatccgcaaggatttgaggtgcccaacttcacaaaattcataggtgaggatactagaacaacaaaggagcatatcggccaatttattgaacaatgtggtaaggccggtagtgatgatttgcttaagttaaaattgtttcctctttctttgtcaaactttgcatctacatggtatagtttacttgctcctaattcaatttctacatggtcacaaatggagcatgagtttcatgattattttaaagatgcaagcttgatagagaaaagaccggttgatgatttatcggtcacttgtgagactatttcggttacacctatgcctaagaccggaattgttagtaatcctttccctattagtcctattgatgatgacaaatggaaagggaaaagtgttattattggggatcctcggcctaagaataggatcaaaaatgcgaaggccgaagatcataaagttgcaaaggatgagtcatctagttcccaaaagaccaaaaagccgaagctcacttttgagatgcttatgggtaagtacaagaaaggattagccggtcaacgatttgataatcaaactagtgattcaaaaagaccaagatcatctcgtagggagagatttggtcaaacaccaaagcaatcggagccatcaactataacaactccatacaaacctccggttgtgatgccatggtatccacatccaatgtcaccatttggttatccttttatgtattacatgccatggatgcctcaaccacctatgccgtgtcatcaaggatggaagcaatcacctaggacagtaccaagtaattctaactcaagacaagaccgtttctcacaaaagaatcggtccggtggatcaaaggtgaaaaaggtgtgggtgaggaaagaagccaaagctccggaggtcgttgctatcaaggagaaatctcaagatgttcaagtacctactgaagatgcggcgaaaactatacaagcggagaagactgaagccgacgccgttgctgtcaacatcggtggtctaaccaagctagttggctggtctaaccgccagactacggccggtctgaccgacggcttgtggccggtctgaccgggcccagaggccgtctgaccggggggcattggagaagagtaggaaaattgtgagcaacataggagcttccacttcgaccaaaaatatgaagaatcattgcttagctcctggaaaacaatcacagccgaagtggataccttctggcttatctcgctctcaaaagaggaggctacagcgtcttcgggccataggtcaaaaagaaaaggaggccgaagatgtggagaacaagacatgcaataatttagagcctcgaacagcacctaggcaagtgtggagatccaaagaggtaaaagttaagagaccggtaatttcccatagtagagataaatccaatttgatgacagaataatcatcagtcattagagataaatctccttcgcatgatactatggatgttggtgcggtgttcgtcttgccttcgaaattgtgcagtcgagaaagccgattttgctcagggggcaagacattaatatgctcatgaggaaaccaagagaagatgaacggtgatggatataacatcacatctttgagccgccgtttgttggatgctaaggcaaggtatgagtttattgtgtttaccattatattatatgcctatgccatgttattagaacattgcttgctatctagcacatgtgtgtttttgcttatcaaattcatattatacatacatgttgcaaatgccagttctaagtagaggaattggtaggttggcgtataatttgtttgaagtatgatttggctcatgagtctttgatatttatttaaagccaaatcatatgtgtttttatggatcaccatataatatatagatttcatatttattgcaccatgaaagttttgcttattagtaattcggttaatgtcaatggtcaatgtgatgatttgctttagagttgttttctttaggaacattggcattgttaatattttgcatacatgctcaagccgattacttacatttgtagtttattggaatctatgcatgtgacacatatgactttggtgattcattattgatcatacttcaattggctaagtgttttgatgctatgatgattattgtttcaaaagccacttgaattagtattcatctagccatattagttggatattataatttttcatatgtcgagagagaaggaattttggtccaataatttggtacaccaagcatctggctattatgtgaagaaaatttatatactaaaggccgatgcttgatttcaaaagtttggacgaaattggcaaagtcatagaccaggggcggtctgaccggcattgcatggccggtctgaccggtggtatcggcggtctaaccggttctgcatggccggtctgaccgggtagacaaggcggtttgaccggcattgcgtggccggtctgaccaataccaggcggagaattagggggcatgttacaattgattaaaaggccgaattaattgtgaattcggacatttgtgcccatgagttagaaatagcttggagaattcctttgattagatatttgaaagatcctacacataaggttgatcagaagattcggcggtaagcgttcaattattatatcgccgaaaaatagatggagtattacttagataatgatcaatctaaagttgctaggagagtagtacatgaaaggatttgtggaattcatcaatcggcccgtaagataaattggttgcttaggagagtggggtttcattggccgaaaatgattgatgattgtttcaaatgctatagagggagtgaagcttgttaacggatcgacaatgtttaattaatgcctaccgctgtgttgaatcctatcattaaactatggccgttctgagattgggctttggatttcattggtcaaatttatccttcgtcatcaaaagggcattggatcgtgctagttgcaatggattacttcactaagtgggccgaagccgtgccgctcgagaatattacttgtaagcatattgttcatagatttggtattcctcaaacgttaaaggagcttcttttatgtccaaggaagtgagaagttttgctgaatcttatgatattaggttgttgagttcttctctttactacgctcaggctaatggataagccgagtcgagtaataaaacattgttgaaattgtcgttttgccagttgaggtaaatcttggctctctttggtatttcaagctagacgacttgtcggttggagattacaagaccttgatgggaagcaattttgaagacgtcatcgacaagcgtttgaagactttgaaggagatgaagacactccaagacggtgttttcagagaacaattcatgggaaatacttgaagaaatacttcccgagtatttggcaagatgcttaggaagtcctatggccggtaattggattatcgccctgagataacatgttctatgcttttaggttcatgtatgttcactaaaaaggcagggggcatgtgtttacacccaaatttggcacctatggacgaaatagggaaaaattgccaatgtttggaaagtgacgggttttcttcacagagccggtcagaccacaggtgtgtgggcggtctgaccggctagtagggccggtctgaccgcaggtatgtgggcggtcagaccgtcaaggttcgagtccgagtctgttttcgtcgggtctcgggtttccttgatcgggaaggcatgtttcgtgtttcctttggtttctatcccgagttggacgtggagaagacctgtagagggggagaccaacccctatttaagggacaaggccggttcattgtaaaacccccgaatacaacgaatacaatctacttgaattgttcttttaccatgttttctattttaccctaatttagtccatctttgtcggtttgcaccgtaaaccgtccgtcgccgctgcgagagtgcgacacccctttgtaggtttgtcctgaaaaccttccgttttgcccacgagacgggtagttatcctcatatcgatctaaatcggcctagaggctgattttgatctctaaatcggctccgctagccggtttagctgtttttctacaaaacccatcttgatctggccctttggctagatcgaggtggttagcgactccatatcaccacaaggcgtttaggtgttgcgatcgtgcttgtcgacttgtcacaaaaagttgccaacactttctttttctcaaagaagatttggtttgatgctccagtcaccaggtacgctataaataccctaagaaagctcagtacaatgtacccataactacagtacattcatgtctatatgctttctgatccaatattcatcatttgcgaaatggtcacactaatttgaaattaaaaaaaatacccaaagctgctctcttctcctaaacatcaaaactattctatgcaccatttcttgcaaaaccaagatcctgaagcaaattttaactttcctttatctgcttctaataactgttattcaacaaatgcaggtcgaaaacacacagaacgatacagaagaggtccagcactcaatgcttttaagaataacttataaagagtttacattttcacgcatttgtttgatctgaaatttttaggttgtttctacacgcagaaagctatctcctgacattgagctacatacatcttttgttttgtccccggcagggaaagatgaattgcaccgtagttctgttttgtgctttcagtttcagctattcaatcttggtgtaattgactagtctcaataaagcttccattatctaaaaagctaatcaatcttagtgagcactctgatattgaccttatggacccattaacatgaatcataatcctcaaatgaatcctccattcaaatgatcaattcctatacagcgctaggccaggatggatgcaaccaattaatgatagttcatttatttgtagataggtaccatataaatttgggaaaattacatccataccacaaacttttgaacggtaaaaaaaaaataccacagatcttcccaccttcccagcaataccaacaataccaatatcaattgaatacttcgattgttattctttatatttatggtgttcttcttagtcttgtgttattttatatgcttatgtcgtagaaaatgagggcacatgtttaataaaaatacacaagaaccaaaagtgcataatatcattctaaactgagccttgaatttctgcctttttgtgactcatatttttccccttctttcaatgaccatgatattattccatatgtagcttgctgggattagaactttggatgatatatatggagtgcaagtacggaaaggctaatgagcgggtgatcgctcccccacccgcccagcgatcacctgcccaccctctcccctatactactagatgtactcctccctcttctcccccttcctcctctccttctcctctttctactgcagtagaccacacaattttttgaaaaacaaaagttagaaaaatttatgtatagaaatactatatataaaaaatttgaattcaaattcaaatttgaatcgggtatgtaaacttttgacttataaactttgggtctataaactttaggtgtataaactttagatgtatagaaatactatatatagaaaatatttgaattcaaattcaaatttgaatcggatataattcaaattcaaatttgaatcgggtatataaactttaggtctattaactttaggtgtataaactttagatgtatagaaatactatatatgaaaactatttcaattcaaattcaaatttgaatcggatatttgaatttaaattcaaatttgaaacgggtatataaacttttgacttataaactttaggtctataaactttaggtgtataaactttagatgtacagaaatactatatataaaaaatatttgaattcaaattcaaatgtgaatcggatatataaacttttgacttataaacttttggtctctaaactttagatgtgtaaactttaggtgcataaatttactaaaatagaaaagtaatgtggtgccaaaaaaggaaaccaggtggagggagggaggggggaggtggggagcgaatctgatcgctaccccatccgcacggcgatcgatcgcccattaggggtacccgtgcaagtatctataaccatcaatgaaccagaagtgagag

SEQ ID NO: 607 - DNA, 24512 bp, Oryza sativa
cctccgctgccggcagctagccacgcctcgctggcctccgtaccgactgcgcctcactggcctcctccgctgtcactgcacctccacacgcacaccgtgccgcgcctccgcacgcgcactgtgctgccctccatcaccgtcgacgccgcgccatcgctagcgaatccagctgccggcctcatgccagtgccactggtgcgctgtctcagaccagatccggcgcgatcggtgctagatccgagcgccccgctgtcggatccaaagtctccgctaccaccgccgtcgctccaccaccaccctcgccgatgtcgccattcccgccgccatcaaggctcccgtcgctgtcgagacctcgctgtccaattgccgagactctgccattgccatcaccatctccgccgctgttgctgacgccgtccccaccgccggcagacaccccgccagatctggccagagcggcacagatatggcggcggccgccgccgccaccctgggtgactcccctggctgcctgagcaggctggcgagaagccccaccactgccttccttgcggccatgtggctttgccggcgaccgctcgggtggcggcgaggcagaggaggaagaaggggggagaggtggcggcagggtcttcgcctcccgagccgcccctggggtagggtgacgcgagagagagtgtacacactcataagtattcttgttaaacacatggttaatgtcagttataatttggtactctcttttttattttggctcatgagccagcagcttataagacaaaaatactaaaacccaaacaaacaaacaacattttggttgattatatttaaagctataaagcactcctacactattaaaatcaacagtcatatttgtgtagcttttcatatgtcaattatagatgtgccctatttttttggctcatgagctaaacgaaaaagtttaagccccaccaaatggtcagcttgttcgttgcacttgttttagccatattaagccaaaataaaatcttggttcaagcagttcttttaatttgtgaattagacataggacttcaccttaaactcgagaattactagtaatgtgtccgtgctaacgctacgtatcacggcacatggttcgatatcaagtatctaatatgataaatttaatatttaggaaaaaagaactacggagagagttattatattgttgctaattgttaaccgtgcaatttggtaagcccggagtatacatcggcttagagtcagcatcggcttcgaaatcctgagattagccgatgagagttgtcaagtcgtcagttgtcggattcttgctatgttcggttaaggaaattgatctactaaaggaagcttatctagaagagaccgagttcaaagagaatgcggcatggcaagttatatattaattaggaatagtttgttagtttccttttatctctaggaaagtgtgtttagtgtcctataaggactttatcttttctttttatctttaggaaagtttctttcttatccgacaaggacttatatcaacccatgggtataaatatgtacacccggggtctatgtaatctatcttcatgatcaatacaattcggcgcatcgccaccttttaccttttctactttattttatcgtctggcgggacttggcacctgacgcggggctgcatcggtgttcgatctccgactaaggggtaagtccaatgttccgccggcccatgcaattgtatcgtttacgtcggcgtcgttcaaggctgcatcagtacattcgacctcttggattgctctggtttggatgatatatttgcctacctatttatcatatgtctctgttaatctagtcttagcatatcaatttagctctatcagctgcttctcgttttagggtttctgcaggtatcgactaaatcgcgttgctagattagattagcttagacatctaccaccctgaaaactcagtcaacggcttgattgtctagatattatgtttcttttcatacttagtgttgtatcagttaagtttgatctactaagtcgtgcttagaaccataatctctagcctgcttcttgattgccaataagggtttcatcggggttttagccggtgagttatctggacgttgcatcggctcataaggaatgcatatacatataagttggatttagccgataacaacaaaggtttcactgtttaatctaatcttgtggatttcatgacatcggaccttcagccgatatatgctttaaccttcggatcgatgcttatttatgatatcattatttgccgattggtttatactgaattatattgttattttattacatcatcatcagccgattgcctttatatcattatctacattggacatatagccgattgcttaaaccctatcgctatcggctggtatcgggcatcggctattatcggctatcggttggaactactccatcggcttgtcagccaatcgactgttttaatctactatttgcatatcttgtcagttgcaggatcaaactgactggcacgcccgcatctcatcaagatttggacctgcacaggagctaagcagatcttctaggctggtatgttcgattctttcgtcaacactaattatatagcctccaaaatataaaatcacaacttttgtatcttaggaatacaaacaaaacatattgcctacaaataatacaaaccaaacttcatattacaaggagaagcgttttgattattttataaattatattaatcaccgagacaaatttcacctaaatggaaggatataattagacagaaatgaccttgttgtctagctcaagtataatcataagtaacaagaaccctatctgaaccagtcctcgtgccttcgcaaagcatgttagatagtgcaaaagcattttttgtcattctgcataataaattgaaatttgtcatttatgaattagtttatagaacatgctgtaaatttgaaccgtaaatgtatagagtataaggatataccaactatcatgaattctttcaagtgcatgcaatcctataataaaccagatattaagagagttagtatttcatcaagtatttgctactatgattatcttttaaaaaataaattgttataaaatggcagcaaaccaccagcagtactacttcatgctttgtaaaattagaatatacttgaatcaattcagatgcttcaatggctgatgaatttttcatgcataattctacttactttcggttatgaagaatatagatagcacttaccatcaccaattggcttgccatcccatttgacaatgggcagaaaaggatctgactgttgcatcctagcacacttccttgctcgttggtcatattaaacacaccggcatccaccatcctgggtaccagtgctgcagccacttacagtagcggatccagaaaattggttcgttggtgtcataacgtgtctatcggtgtcatagtatgctaattatgcttagaacatgatgttatagtatatagataaacagttttgctataggttttgccgaaagtcgtcggtgtcgcctgacaccgatgattatactatagatccgcccttggccacttagccatttacctagtcacccacagcgttgaacgccagcaccaccagatcaccatcgcccgtgtcgaacaccacgttcatcatcggtccctcgtccatatccccggcctcgatgagccacaccaacgcgcacacaccgtggacctgtaccaaatgtgaatctacctgaccaaatcaagaacccactttgagtctaaattcagtaccaacaagctcctgcagttgtatttttttagataatggaaatggattacatctccggcttctgtcataagacacacagccataagtttaaaagtaataaaaaaggtaagataaaaataaatcaaaacgagaaataaggtgatgggacaaatctccaactcccctttattattgactagcgttaaaccacgtaaaaatttttagctagcaattcttatggaactatgccacccatagtggaataagagacccttggctaccgattccaagagtgtagcaccattgcgcatagtatcctgctcctcatgtggtagcattgtagaccaaaagtggagccagtaggaagacatgaagataacctgcatagggttagataattgtttaccattaaaaactttatcattgcgacaacgccaaattgaccaacatacagcactagctccaattagaatcatcttcttaatggacctagatacccctctaagccaattaccgaaaatgtttttggcgttacggggtggggggatattaaaagcaaaaaacacacatctccaaacaaactgagcgacatgacactcaaagaaaagatgttggattgtctcttgtgtatagcagaaagaacaatgtttgtctcccccccccattttcttttagccaggttatctttcgttagaattactttcttgtgaagaaactacataaagaccttgatctttagtggaactttcaagtcccatagaattctctttttgatccgaacattacagttcatgatcgcggcatacatagatttgacggaaaattgaccattcttatggagcgaccatataaagcagtctttttcatttgacagagttatattagctagcttgaggatcaaatcgttccactcgattagcttttggccaacaatagctcttctaaaagagatatttagcggtgttgtgctcatgacctctaccacagtagactgtttctttcgagccacattatataatgtagggtactgatctttgaaagcgcgcgatcccaaccacgtgtcttctcaaaatcttatgtttgtcccattaccacatctaaaagaacccaacctaagaaattggtctttgactttcattaaaccggcccagaactaagaaatacctatcttgctggacataccagaaagaggtttaccctttaagtatttatttcgcaaaaggtcttgccataggccttcaccattaaacaactagaaaagccatttgcttaataagcagctattttttatatcaaggttatggacacctagtccaccttgatcttttggtcgacatatgttttcccacttagtctgtattttcttttccggtcatcattactccaaaaaaaacgtgacctaaagtaatccagtctttgaagtacacctcgtggaatttcaaagaaagataacataaacaagggaaggctcgaaagaactgtgtttagaagggccaatctcccaccatatgacatgtttttgcctttccatgtgctgagtttcctctcaaatctatcttcaactcatttccaatcaacattccggagttttcgataatgtataggaataccaagatatctaaacaggaaagatccaaaattacaaccaaatagttgtctatattgatcctccacttccttggctttcccaaagcaaaaaatctcacttttatgaaagtttattttcagccctgagagttgttcgaacacgcataggatggctttcatatttttggcctgttcaagatcatgatctagaaaaaatattgtatcatcagcatattgtagaatggacaaaccatcgtccactaaatgtgaaatgactcctctaatttgaccatcgcatttagctctctcaatgagaaccgctaacatatcaaccacaatattgaaaagtatagggacattggatccccttgtcgcaggcctttgtgcgtttgaaaattattacccaagtcatcattgacttttatatggacacttcatccttcaaccattttagaaatccaatgacaccactgctgagaaaatcccttcatgcgtagtgtttgttggaggaattgccatttgactttatcataagccttttcaaaatcaattttgaaaataaccccatccatatttttcttgtgcaactcatgaatagtctcatgtaaaatcaccaccccttccattatatttctaccgggtaaaaaagccatttgggttgggcgaatgactttgtgagccaccgatgtaatcctattggtgccaacttttgtgaaaattttgaagctgacatttaaaaggcaaattggcctatactgttggatttgttttgcatcggctcttttgggtaataaaacaataattccaaagtttaagctaaaaagaggaagagtcccattatgaaattccttgaacagagccataagatcatccttgatgacctcccaaaaaacttgatagaactctgtaggaaaaccatctggacccggggccgaattatgttccatttcaaaaactgcttgtttgatttccttttctgaaaattcagcagtaagaatgtcattttcaaggtttgatacccgtgggatattctgaatctgttcctccatcaaagaaacatgattcacttccgttgacccaaataaacctttataataattggtgatgtactctttgagatttttatcaccggttattatagccccatcctgctccaattgaaagatcatttgtttacgatgcttaccgttggctaaaagatgatagtattttgtattactatctccctcgagcaggtgtttggctttggatcgttgtaccaatatagctcttcctgtcgtagcagctttgcctagtcatttttggcttgcttcaaagaagctaattccgctgttgagagaactgaaaattcagcttttttgtctagcacatcaatgaaagccaaaagctttaatttttctttcttgtatgcgccacttgtacttcgtgcccaaccacttaaatgttgtctcaagtgggcaatcctatgactccaacgctccatgggggtgttccccttatttatgttgtgccattctttagggaccatttcatagaaaccgtcccgttgaagccaacctagttcaaagcggaagagaggtttccaaaatgggcatgtgaaccagatctaagaataataggtgaatgatctgaaatggcgtgtggtagtgcttggcatgttaccaaagggaatttttgttcccattcagtgttcattaacactctatccaacttctcataagttggattttcaaggttatttgcccaggtgaactgcctccccgatagatcaatttctctcaaattgagactattgatcacttcattaaaaagaaaaggccaacggggatcaaatgaattattattcttttcttcttgcgacctgatgatattaaagtctcctcctaccaaaaggggttgagactcattactgcaagtatgcgctaattctgttaagaactgttcttttaaatcgggttgcgcagcaccatatactgccattagaacccatttaaaaccatcttctttatttctaagttgaaatttcacatagaaatctccctctgaaattgaaccgatatcaaaaacggctaaattaacccctaaaagaatgcccccgacctcccaacaggaggtttctcatgccataaaaaatcttttccaccacataggtttctaagatttgctgaagtgaatgacggttttctggtctcaaagatagcaataaaatccaagtgatgttccttaacacactcagagataaatctgaatttagctggatcaccgaaaccacaactattccaaaaaattcctttcattttttatgtttgttgcgtttcatttttggcttagccaaaggtggacataccactttatttttggcttttgtcaaaattttctttctttgaggtgcgttgcatgaatcaaaagactcgtcagcgctaccctcactttcttcttgccaatcactacataagtgctggatagaagataattttaaaagctcatccttgtcattatctacattactagaagaaccattgtaaacagaagaactagcatgtagagctacaaatctatcaacttcagaaatttttgtaccataaatagactcatctacttctatgtcatttctacccagggaaactcctagcttagaaatatttgcaagtagagttttgttaggcaaagatagaattgaacttgtagggttgaatttgttacctgctaccacttcgaggttatgaatcttttttagaaactctgctcggtttgccaccggtgcatccccgtttgccattgccttctgtcattcactttgacgtgttggtgtaggatgaatcagtcgacgagagcgacgtttagcttcttgagagggacgcttcccacctgcttctgcttgcacctttgcttcagcgatgatggtgcgtgctgcatcaagttgtgccccatcggcagccaactcaattaccgtgttaacacctgcagtcccgacatccaaaatcatcgagtcttgtgatgtggttacctctgtcacctcctgattcaccattggagcagcgtccattgtgccagttgacgaggacggcaagacctgagttgcatcgaccgacaaagttggagcatcggcagccaccaagcccaccttgtccgactcgatctcctgggctgcgtcgtccatgacaacaggagcagccaatgacacagttacagccccttctagtgttgatgctcccgtcgaagcctccgagagagatgcacaacctgccggtgccatctctcccgcatccgtcaatgtcgttgtaaattcttcctctgagatggcagccacactatccggtacagccaaagacaaagcagccacctcttcatttgccaaggtcacgttctgtccggtagttgggatctgcattgagctctcttctggagccttgttcatcaccgtttccaagctagaagccacgcaaattgttggcaaaacctcctcagcttgctgctctactgcagaatcatcaacaacagtgagcaaccctgcgatcgctgaaacacaatgtgaattaagctgagagtctgtaactgagcctcctcttaatgacattgaggatgacgcagcttcattttttagtcgctttggattccgatcttccataatgacatcatcatcgttcctcttttgttcactgtcatcacgctgatcatcttcgtctaacttttcctttcctttcgattcctcctcgggcatttctggttcaaagaaaatctcatacccatggttacggaacacaatgtacacactgggcggcaaagttgctaaatcatccaccgcaacctgcattcttacgaccccgtgtttccgaagataaaccatatccaccatcgttgtatttccaatgacagaaccgacagcatgaaggctaagaaagtccctaatttcatatggaacaccatagacacgaaaccatgtcttcttcaggacaaactttgcctcaatctcctgttcccatttgttaaataacaaatcaacaccaaaatcaaagctacggactctgccaaccctatgcaatctatctaattcaattgtagagggaaactgaacaacaaatgtatcctgtgccgtctcctttacttcaaatctgacgggaaccaaccggcgcagctcagtggtgagattatcaattgaaatgtgaccattctctacgcgaactgttgcagtcttactaaactcccttggtcttcctgataccttagctggtgtaggaatcatgaagaagccaccaccctctacaccccagccacacaattgcagtgggtttaggagcgagaagaagtgggcaattagagcatccctagcagctcatccatatttgatcctccaaatacctatatggatggtcatccaaaaaagattcatcattcatattcctttcaactctaacagatcatctatattacatcatccatatcccaccctcctatattttaataatatcttccaactaactttatatttatatttttaagggatatattttgaactactaaattttaactgcattttttatcgcaataatattttgaaatgagtaaattttaaccgatatagttttaatgaataattttttaattgatgatgtatttacatgaatggacttctaatccacattagcgctagcgactgaccttatcctctcgcttaaaaaaaagaaaaacagaaaagaacggaccttctctcgctaaaaaaaaataaagaccctaccttatcctctcgcgggtgcgtgcgtgcggcagacggaggggcgatgcgggacggcgcgggcggcgctgcagggcagggtggtgccgagctgaacaacggtgcgggctactgggcgacggcggaaggtggcgtccgcgcgcatggtgacgacggcggcggcggaggatgcaagcggcggccgcgagcatggcgacggcggcggcggcggaggaggcaagcagcggccgcgcgcatcgcgagggcgccagcggtcagccacgggcagggcgacggctacagacggcggtggcgcggctccagatctggtacacctctcgatctccactctcactccaccctccctctccaccgtccgctgactcaccttcaccggccggcgacgacggcgatggaggggaggtcgcgctggaggtgaggtcgcgtcgcggaaaagtctggatgggggcgggagaggcggctgttgcaaaatggcgtgaggagagaaacactccatttttgcttcttctctctcctaatttggcgcatccgccccttttggagggcctgttagcgtatctgctcgagctgatttttccccttctatacggcaaatgaaggacggatgaccggttagaggaactgctggggatgctcttaggtgccaaatgacctgggtcttcacatatgtcacaaataactgcattacaatcagtaacacggaaaaaaattctctgcggcagtgccgcacgccacaacccgtgcgacaccccgcagaatagcgacgcgtgtttaatctcctgctgcaggccgagccctctttggttggtgtcgagccgagtccatttcttccgctgcttattggagtcaagctgtccagggcacatgaatagtttttgtattaggtctgtaagttttcgggttcctatgtaagggtggtgtcttgcctctctttttatttctgcaatatagaccaaatgattttacatgctgtataaatatgatgtaaacgtgccaacctaatttcaacaccaggtgtgcttttaagttgtcaatcaacacatgtaatttttacttgtcaggttgggtatagcgctagaattggtttgtatgttgcaaactttcaggctttcatgttgttggtattcctatatggctatatagctccgcacctgtacaattaaaaattttcggagctactactctatgccaataaaagacaaactctagctacgaacctagacacaagctaggattggactttttttttttttgaacggagggagtactccttaaatgttccgtgatttgttatgtcatcaaaatgtaatttctgagcacccgagacatcttgataaagtttatgtaaaggatttatatattacactagaaaaatctccagcatattatcagcaacagttgcataaaaaagctctattgaaaaatgaaattattcaggcttcatgtgtagccagtagatgcggctcggtagcattttcaacgagctgacaggtgtgtgggtgtagtataccaggcatcggctcggctccaaagttgggctcaggccggctggggctgcagcgcgctgatggacaatggacacgcgtcgttattctacgcggtgttgcatagggtgtggcttgcggcactgccgcagagaatttctttcccagtaacaccatgtcccttttctttgcacctgaagcagcgaattttttacttagccgcggtctcatttgctgccttagtagccacaacttcattctccgttgcgtctggggcaggagcagctgcgaccgccgccacgccgtgggcagctccaccagtgccagcgccacttgaaggaacagcgctgctatctcctccaacggcagcacgacccctccccgctggatcacctcttccaacgtggccgtcagcatcagcccctgtggcgtgtaccagaacctgtggctgcgtgatacggatttcggcccctaccgcgaagaccgcgcctagggcctcttccacgcatgcggcgtccacctccatctcctctgcctaggttgaagtgctgaacaccagcggcagcttggttggttccatcgcctccgtcacgccggacgaatctcccaccgccgccagccatcaccccctctcgcacagcctcaacaaacgaacgacgaaaagtagggttttgcgacggtcagaccggcggcggcgacaggtgcggcgagcgactttggcggtcagaccggttgatctataccggttagactgacggcatccacacggtcagaccggcagattaatctcggtcagaccgacttccgtcgaattcgagggtaacttttatttccgctaaaagttttcggtttttgggtataacaactattcaccctccctctggttggcttagttattgtgattcgattctacagcatcgatctatatctctccatgagagcagatgggacttcacgcgagcagacgaacgctctccaatcgcccttcatccattcagatatatatccgcaacgatttgtgtaccgtcactactactagaaagattctcgcgtgcggtcaaaaccggttttcgcatgctggtgggcggcccgcacgcacccagagatctgcaaaaatcgcgattggagagaaaaaacagaaaattctagggcgcacccacacgagatatgtcgcctgcacggaaaaacaaaaatccaaaaaaaaataaaatttcaaaaaatgaaaacccttgaatccagcggtgccgccgccgccgcctcctcgtcgtcgtccgaggacgccgctcccgccctcgtcgtcgtcagcggcggactccgcgccgcccgccgctggatccgtgctcctctctggcgcactgccacgacgcccctcccctccaccggatctggggagggaaggaaggggagtggaggggagcctaatccctggggggggaggggggtgagggggcggccggcagccggatccgtgcgggggttgaccgccgcccgccggatcccgcacctccaccaccgccgccgccgccgctgtcgccatcgtctacacccaccaccgttgtcaggaggagaggagagggcgtagatgagtgaggccgctattgttgactgatgattgggaagaggaaaaaaggagaggagagaagaaaaagagatagacaggagaggagagaaagaagggaaaaattaaagtgggtcagagggaaaagagggagtggatatttttgcgtgtggccctcttaataggtccgcatgcgaaaattggctcattttagcttaaatgagcttattttttcagacgcgatcagttatgatccgtctgcaatctaaatgggtccctgtacaaggaaaatcatttttttagtagtgcgtgatcctacaggctttagagtcagaactaccttgcgacacgaagacttcatgataggctcatcgggagcacacgcaacctgaagacttctacagctcaggtgctgaactgctcaggtacaattctatttttttaatcaatcaggactctcgattttagcttctactgtattattttccaatcaagattagattataattctgttcttctctcatccgaattctgaaacgacatgaatcattactcgcccaagccatgtatcatatagatccatgagtttcaagttttagattaaattcacaaatcgaaaaatccccttgcattcaagaagatctattggtgatagtccaatgtacaatctataaaggtatcctatatacctatacaaatcatccccactactacaattctctgcttcctggtgcttccacatcatctctttccccctatccgttcgatctaatcgagcgatcaaccgttgctcggatcgacttagagcaagtataatagtgctgactaggttggcgataagaaactccacgtcagcatattcctacgtggaggagaaaaaaagaggaaagagagtgaagcgggcgattgcagaagcgccgagcgttagcatgccggcgcaggcattgccgccctcccgcagcaggtgcggatggtagttacgcagttattgttgatcccgtgtgcataaataattctgcctgctctcacaagtgcaacatgcaaaagattctgctctcatccggcatgcgacacacagatggtcacacaaatgaaagctagatttgatcatactcacatgcagtcaataaatgtatccaaacttctatccagacaatgtatagccaaaccattataccatccagctactgtgctgtcttcagatgacttggacataatctaccgccggcagcaagctatagtattatccttgctcttatccacccgcatggtcgcactcgcaccgcgtcggctccctctcctgcatcacgccatgccgcctcaccacagcgtgcttgctgcaccgctttctctccctgtcccgcatcacgacgctccgccgccctcaccgcatcgctctcgccgtgccgcatcctctccttctcctggatcgcgcccgtccagccgtcccagctgcatcgcgctccctctccacgcctcccctcccctcccctcccccgcccgattcccctacctccacgacggtttctcgcctgatcgctctgctccctcttcgtgaccctagccttcgtgcgcgcaaaatcaggaaaacggcatagacacctcaactgctccttgatggctaccgtgattgacgcatttaaatctgagtgctatgcccatcacaggtattgtgagtctaataactggtatccatcgggtgattatcaggtttggtggtttctatctgtagctctggtggtttagtagcccatgaatactagactccgcctttgctatgtaactaattgttgcaacacactagccaatttgttcttttgataaaaaaaaagatggattagccaatctccatcttgattagggattattggacgcaaacggcctcagctaattcatcctccagcgaggcagcgacggtgttgcattgcacacaccagcgacggtgtttcctatcatcctggcctgcactatttttttctgttcccaattggatcaggtgcattcttcttttcccttattctcccctattgagtttattggttcaccaaattaaaacatgtgtcttttggatgagttcatcggctgtactcatttttttcccatttagtactgtaaaaaagaaatgtcccaggtgtctgtcttcagtatgccagccaagatttaatatcagattcccccttcctttagatgaagatcatatacttttttgctgatggattttatgctgcatgttctcacctaattagaatgtaaattttggtcactaatttctatcttaaatcatatttcagctatggtatgattcggaagagattcagtttcttcttcagaggcattgatttctagaaattccaggctgtacccctcaaattagcttatttcttatactacaatattatttatttctatcaaataatatattaccactcttgaaataattgtgcaactgatccgtacttagtttgaagcagagcacagtaaacagtggccgttacacggcacatactactcaactttcatgatcacatcagaaggttagtattttacctattttcaacatttgtagtcaataaaattcattttcctatagttgatcaaataagattgtgctttgttagaaaaatacttggacctattcaaccaactcattttcctatgatcggtctaataataagattaaggtcagttggaaaatacttggatctattcgactaataaaatgtgtaaaatgtgatgataaaatgttttcataaaagtaatgtttttcatatacactatttctatttgtgatggatcaaacgttctcttttctttgcatgcacaatgtcccgatgcaacgcgcggggtaccttgtagttccatcaaactcataggccacatgacttatttaagaatttcttggattttggtttcaattgaagtaataaatatgctgatgatgttttgtctattgaatgataaagttcactgaaaaattgtatcgtagaataattttaagcagtgaacatatatagatagtatatatattgtatgcattacgtcgagtctgtataacgtattattcatggacatgtcattggatttttatccttctatgtcaattttacatgatagtagtcccaataccactaataaatcggttgcttcgtctggaaacatttgttctatttcagccaatcaatatatgtaatttatttgataaaaataatttagcagactaatcagcatttgatatcttcaggcacttttagaactcatttaatttgtgttgtgcctactattcgctatatggattctatagtaggtcaaatttccgtaattcatagaacttgcccgtaaaaatcacatggaccattagacttagaaactataaatcaacaaaataaatattataatggtttatatataattactaattttgttttcttggaacatataaattaaaaatattagtacacataacttccactaaaacaaattttacttataaatttgacgtatatattttaacatttataatacgaatagcaatatataaattcatcccgtgcaacgcacaggttgacgactagtaatctacagtctgacacatttatcttcagtgttaaaagtgcaggtcatcacagaagctcacaaaggagtgcctcaaagtaaagagttctctcaatgtaggggaattccgtaggagtgccggagttgtcggcactccctccactggagtcctggaggaatgccggatactttattcaataaagtaagtatttgggatttccttatggtatttaattagcttacttaagtgggatatattctcattggtgcggatttgtcgcttagcacttatacagagtgctctagtactaagactcgggataaagaagaaagttcttggccgaggctagagtattaatcgataacgtagacatggtgtgtagattagctgttacctccgtttgttgtgtgctccacagaaagtgaggtacgtgataggtggtgacagccctatccgtcctttacatccctccatgttcgggtatgtgatagagcttaaggccggactcagcctggcagagcaggagaggaccggtgcccactactacaaaaaccctcatagggaccggctcataggtgccggttcatttaaaaccggtacttatagagcttttcccacctcccagtaatagaaaaatgtagaaccggcacctttaaccatgctagaaccggcacctatacctttgagccgagccgatgagccgataccatccgcgcacgcacggtgcaccgcacccaccgcatccttatctactgtgacatcccagcctaaggcttaataggaataatagaatactcatatcaacaagtttcaacttctttttcggaaaccgatctccaaagaactccagggttaagcgtgcttggcctggaacaatttgggagcgcacgagtgaggacaaagtgtgcagaaaagacttatgttggtctgtgagggcagtctatgacctatgaaagctgccagatgtaagcgtgcctggcctgggagaggcgggacgttacatctactccctccccttctcgatctctcgcatatctctccctttctctctcgcgcatctcgatctccctccccggcagtctataacctatgaaagctgccagatgtaagcgggcccggcctaggagaggcaggacgttacatctactccctccctttctcgatctctcgcatatctctccctttctctctcgcgtctctcgatctgcctcccccctctctctcgcagcggctgccccgcggaggcagggacgtagggtggcggtgggcgagctcccaaagccagtggcgcaggtacagccagtgagggaggcagggcggcggcggggtcctcccctccggacccctcctccttcacctcatcctccgccgccctcccctccccccttccacctacgcgacgggcggtgtcccccttcccctctgcccccccatgggtggcgtccccacgggcggcgcatggagaggcggcggatcgcagccggcatgcggcagcagcgggtggagaggcggcggcagcggtggccgcgacctcccctctgccagatccggctgcccggcatgcggcagcgggacggggggcagcggcgtgcggcggcggcgacggcgtgtcaacgtgttcctgtttgtggttgtgttgatgccttgatgatgctcatgttcttgagttcttgatgctcatagagttcttgatattcttgggtgaaatcgggagcttctccatgcattgttgtttgttattgatgtgtgattaggattttgattttggacgtgaggattttgcttttggatgtaaggatgtgtagggttctggattcggctcgattcgagccgggggatttttttttggctcgtgcagacataaaggtgccgggtctattttacctataggtgccagccccagtaataggtgccgaccaattggtgtcggacggaaaaccgacataggtgccgaccaattggtgtcggacggaaaaccgacacctattgccagttttcaaccggcactaatagagttttctggactagtggcccgaagcattcgataaagttttacctttaacttaagttagctagttgaattcataggaatcctctctatcctaatattaccatttagttgtttgtccttggttgaatcttgtttttagatatacacacacgttcattgtgttcgataccattataatactctaaagggaagtgctatagtggtatctatgggcttgcggatttatctgtgtgcgtaacaaataccaacacttggatcagatactcgcataagagtccatgaagaattactaagtcctgagtagaataatatggaaacaattgaagaaacaaactcgttcattttgaattttgagtttgacttgaaatgaaatgtttgtcagaatccaaatcacacttacggttgcaactaaaagctttgatagatggaagccaagtacatcagtccaaccacacttagaaagtgtccaaggtgcatagcttcgaagtagtcaattatagataaaattgggaggaattcccaaatagaagtgtgtgatagtagcactcaaatacttggataattgcattaaactgaactaaccatcgttgaactatgaagagcctcgacatggctgtgagagatggttacactgccccagcaatcatgttttgaaaattatcttatcacccatcattttagaataatgcagcatatgacgcacaatgcaaatgagtcacatgaacaaactcactaaagaatatgcatctccatgttcttctatggacatgaatttcgtacaagcaacaaaatattgaatgctaagttatgtgaaattcttgcagatttgaccactagatcattgtacatcttctcttgaatagatgtgtccgaggaatcggaacaatgagacatatagaaatgcaaaattcagggggagaatttcactgactcattccaaaatcttgatatagaaaatcattgccatcaagatgaggcataggcatatttgtggagtttttcccattgggtttttgtggagttttgatgaggcataggcatcatgcaatgaaagctcaagagggattgttaggaaaccgacaggcccatgaaggcatggcctaggttatctactaatgggccatcactaaatatggaaagttcatgaggctatgcctatcaatagatgggaggaggtgatgtattgtacactagtgatatgcaatggaaaagtctcacccctacatcttgtgtcaacactttttctagaattatgcaatccctcttagactactatgtagcaggaggggttgcataataatgacgaatagtgattgacgctcatgtatatacacacactcacactttgtctccaggaaggatcacatcaacaccctaccctacctgtcagataaatgggaaccagggttctcattacaggctgctacagacgtccatggacatgtcatcaagatcatatgacacatgttgtcgtcaaccagattcaagcgacaattgagatacatcctgtcggtgacatggggccgggggtatcgtgactagaggcttgggtagccgtgatcacccacgtggcccgaccccctcgggggggtcgggcccgagggtgacgtggccacccctccctctgtctccccgaggggtcgggccgctcccgtttcggccccgagggctgggacgccccgaccccctgtggttttggcgccacgtgtgtgggataggtgagcccagcggggctcacctaaccgcatttatagcgggttggacgagcgcgccacgccgcatttaatgcggcgcagcgcacgcttatccggtccgtgaccagtcgcggtatgtgaccggtcacagaccggtcagatcgcgggttaggtggcaacaggcgtcctgtcgcacgcctcgcctcgtcccgtcggaatgatgagagtttcctggctctcgtctctagccggagctggcgtgctgactcctggagttggtatgtcagtcccggtcagatccattctaggcttcagcgcaagcatggcaagaaagtcgctggccattgaatgaaggttgaaacgggcgtccaccgggagagctgacgagcggagcagaaggcgtgtgcagtgcttgtcagaggtcacttccggctgtagactagccctcattgtaaaaagcatgtttcctttcttaggcagctagaggcccatgtggtgacccctgaccacataaaaaggaggcccaggcctaggagagggggctggactctggccacttggttctagagcctgagctctctctggttctctcgagctgtattccttcacacacagatccaccagaacacaggagtagggtattacgcttctcagcggcccgaacctgtctacgtcgcccgtgtcttgtgcgattcttctcgctgacattcctcagatcgagggcgaagaacctcacttagcgcccccggccgaaccggcaaaggggggcctgcgcggtctcccggtgaggagccccaagctccgtcatctggcgcgccaggtagggggcgcgcgtgtctttctaagccctcgtcctctttcgtgtgcgccaagcttctcccgctcagcccaatggccgaacgggcagtggcgcacaacctctctccgagcgctagcggtgacgacggggagcagaacccgcgccgtcgggctcgcaccccaccgtccccctctcgccgaaatcttgggcggggggaggcgctcgagggggtcgaaagatccgcgacttcgccgcccgcgggcgacgggggaggacggcgagacggggcgcgtcgccgcctcgtctacggcgatggcggcacgccccagggcgcgctccaggctgcgggcgcgctcctgcgtcacccgcccgtcgtccccgatccagagactccagcccgacgttggctggatgacgtggccgacttggtcatgacggcgcagcagcgcctaggcgccggcgggcagtcctccgccaacaaggcctctggcgctgccgccgccggctccacgtcgtcgaggcggagggcgcggcgagcggcggccgttacccgccgttcgtccgccattccctcgtcaacgcctccgacccaagaagatgtgcatggggggccggatgcccggctcgatatcgagcgccggcgcgacgatcgtcgcgccgcccacgcaacggagggcgcttcctcgtccggagcgccacttcgttccgggcacgggggccggccccccgtgtccccggttgacggtgccggctgtcgagcctttgtggcgagccttcggaacgtccgttggcccccaaggttccggcccaccatcaccgaaaaatacgacggaagcgtcaaccccgccgagtttctccagatctacacgaccgggatcgaggccgccgggggtgacgacagggtcatggcgaatttcttccccatggccctgaagggccaggcgcggggttggttaatgaacttgccacccgcgtcggtccactcttgggaggatttgtgccagcagttcaccacgaacttccagggcatatatccgcgcccaggcgaagaagcggacttgcatgcggtacagcgaagggacgatgagtctcttcgctcgtacattcagcggttctgtcaagtccgcaacaccataccgtgcatccccgcacacgcggtgatctacgcgttcaggggggggcgtgcggcacaaccgcatgctcgagaagatcgcctccaaggagccccagaccaccgcgcagctttttgagctcgcggaccgtgtggctcgcaaggaggaggcctggacctggaactcctccggttctggtgtggcagctccggccgcccccgggtccgccgcacagccagggcggcgggacaggaggaggaagaagaagtcggcccgttccgacgacgagggtcatgtcctcgccgtcgagggcgcttcgcgggccccccgaaaggggaggcctgcgagcgacaaaaagaaggaggccggcgctcccagtagggagcgcccgaccggcaagtggtgtaccgtgcacaacacctccctccacgacctcgcggactaccgcgcggtcaaaagtttggctgagcggacgaggaagtgggaggaggagaagaggcaggagcgccgtgagggcaaggccccggcggctcccgccggcaaccggcgaggtgaggccaagcagaaggccaccgccgaggacatcgacgatggcaatgatgacctggggttccaggagcctgaggccaccgtcgccaccgtcgatgggggagcgtgcgctcacgcttctcgccggagcctcaaggccatgaagcgagagcttctggccgcggcccttacccatgaggcgacgcggcgggcgcggtggtcggaggttgccctcaccttcgaccagatcgaccacccgccgtgcgttgcccggggaggacagatcgcgatggtggtttcccccaccgtttgcaatgtgaagttggggcgtgtcctcatagacgggggtgcagccctcaacatcctttcccccgtagcctttgacgccatcaaggccccggggatggtgctccggccgtcccagccgatcatcggtgtgacgccagggcacacctggccgctgggtcatatcgacctcccggtcaccttcggtggttccgccaacttccgcacggagcgggtggacttcgatgtggcggacctcagtctgccctacaacgcggtcctggggaggcccgcgttggtgaagttcatggcggcggtccactacgcctatctacagatgaagatgccgggccccggtggccccatcaccgtccatggcgacctcaaagtcgcgcttgcttgtatggagcagcgtgcggaccacctcgccgtggcgtccaagcccgcgggtggcgacgagaggctcagcacctcgtccccgccaccccgaggcagcggatggtcacgtgcgacgaggtcccggtcaaggaggttgccctgggcgacggcccgtctaagaccacacgaatcggtggtcttctggacgacaaataggaagacgcgctcgtctccttcctgcgggcaaacgccgacgtcttcgcctggagaccggcggacatgcccggggtccccagggaggtgattgagcaccgtctcgccgtgcggccgggcgcaaggccggtccggcagaaagtgcggcggcaggccccggaacgtcaagccttcatctgcgaggaagtggcgcgactcctggaggccggattcatccgtgaggtcatccatccggagtggctggcgaacccggtcgtcgttcccaaggcgaacggcaagcttcggatgtgcatcgactacaccgaccttaacaaggcatgtcctaaggacccttaccccctgccacgcatagatcagattgtcgactccaccgcggggtgcgaccttttgtgttttctagatgcatactctggttatcatcagattcgcatggctagggaggatgaggaaaaaactgcgttcattaccccaataggaacttattgttatacgacaatgcctttcgggttaaagaatgcaggtcctacttttcaacgtactactcgaatttctttgggtagccagttaggacgcaatgttgaggcctatgttgatgacttggttgtgaagacgcgcaaccaagagaccttactctcggatctagcggaaactttcgaaactcttcgctccgcccgcataaagctgaaccccaataagtgcgtgttcggcgtgcctgcgggcaagcttctcgggttcttggtctctgcccgaggcatcgaggccaaccccgagaagatacgagctatagagcggatgcgcccccctag

SEQ ID NO: 608 - DNA, 7379 bp, Oryza sativa
atgcctagccaccagtgaagcacgagccgacgccagcgcctagagaactcccctacaagccactaactgtgagggatgtcgctgctacgtctgaggccacgaccacctcctcatgtcgcgacggtgcctccggcgccacctcaggcccccctgctcctatggccgccggtcgccagctctaccaaccagttctggcgacgcccgccacagcccccgcggccccactgccaactctcttgcgcccccgccgcttgccacctcatcctccccttcctccaccttcgccagctctagatctgtcctcgccatcgccgctgctccacaccgccgcctatcttcccccttccccacctccacctctagctgccgccgtcatgcaagggtggctagaccagaaggggatgccaagtccggcaccgtcgccacccccgcgcccaatcgcctccgcgcccagccgttccgcacctagctgcctccgtgcgcccagcccaacgccctgagcccctaacacagagggaggaggaaggccccgctgctgccatccttgcagccgcgcggtttccggcgttccgctcgggcggcggcgaggcgtaggaggaaggcggtagtggtcgccgcccgtgtcgcccctacccttggagcgacacgggggcctcgtctaaccttctgaatcttttaggttcaggtggacttgttgatggcccaacatataaaaccaacccttcgcccatgggcagtacccattttgcaaatgggtgctatgggaaagcagcccgtatcagcaaccttcacttcatagatgcagcaggccatagcttcatatcccagacaacaaggccattgctggtacgaccaaagaaaaatgctacacggttgatagctttggtcaggatagtactgacatgcacgtctttggtggacctggtggttgtaacaaatagcttaattactagcttgttccattgtagggacatagtaaaaaaatcaagaaaattcgtgacatcaaataaaattgagaattctttctttaatttgccactcaaagttaccatgtttccttattttcccttattcgccatcaacatcaacacaccatgaaaactatcatcttagaggttaaatttagatagaaatgacaattttttcccctcagccaaatatgtgcatagttttcacatcccatttatgtttgcctaatttaaaatttcacattcgcttttattgtccaaagatattagcacgagtgtttttattttcgactaattatttttcagaggtaggtgacatacccaccaacaatgagacgcctgtagttatcccgtaaatcccaagacatgtcgatttagtctttgaaggtgctcataggggttgggtgtaagtttatagggtgagtgtgtgcataattatttaagcgcatgtttctgtattgtgtttaaaaaagtgtttaatttgaggaaataattaaatatttcttttattttttcatatgtttgttaattggagtttatgtgattttatttgccttctagaggtggaggcttttccctaaatgctgtaaattctagaaaaaaaattcaaaattacaaattcttgaattttatttcagaaaatctgttttcctctccattcctttctgccccttttcctcccacttccatcttatccaagccgacacgtacctcctatatttctctcacttccctcccattccaaagccactcgatcatcacccttatctcacattgcaattttgtaataactaatactcacctatatgatatgttatctatcttggttcggtgcagatatcattgtttcattttttttatgttattattttggataatgcttcaatgcaaatttacaattttgaacgtaaggtggcagcagattcatcgttgcaaacaacatttctaatacaaccagcaatcgcgtcaaatattaattatattagttggactcagatctaccaaaataccgatgggcattgaactcgaacattgatttatttgatacaacatgctagtacactacagatgtatcactttgtgcaattaccaggtccaccatataatagacgggctccatcatcgttgaacctgatatctccagcatcatagcagaatggtctagtactgcctgaaaatgtgttgtgtgtgcctggaatgaagtactggctgtctttgttgatgactttgatactcctcacataggcagctttcccaggtccagtggctgcccaatgtccactgcccagttctggaaggtgtaattgaactgttggtccatggacttgcccaccccaaaaacaagcacttgctttttcattcatgtaggtgaaaattgaaggaggccaatatccaagtggttttttatcacgcccatatgctagccaccaatttccggtcttcgggtcctacaatgtgtggtgatcggcgacatgattaaataaagtcttgcataaataaattgatatatatttcatccttcaaaattctttccgtcattcccatttcccaatttggcagtaatttcaacttgatagaatgtgtggttagtttcactaagtaaatatatacgttacaaactacttagaataaaaaaaatctcaaaagaaatctaccttattgatctgtactgatttgaaaaaagaaaatacaaacttcaatgacattcacacactttcaggtgtagtcgtgttcataaactcaaaatgccacttcaactaacagaggtatcctaaaattttctcttgtagtgtccttacaagtgatgactacttgcctaatcattatggacaaaagaacacaactaaatgtttatggcttatagttatgatataatcatgtgtccaagtattctaggagagcataagatgaacaatgttagcctatgaaatgacaagctgaaaacacaaaacaattgtgaaaacaacacctattttgcattgaaaatgttaacctaacacaatataataaaataataaatagcatttatccaattaaaatcagagagcatgcgaaaagaacaaatagtactgccttaaataagaaactaacaaatagtcttgtccccatactacattagcatgttaattgaagcttaacattcaaaatatcttatttgtactttatcaattagatgtttcatgaactgcaaagccacactaataattatatgcattggaactatttctatttaattaaggacacattggaatacatagaatggcttgatgacacaaatcctagatgattcattatatatatatgtgataccatatacagtttgactcgtaagatggatcaacgtgctcttaggaagcataaacccattaagttacaaagatatcgaatggacattctaatatccaataaatgcaacctcctctctttaattatcagttgaattttatattgttttctggtgagaattatattgtttgatataacatttagccatgttgataatctagtttagagaaattatgtttagtcccatggtacatcatgtaaagttgatgcatttaaccatctaaagtaatgcttgaacacaaggatttcacaaatcaaagatataggattccagaacaagtaaagacgattttcaataaaagtgaattcattcgagagttgttaagcaaaacatacctttgatattttcagtaaaaaaaaacatacctttgatatagtaacagtaatttcatactgatctccattataggtagaaactggttcaattctcccaccaataccaacactcgtactgacttgtacaaagccaggacacatatgatcaaagcatggcatgttcaccgtattaacttgctgccataaacaaaaagtaaatagaattcttaagcagtgcaatactgttcgactcaaaacaacaacaacatatatacagttcaaatgcatgactgtttacagaaattcttacccagtatatatgaaatctggcaaagttgtcaccatggtagtttggccatacctaaaagcattatatattgaaatatcgattagtgtacggcaaaaagggctttctattaaaaaaaaaggaaagtttaatgcaatgaagactttactatagactctgttatggcatttatgcattaggaggtggagcagcatagatggtcctacggagggcttgcggcgggcttgcggcccactaacgtcctaggaagcccaaacagacattttttttaaggaataagtccacattccctccctcaactcatggccgtgtatgaatatatagcatccttcaaccgcaaaaccgggtataactcatcccccaactctgaaaaccattgcaaatcaactccctgggcggttttggaggtggttttgtcctacgtggcatctttgaccctgttgacttgctgagtcagcaggtgggacccacctgtcagtgactaggataaaagaaaaacggtgggcccactgtcaaccacacttcatcttctacccttctctcgctcctccggccgatcccgacggctaggagctcgccgccatcatggtgcctagccaccgcgacgatgctgctgggggaggcttgccggggacagctgtggatgggtagaagcgcggcgagaccgaggccggcatggcggtcgttccgagaccccatggcaagcagcgagagtgcgctgagcgccacgaggaggagcagcgccgcccgtaccaccgtaatgtacgacaacttctccccgccgctctttcccctcctcctcctgcagctatgtctgcacatcagtgcacatggattgccggcggcggcccgcggcatagcgtgattcgtgcggccggcctcgggggagacttggctagggcagcacgtgagacggcagtggcaagaccaattacatctacaaacggctccaggaagcaagcagtcggatataaaacaatgcaagatcaatggttatccatcaaaaaaggtgcagatagccaggtaccccaacaatagtatcaatcagaaaattgccgggtggcataccatgctgaccaaatttactaagctatcgatcagcaatttggtcgactgtatcgtgatttttcaagcgtgtatgatactatgatgcttatgatcagcactaaatcactctgcccaagcacgcaaaacaccgtcaccagagaatccccgatccccaagcctaggggggaggccgtcgtgcacatggacgtggcggcgaagacgggctggtccacctgcagtgagaagccgctccacgtccaagggttgccggccagctccctcatctcgttcgccctcctccgctccggatctgaggagggggatggcggggtggggcggcacgtcaccgccgggatcggccggaggagcgacagaagggcgtagagaagaagaaaagtgtggttgacagtgggccccaccttttccttttatccttgtcactgacaggtgcgccccacctgctgactcagcaagtcaacagggtcaaaggtgccacgtaggacaaaaccacctccaaaaccgtccggggagttgatttgcaacggttttcggagttgggggatgggttatacccggttttgccgttgagggatgctattaatacacagccatgagttgagggagggaaaatggacttattcctttttttaacccttaagtactgctccctccgtccctaaatatttgacgccattgacttttttaaacatgtctatctgttcatcttatttaaaaacttttgtaaatattattcaaaaacttgagtagtagtagtatatttaacaatgaatcaaattataggaaaaaaattaataattacttaaattttttgaataagacgaacgatgaaacatgtttaaaaaagtcaacagcgtcaaatatttagagatggagggagtactccactaaagtttttttacccttaacactaatttagtgtttaaaacgtcatatattaacgacaggaaggtgtactccactaacgtttgtggtagtccaattaaaatcagacaattgcacagatgaaaaattgaggcagtttttttctaaggtgttttttcaatatttactagtgtattaagttgcactttcacgcaactataaccaccctctctgttaatatgtctattggttattcgtattaataataagcttaaatttgtaatgataataaatcataataacacgtttcgatgggtacataggtgataaccatattagtacatcacagatatatactatacatactcaaggctaattatatatactttgaatgatgtgaagattagtctgaaccaatgaatctttattaaaggatgggttttatttgaaaataatctttatttaacgtgcaagttataaaattatatgcactacctatatcttcctccttttttttttctttggctgttagatctttgtaaatataagtcaatgatttattagtaatttttttaaagaaacctgcacatttaatagaccgaaaagaccgataccgagaaattcggtcatcaattcggtccaaggtagtgaaagactgaattttgttcggtcaattcggttagtaccctcgggtaaccgaatagaccgaattatcaaaaaatatctaaatgcaacctacaatccactatgtttaataggattaaactctaattttcacatccctacttcttctaggcatgcaacctaataagagtctttactcataagtgcttacgaattttttttttgtgatttttgtgttaaaattttccattatttctttgcatatatgaaaatgttgttgaatttcggtcagaaccgagatcgagaccgaaaagaccgagaccgacttttgtcggtcctgacatttttgtgttcttcacttttcaaagaccgaaaagaccgaaagactgagaccgaaattttcggttagaccgaatgcccacccctacattgtaaaactatatccagaatcttactagccttttcttcttggctttggagatttcgagacaaagttaaattaataaaaaatgattactacgtcctctatccaacggctcatatttcttctatctatattttgttaccatgaatccaaaggtcattaatctgctgattacttggtgcatcctaaggtagtgtttggttgctgggatggaatgggataggatgggatgaacccatttttaggggtgtttggttcaggggtgagtgggatgggttggtccctacagaggaatattcctctcagatccgggaccaatcagtctggccaaaactggcggacgaactcgtcccacttgggacgagcgacggcgtgaaaccgccgctttgctcgcacgctcttcctcgggagacggcggcgggctcggcgacggcggcggtgggctcggcaacggcggcggtggggg

SEQ ID NO: 609 - DNA, 6780 bp, Oryza sativa
tttaagttgttttgtctaatacttaattaacaatgcgctaatccatctcatgcgctaattccctactggcggctcgccttcctcttgctcgctgctgccggtgccatggtcggcgtgcccatccactcgtttgccgccaggaggaaggcgaatggcgtgctgcatgtcccatcgttccagatcatggtcgtgtaggggctgacaggcttgttcccttagtcggcgctgtcctgcagggccacgccatatgcgtcaccaaccccctcccatcatgcccgcgctcctcggcatgacggagagatggggaaggaagaagataaaggaggatctaaggaagaagatgaatctgacgggtgggttacacgtgtagataacaaagaagatagaaaacgtggcggcgatggcatggtttcaatttagtaaatttgagtggcatggttacaaatagatgaattataatggtatttatctgaatagtcatatttgcaatgacacatatcaaattaacccttaaaaagtagggaacatatcctatgcacacaaactttccatgcacaccaactggcaactagcaaacattacgaaaaaaattggacatttactcgaaatagtattacacatatctgcaaagtctcatattcaaattcattatattttagccgtaagaaaaatgtaacatatttaagggtaaaaatctgtcaaaattttatcttttttgtgttacggctgaaatataatgaatttaaagataagatttcgcatgtattggaattatttgttcactttcttctataattttttgtgacatttgctagtaaacttatcagtatagaatacgttccaagaaaaaaatgttggattggatatcggtccatgagacgacgagtgctttgttagtgagtagtgacagccaggatagtcaagagttattgaattgcaatacgggagatttggagttaagccttgaagtttttgttgcatatgccaaatagccctgcaatcaattcaccgcgcgcacgttaagtaattaaacactctaacagctggttggttcttatgtctattagattagtttgtatacccattaggttgtgttattttgtacatgttactaactttcttgtttttcactcgtatgcttcccaactactaaatagtgtgcattttttaaaaaaattctatagaaaattgctttaaaaaatcatgctaattctttttaagttgttttagctaatacttaattaactatatgctaatccatcctatgttgcatatcgggggtatgtgttcccaactcatacttctgagcttacatatgttaagagcttggcatcttctttccagcacaaaggtgaaaccttagccattccaatcttgaaacaatttagtccctcaactggaaaaagcctatttgccaccctgcaaaagaaattcaagccaccacagcttgttctccatcctcacagccacccaagcgcgctctatgtctccaatacacatgaagatggcggcagcggggctatcttcttcattttctcctccacccccttccctctcaatgacttaggggtccttggatctgaagtcttaggcgccagccacaatttcaatccaatgatgaggaggacggttgcgaattaggcattggtacggtaagtagcctcggtcatggttttggcattattgacaactctgactttggccatggctctagcattcccagtgatgatggggcattctgatatggcaccgtagagatatcctctccctgtcatttgctgcatcgtcgtctgagcacggcaacaataggtttcaggggcattgccaagcgtcttgtgcgatagacagaggatatgggggcacccagagctcaccgagagcggtatgacttcgccaactaaagttgcgctcacagcttcatgctggctaatggtggtggcaacgagggcgtcatgccttgatcgccttgactgccatcaccttgcagctaatcctcatgacaacattttcatcaatagttaagggcttccacaccatcttgaatagtagtgtcattttatcttcaatttatggtattatctactcccacatctcattgattcttcagatggaccctacggattatggaaatgtgtcttttggcttgactgcaacacgatcattttatggtagcaggtctatagaaggttgcgatcattttatggtagcaggtctataaaagggttgcagattgcagtatttgtggcattataattgtgctaagactaggaggcatgacagcaatggctcagaacaaaggaaggtaataccggggcacttcgttttagtgttgctcgtcgaataccagtttctcaaattcagagttaaataactatgtttggccttacatggttgtttttttatcatagttcaattgttagtttgatggactatgagcaacactgaattattttcttttttatatgaagcgagggaagctcgtccccacgagaaggccggaaaggctaattagcgcgtacgtgccagatatgtttctggcgcagacgtccacgtgtcaatgtcatcaggaagatgattagcgccgcgctgtgccgtgattagttccgacttttccgtttttgcaattaagacgtatcagaatatattattaccgatgtgatcgtaattagcatcttgattagttcctttttgggaacatattagggtctagttgtttttttgcttttgaaatataatttaatttaagactttatattctaaattaaaaactttcaacactaattttaaaactttcaacccaaatttgaaactttcgagtcaaaatttgaaaaaaaaaatcaactcaaaatttgaaaactttcaactcaaaatttaaaaactttcaattcaaatttgaaaactttcatctcaaattttgaaaactttcaactcaaaattttgaaaactttctattcaaatttgaaaactttcaaatcaaatttgaaaactctcatcccaaattttgaaatctttcatttcaaaattcaaaaacattcaattcaaaattcaaaaactttcaactcaaatttaaaattttcaattattttaaaacttttaactaaatatttatgttttttaatatttaatcctaattaccgtaattagcactaattactataaataagactgattaggcaattagcggtaacaacatgggtggatgggcctgaactggaatgttccgcgtgctgcttctgtagccagcgcacacgcgccgagtaggaacccccgaaaaggctggggcatgacctaatatggctttcaatattaacatggcttctgatattaggtcattagtagtaaaaatgttctaaaataatatggtaaattagtagtaaaacttttctttaatagtgcaacttattagtagtaaaaatgttctaaaataatttggtaatttagtagtaaaaattttctttaatagtgcaacttattagtagtaaaaatgttctaaaataatttggtaaattaacacaacacacttgatttactgaattactatataaccacaatttcatttatattactaattttttatgtgatttgttttgccaaaacgtattcccaaccgtaatttcttattttctaaacttttctctgatataattttgaaaacaaataatctaaactgttattttaaaatcaaaacccaatgctagaagaggggcatccaaacaaaacgatgttcctatgcaaagagagctaccttgtgtgcctcacaaacatttacatgccatgccatttcggatgatgcggtaaaaaaagctttatttttctataccatcttaaaagcggagtggttttacttccatgtcctcctcccaccatatgcagtgcatccgtacatataatatacgtaaccaccagatccaacattttattttcaatcatcatcctagctcatccatgcttatatgggacttttccgttttatccgttataacgtaacgacatacgactttattttaaattttaaattgaagaggttaaaaaatagtactccatctttcccaaaatatgggacggaggttataagaaactaaccacacatcggttgtcttcttcatgcgcctgcggtttggctattttctgcttttcctcgtatccatctgggagtctgggaccctacccaccacgcacggccgcggcgcgccagtggccgtccagggtactgggtttcagcggctacagcctatggggaggttctgggtgccggccgcggccgccggaccggtggtctcccgcggcacccgacgcgcttccacaaggtctgggttcagcatgattgttgcagttgatgtttcacccatttgtttttaattttctcaaaaaattgattgcctgcgggaatgcgtcaggtagggtagaatttgcagtgaaatatgtgggtatcgatttagtgccgaataaattactcttgtacaactagaatcttgcatttggttaatttggtgcgtacgtctcatctacttaggggatttagagggtcagtctattgggattgtggggatttatttatttttttggctggcttgggatgaatcgaggtgtgaattatgttgtgaatcttggtggatttgtttgagagtgtcctcttaagagagcccaacaatgccccttaggctgaaaaaggcttttctttgttttgtgcagagcgcatctattcaagttaatgttggtagcgtagtttattttcttttcttcgaaaaggcagtgtagctttgaagatgtaaaatagtggtaagaacatatgtataatgctactaagattatgtgacgcccattgccacaaccatgtactgctagagcgtagaagggtgatattaggtggtagcaaaagattttgctcttttcgattgtccagaataggaggatgtttgactcaaacaggtttacttcatgatagttgatgacatgtaacatgttacaagtattgcaaataaaagttcttttgcaagtaaaagtactgaacctctttccaattaagagtaccaagcgagttctgatttagtttacaaactgtaacaaatgtcattgtcgttcctcaggtttggatttaaaatttagatacgcgttccagtacaaaaaaaacacagatctttatcccttaacatggaagaagtctttgactggtcatactagataaaataacgatgctgcaaaatttacttcatgatagttgatgacatccaatagaagtgtagaagcatcatgatatgcatgtaaaagtattatgcttaaaattagagccattttacggtccttcaggaggtaacaggaggtaccacattttgtagtataaaatttggtacatcttggtacctctggtactaggaggaattttcaccacaaattttggaatttcttgtacctcctaaggattgtataatttctcctaaaattaacatgaagaaattatggcgagaactggcgaaccgatgtttgcactggtaacccaagcatataatttattatataatgcttgggtttaaattctatgacatgttcagggctaaatatgcgcctgagaacaaagttaattgttgttaattatataactttccacaccataaatgttgatgttagtttatacatgcattaattattcaatatctaggcagtacattatggaaacgagttgaccacagaagatgaatctggaggagttgggattgcatccgctccatcaagcatttgagttaccttcaggatgctgggtcgcatagttggctcctcctggagacaccacaatgccactgctacaaacctttcaaccttcttgatgtttaacttcgcctcatcatcaccatctaccagcaggtcgaccctgccacacctataacagtcatttgcccagtaagtaagaatactttgctcttcttctgcagcctccatttccacattttgccggcaacagatgagttccagaagaatgaccccaaagctgtacacatccaccttggcagtgatcccgacgttcttgaaccactcaggggcaacatatccgcgggaccacggatacccgtatatgtctgtgtttggttggttcggagtagtttcgctaagccaaagtctgaaatctttgctatgaaattatcatcaagaaggatattttggggctttatgtcacagtggatgatctgtgtgctgcattcctcatgtaagtatagcagcccccttgcgacaccgagagcaagttgaactcgaagactccacagaggcctgacaccactaaacaggaatctgttgagcgatccattaaccatgaattcatacaccaacagtctctcagttccttcattgcagaatcctagcatccggaccaggttcttatggtacgtccgtccaatggtttggacctccacagcaaactccttttcagtctcatgctgaatcttatcaattttcttgacagcaatgtaagttcctaactcatcttgcagctggcctttgtacacaataccagatgcacctgtgcccaacacctccttgaatccgtccgttgccttctcaagctctgcataactgaaagctttgaggggtaatcctgggtctcgtgatggttgcaatggctggacatcctttctggtgattgtacagtaagtaccgaaaagaagaacagaactcaaggcaaattcgctatcacagagcctccgagaagcaacgaacttcctagatccagagcttcttgtcactcttccattttctagactttctgagctctggctgcgaactgttgct

SEQ ID NO: 610 - DNA, 691 bp, Oryza sativa
  unsure (1)..(691): unsure at all n locations
gggagcagtgtgccagtgtcgctgtccaaaccatncatgcaagcagcaaantatgaggtgaggtggtgagtgccaaccacgcgagagcagagcactgcagccgcgtcacgncggctcgcgtggtggcggaacaatccatccatcgcctcccaaggggaataccccaaaaaacccccgcggtgttcccagttccaaaccnccgtgcaagtgccgtggccccacacnccgcccaatcccaggctcccagcgcctggcgcccacggataccgtcacccttcccgaggacctcagccgccgcgggcccanggggcatctnnnnnnnnnanncttcccacggacnccgcccaggtgggcccccagctgcaggagcccccctttcagccgggcccacgtgaacaccagcccgcttgtcggccagcgcgagccctgacgccgagacgacgccgagaccgcgggggtcccacggggcgcgtgcgaggtggcaggtcgtgcgcctgacgccactggcgacgccagctcgccgcggtccgatccaatcatgcggcctcgtagccgcggccgtcttctttatcgggagcctataccgtatagcgctgatgctggccttccgatcggcatctgacggatagaactgtttttttccggttacagtgaacgattcgcctggattgggaatatacggccgggatta

SEQ ID NO: 611 - DNA, 697 bp, Oryza sativa
  unsure (1)..(697): unsure at all n locations
ttgcaggcaaaaataaacgcttgtaatcataaattaccgctatatcattatcaattgtcttgggaacaccagcaacagcaacttttagaccacgtctacgaattttctgccaattgaaaaagggaaaaatcaaattaaaaatcagttctgaaaaacaaaactccaacaatattttccctcagtttctaatgatatgcacactgcacatacaacaatttttaagccaaatgcacaccactcaacaaattcctgctgccagagtgcacatgaacagatgaagaagtttgacaatgtctggaggtctctacaagatatggaagttactcatgatagtgattaccttatagagnncangggggnagttgtgagttccannaagagaggtgatggttacctggatctngttccccncccttttttacccaaaattcaaaatanggattattttacctanaaaaatattttccacacctaccttattaattccccgatacttgaaatgtgttggtttccataagagcccgcggaaaaaaggagccccccggcgtcatgaccaccccgtgatgttcccagaactgtgccacctcttttgtggatatcatngacacttttaggtgtcataggaagataattactccaatagaatcccttgtatccattctacagaattacttatagcatgttagaaataagagga

SEQ ID NO: 612 - DNA, 911 bp, Oryza sativa
  unsure (1)..(911): unsure at all n locations
cttcctctccaggcatgttttcaagaaagctgctccacaagccggccagaatatgtaaaaacaanatttatatttcctcctcccgcacccctttttctcctcgtggtgtactctatcgtgnaagatatttttcttcttgtactttcagaaggagggaggtaaatcttaaggtgctcaaggtgccggaaatcgaccagaaggtcaaaatttctttcgatttccccgtcaagagtcaaaatttggaattttgggtggtcagatggtttgctatttacctggattttgtgattggcgattgaagttttttccccgatctcgtatgcaggttcttgatgccaccagcgacgagccgtgggggccgcatggttccgatttggcagatatcgccagggccaccaagagctagtgagtagctcaaagctaaaaaaaaaaatcagaacttatttcccatttgtttatgagaatctagcgtgtttcagtttacgacttgggggcgttgcacattttgattgttcgcataatcccattgctttcttgtttcttttccagcggtgatagcgaaattataatgaatgtgttatggcaacgcctggggaacacacttgcgaattggcgtcacgtgtataaggtaataagataggattgattgtgcagtgatgtgctgtttggattgattccttaataacaggatgttttttttccaaaatcaattttaaccaaggggcccgggttttttggggggggaccccttttttgggggttttcgggggatcgagaccttctagcaatggcaccgaacgtgcagctgatggcattggtgacaatagctcacnaattgcnnnnnngnnncnccgctnnnnnnnnnnnncctctgntnncctgggcaattatagnnnnnnnnnnnnnatgct

SEQ ID NO: 613 - DNA, 591 bp, Oryza sativa
tgctccctcagctacaacaataaccatgtgggtgatctctttcaacctcttctctatgtactcaaacaggccaccctccccttccaaataaaatggggactcaggaattaagcagcagtcctatagaagacagagaaacccaatgaataggaggtaccattcggggagaaaaagaatgctaggtggtccaatgcattactgcacccagaacatgaatacacagaatatttgactcgaagaaactaaagaacgacatagatataaagcattaacttaccacgtctctgcttgcaagagtagcatacattgcaataaaccctgcaagggaccatagaaaaggaataaggacagtataatgaaataactaaaacaaaaaagttagaaattcatcatggattcacatgaggaatatgtgaattccattctgtaggcagaaaataaacatttcatgaacagtgctcttgaattagagtatataagcaaaatataggcctcttagttttacgtgcatatttatccaattaaagcattaaagaaacaagggagcagagaaatgttagaatgcagctgcagcaaagacgtatatggggg

SEQ ID NO: 614 - DNA, 592 bp, Oryza sativa
aatgaaaaatttcattgtagtatttacaaacagaatcgatgtctccttgaacaagacgactctctgtatatggcagagaacgaaatcctcttacatccgtgacaggctaatatgcttgtcaacaaaatcctcaacgaaaaaagaacagagatgaaaccctgaccccccaaaaaaaaaacatttcgatactggtcctactgatgatatccgcttttgtttacaggaattgggggaggcctatagagcatgcttttggggttattcctggccatcagatttgcgcaagaacttccagacttcttggctattgatgggctggttgcgccaggtatatgacaagcttcctggttcccatccagggctacatagcttttggatgatttgatcttcttgtatggattctccctcttgcgtagattctctaggcatgtcacctcagacatacatgccaaagattgagactttccgtcggagtatttggaatatccttttctgcaaagaacaacaaaacacttgccctgtgagaaaaatttccctttgctagtccatctattgatactaaaatgcaactcttctttcccaggaacttact

SEQ ID NO: 615 - DNA, 3503 bp, Oryza sativa
tcgatttcaccgccgctagcccgtctcgatacacattgccgctgacctacgatccatgctactgtggccctcgatccgcgtcgtcgccggtttgatttgcgttgccaccagcacatgccgagctcgttgtcgccggctcgattcacacaagcgctggctcgattcacacaatcgccagcacccgattaacgcttgtcccgagctcgtctgcgatggctcgatttgcgccgcggctagctcgattcatgccctagagcttgtccacagttggccttttgcaaccttgattcacgcctctaccgagtctcggtttgcgctgtcggccaccgagatcctctcgcacccccagccacccttgctgccacccaccgtcagtgccaacttgtctcattgcactcaagttttggccctacatgcagaggtaaagaacgagaggaggaagagaaggaaaaaaaaagaaagagcgaccgacatgtggatcccatcggtcgggttattatacaagagagagaaactgttggtagttttgcaggtggtcccatttttaattataggggaggatattttatgaccctaaatcggtaaatcctggttagcaagttttgaaaaatcatctatggagtggatatattgggtatcttttggtgatgctcttgtaacaaatagacaaatagcttttctgaaaatcaaaaggacatgttcttttaatctatttttctataattaacaaaacttgctttgttacttcaacagtttcttaatctatgtcaacaatctgtttacataatttatttgatatggtctactacagcttgggcattgaatttgcgtctggaagttaaaagagataagcacacgatcgagtacatctcactggaagagagcagatcaataattgttgacttcttgatgcatctctcgagctcccctgaaactagtatcaacagaagactgaagtggatccgtttgacgttttaccatcagatccgaaatctatctattatattattaaaggaatagaaaaaggagtctccacgttcgctctcatggcctagaaattctcacgttaatcggagaaaaagaaaaatcagagtccatatagaaatacaacttagaaatagctgaaattcagaattaaaaaataagggatattagaagaggaggctagagtccatatagaaacacaatttagaaatagttgaaattcggaattaaaaataaggaatattagaagaggagactagaagaggagactagagtccatatagaaatacaatttagaaatagttaaaattcgaaatttaaaataaggaatattagaagtagagtatagagtctatatagaaatacaattagaaaataactgaaattcggaattaaaaataaggaatattagaagtagagtatagagtccatatagaaatacaattaggaaataactgaaattcggaattaaaaataaggaatattagaagtagattatagagtctatatagaaatacaattaagaaaaaaaatagaaattcggaattaaaaaataaggaatattagaagtagagtatagagtccatataggaatttaaaagtaaataaaatttggaataaacataataaaattaaaagtagagtttagagtccgtataaaaatacaatttacaaataactaaaattaaaaattaagaaaaatatgggaagaagagtttaaagtcaatatagaaatacaatttagaagtaactgaaattcgaaattaaaaattaaagaatattgaaagatgagtttagagtccatatagaaatacaattagaaataataaagattcagaaataaaaataaataatattggaagaagagcatagagtctatatagaaatacaatgtacagaaaattcggatttaaaaaaagaaatattaaaagacgagtctagagtccatataggaatatatataatttacaaataactaaaatttgatattaaaaataattaataactaacacgtatataatatataatatgaatattacacattagtagttttgtaaagttattgcaaaatttaaaattatattgtcgttttaatatatttgaataaatgtaatgagaaaacatatatgctattatacgagataaaatataatgatgctagccgcacaatctgcgcgggctaccatgctagttaattaattactcctataacctactgtaacttgttagagctccatggcacgtaaattaatttagccgcccctacctagctagaaacgtctacaaaacaatacctcaaagatttccactaaccttctaatctcgaggtaggagagactaggagagccatggcccatcatcggtggcacactgccaaagctacgtacgccttgtgtcatgtgtcccgacaaccgttggctccaccatcgttggctatgaactatccattggcgcatgcagttctcgttctagaggctaccatgcaaagaggtccttttcgccaaataattttctcatctagcacattcccgcggtttccatcatcagttaatacagcatttttttgagatggatcaagtcgttagatttaaccgctatctttaaatgacagcagcgttgcttgcttcccgtctccttgctttgccgtttgcgttgcgcctctcaaattcttttccctccattctccgtttgcttcccgaccacgtcttccgcttcctctcctcaaccaaaagcagaggattccaagttaatttctaaactcgcgcagtccatagcttagctaggtagagacaaacaatctacgcgaaaaccttcgcttctgcaatggcggactcggctccggcgccggaggccagagtaagcggtggcgacgttccggcgaggctgcagcaggctctcgcgctgctgttccctaccaacctcgccgcgaaggccgtgctgttcgccgtcgtcgtggcgctgctgccgctcctgccgacgagccaggcgcccaggatctgggagctgcctcacatcctcctcctcggcctcatcatctcttacggcgtgttcggccagaggaacgccgactccgaggtggccgccgtggccgccaccaagaccgtcgacgacgagtcggtggagtcctacgtcacccagatgatgcacggcccgctggtctttgaggagaacgatggcggcggtgaagctgacgccgccggcaagaagggcgtccaggcgtggagctctcagtacttcccagacgatcccctcgtcgtcgttgccgatgccggtgcagggagcaacaccggcaagggcgatgaaagagagaagccgctcctcctgccggtgaggaagctcaagccggcgaccgaagaatccgcgacactaacggagagcttcagtgacggcgccattgaagaagaagaagaagaagaagaagaagaaacggagttcctcctccgcaaggcgagatacggcggcgtcgttagcatcgttgtgttggagtcccagtcgtgatcagttattcccttgcaggg

SEQ ID NO: 616 - DNA, 11893 bp, Oryza sativa
ggatttgcccatcttccctccccccgcgtacgttggccccagcccgtcccatcccacggttcgattcttccatcgctccgcgcctcgcctcttccgccatgcgcccctctctcctctcccctttacctagccatgattgatgtacccatcggtgagcgctgcgtgcgagaggatcacccgctcctcatgtgtagacggactgtcgggcgagaaagcgtacggttccaataagaaggcccttaaactggccagaaaaattacaacccgtgatggcgttgtcctttccctttcttagggcgagatataagctggtttgcatgcgaccatgtcagcgtaggacaaaacactaggggcactgttcagctgctccaggacgtcgacaacatggcgtgcgccgtgcaaagctctaactaggctagagcagccgctagcggtggtacaccatgagagtatttgggaccatttttctttgatgaaaacggccttgttaggattaattttcacactgctatttggacaccattcgacgtgacttttagccggagaaagaaagtgtggacaaacatatagatgcgtgtgggttactgtacacgaattaattaaaacatgtcaaatggtttagagaacattcttttcgtggtatattggatcttacaccgaatcgatttattttttttcaaatcttgttttaggagtgcaattggacatcatcacacacacatttctttacatatatatgcttgcgatattgtcatagacatcaaatatctcctgagcatgagcacacacatacccactaatgcacatgtgtgcgcatatacccttaaaattgataggcactagcactgaatctactcactttgtccaaaaaaaaaatcaattcctttcttcggtttgcagaccgataaattttagcctctcaaaaccctttacttacacactatttcaatactattctgttattaacgagggacatttatatttttttcctctcccttaaatcttttttggatgttagaagtagatgagtagtccattttttcagttgacggagggattagtatttaagcttcagtgagctaagtgcacaaccatatcacccacccatctggtaatatataggccatcctagtgactgtgaatactttaaccttgcccctctccatatttagtgttcaacctccaccaatgtctagttaatgtatctatcgaatctccaatactggctgtcatgcctttaatttttctcacctctcatatttggtggtgctttttatggatgatctgccattgtcccttcctccacacagggaggtggatacaaccctaaattttctgaagatatagttgtttcaatcacggataacacagtcaagctactatgtcagtaataataaaatttgtttacgtatagcagtttctatgcatgttaattatctagtgcatacagtacaacaggaggggcaggtagacgaaactttctctttctaatagtagagatatgctcagtcgctaatagatgataagttcataaaccaaggaatcgatagattatttatctaggggtttaacatctcccattgtaatgtcttcttttgtttctgtaatggtggatctaggaaatgaatggggagggaggcttatctccttcctcctccttcaggcccccctactcttcctcttctccctttctttcctctctcatctcccattttctcaatggtgattcagtggggtagggggacctaagtctccccagtacgtattacgctcaatccgatcttgaatttagatacctttctaaccggaacaaatactaatcggattagccaacggaccctctctcgcatgaaaacaaccctacacatcctcaagcatgaaattaaactaccctccacatcctcaagatttccacccaaatataaccagcactaatcaaacttctcgaatctctatctcctaaaaccaatcaagcaaaagaaacacgtaatcacccgtaataatcaatcagaccaatgaatgtaattaagtgcgtaataaaccccagccgctttcagcccatgcaagagagtccatattgccgtgtcacaaaggtttttgggagggtggacggaaggcaatgatgggatgatgatggtcgcggagatgagccgtggatgtggggcctccgcccgcgggggggataggtgcgcgcgtgccggctcaaagcgggacacgatgatttgggcctgggggaaaggccatgcgaacgcatgaatggacacttgaactggcctttccctgtggcgcctagctagtactgtagctaagcttggcatgccctaccaatgcgagcagagcacgccctctgcaatcatgccgtccatccccaggtccggcagcagccttgccttgccccggcgttggtttttgctggttggtaccagcaactcgatcgaaaagccaatcatttcttcatgcactgctcctacgtgccgcgatcattgcttattatccccaaagctagcatggctctcccctaatctagtactcctgcacctagcatttcaatgtgcggtacagtttctcgtctcctgcttctactgtgtgaaaatgtgcaaacaaatgagcattgagctagctatagctagcaaccttaaaacatcgaaagcttgcactctatctctagctacttgttgactggattggaggatggacggtagtcggttgagattactgaaactggttgtctctctgtttttttttaaaaaaatgttctgatttggcaaaaatacttccgtggaatgatcgccgaaatgtactaattgtacgcgacgacgactagtttattttgcaccacgtacgcacacttgttcacgggccataaatcaaagcgcatgttggtttgctagatactccactccattcggtggaccagattataaaacattcgtcaaagcggaaatgcatgcccctccttatatatatttttttctcctaaaacaaatgctactttgagtggagaatagctgaagttagctaagatagcaattttaagcctttaaggtgaaggaggtggggaagttatgattgcaccaattaaggagctcgccccacaagttaatcattgctgtcccaagaaccgagtgagatccaacattccttcccaccctctctttaaaaccctcactctcccccacttctttatcacttccaagttccaactctcagctagctgcaaactctactcagtttgcatcgagatatacagagatcgagtagtcagagctgagagctagtggagagaaagcaccagggaagaacgcagagagaggttacagggagcgatgatggagagggccgaggacctgcgcctgagcctcagtctcagctcgccgcttattgctcctcgtactcaccatgtcgccatgctgttccacgctcctccaggtacctgtcactagctcgatcgcgcttttctgcggaaacttcagttgtgagactagatcgatttgtgagtagttgctgatgattaacctttgagtacgcgcgttgtgtctgtggattagagaaaagattcctggagatgccgctgctccctgctgcgaagcggagcgaggtcgtcgcggcagaagaggagcgcgcgggcctgcgcggcggcggcggcagcgacgaggaggacggtggctgcggcatcgacggctcacgcaagaagctccggctttccaaggaccagtccgccgtgctcgaggacagcttccgggagcaccccaccctcaaccccgtgcgtaaacacctccgtcctcttcctcttcctcttcctctcctgattaattgcttagtttaactattttcggagacctaatttaacacagatgtatagttcgcgtgcattttctctactactgctgctgctgcatctctaaaccctgcgtgttacatgcgtgcagaggcagaaggcaactttggcgcagcagctcgggcttcggcctcggcaggtcgaggtgtggtttcagaacagacgcgcaaggtacgtaataagcacatgcaataccgtactgtacatcttggggattaatggactgttagtttagtggtttaagcttggatcgacatgagtctcgctctcaattaatcaatcgatcgggattatattctgaaaccattgttctttgcggcctgtgtaactaactcaggacgaagctgaagcagacggaggtggactgcgagttcctgaagcgctgctgcgagacgctcacggaggagaaccggaggctgcagaaggaggtgcaggagctgcgagcgctcaagctcgtctcgccgcacctctacatgaacatgtccccgcccaccacgctcaccatgtgcccctcctgcgagcgcgtctccaacaccaataacaactccagcgccgccgccgccgccgaccgccgcggcatcaggactactactgccgcaggcggcggcagcgtcgtcgacaccgccgccgacgggggcatcctctgccaccgcccgatcgccgtccggccgcagcagtcatgacaagctagctagctttttacttcctagctagacagactacacccgtacactgtccccatgtgtcaacgaggcagcaagcagtgtacgtgcacattatattcgcgcaagctgtgtgtgttgcgctcaccgatcgatcgctcagttgttgtttttttcctttttgttggaagcagctagctggctagctattagcatggtgttcatgcgtcaggtggagtagtagctataggcggcgctgggatagaacaggagtgtctcggcagcttctggccggcggtggtggtgttcgcgggcgggccggctgggagctgggcgtagcgaatatttagctggtccaggggaaagttggatatggtgggatacgggtgtaggggaagtggggcgcagcgggatggcacggtggtttgttctgtcccggctgacgatgacggcgatgatgatgagagggtcagtttgtttgttggacagtcgtttctcttaagcttgattctagcgattaatttaacacgggtaggcatgtgcatttggtctctgctgagcttaatttaggtgattagtagtgtgttctttaattggccggccgggaaagccatagcttgcatgcatgcatgaaagtttccttgtgttttgatgggatattatccgctaactgaaagcgttcgatcggtttgttcgcttaatcatgtgaacggctaaatataaatatgtactactactggatatcgagtaacgaatcatctggatataatcgaattgaattgcccggtcgaggaatatgcaccattcgatcggaggtggtatatatatgtcagttcttatctatgctgattgaatggtgcttataccgctataccaggtgtttgttcttagttgctctcatgatcataacggcacaaattcatcgtacgcgcgagcgtatagctgcaggaagagtgcctaggaagctacaccgaaatgaggcccaaaatcatgtacgtacgcgtgacaccatggcacaatataatcgccaagttcacgtcaaagtagaaatattttccatcactccatttattctcttgttgtacaagtcaaactgttataaagcacaagtgtatcgctcagactctcagagtcactcgatacgtggagagacttgcctataggtggataggaattctcaggctggttcacaaattaatcacaccaaaatttggtaacgccaaattttgatatatttcgacgttaccaaatttggtagtgttgactttatttgttttgatgcttttactatattttggtagagttttaaagagaggaagcttataggtagtaacggctgaagtatgcatgtttagtttgttgttttactaaaatttgataaggtttaaagtggcagccaactgaatagcccatcaatttgaatccgaaaggatatactatatgataccgttgacttggttggatttttttaaaattttaatcatttttttagaccaagtagggggggcgcaaaaacatcaaatttaaagtttgaagtgaggagctaaaaccttcttccaagggtaattttaccgctatattttctagtgtaaaaagttaatacctctaggtactaagtattttaaggtataaaaaattttagtataaaatttagatacctcaagatactttctaaagaactgtaaaatccctcttcttccaaacagagcttgcgtccctatcttgactttttaagtctgacagtccaaaagtttgtttcctacaaacaccttcttgaagccgaagcaaccgagggcgccatgtttcgaagaccacatcgtgtctatgattccatagaacctaggaatacaggaaatagaagaggcaaaattgccttgtaggattcaaataatatcctacatgcattcaaatatggagggagtggagtttgtcattgagaaaaccagatcaattgaatattgtgggacgttgatcctctgctgtactagaatgcagtggtactgtagcaaacttacctcgacaaaatattattattcctcttctgtgttcgagatcactgtagaatttgttttcggccgtttgatgaagatccgacggcaaaaacaacgcctaatgtcagtgtactgtagatcatctgcaatttcttcttcccaatgcagagtatactcgacgcaatgtatcgccagcatccacttcagctgcacggtgtgcgtgcgtgcaatgcctaagagtacgtggacacaaacacgtatgcatgcagctgtagtaccatctcagccagtactacccactgtagctatagcagctacagcggccaaacctttggagtttggaggtcacgcgacccacgcggccgcgcaccataacttggggagcaaaagctggggctttttcccggccgtgttgcatgcaatgttttagtataagcggcatgcattaatccgtgccgtgtgttaccactcattggctcccacaccggcccccgccttttacgagattggctagcacaatgattcccatgggagagcgtactcacatggctggtcgtactgcctgtttgcttgctgctggagcccaaaaaatcaacgggtaatcaagctgaaaggactaaataaagaggccctgtcgtgattaactgagagatttatggtgcttatattagagcatgtcgcgtatgagaccgtctgcagtagtaggctgtaagccactaattaccctatcgtgtttccccagcttttgtcagtgcgctcggcttctaatttgaccacacatgatgtacgctaacgtgctgtcctgtactcctgtgcctgtccaggctagtcagtttaggctgagtttagttccaaagtttttttttcaaacttccaattttttcatcacatcaaaacttttctacacataaaatttcaactttttcatcacaccatttcaattttaaccaaactttcaattttaacgtaaactaaacacaccctcagacaaatcatgtagaaatcagaaagaccagatcgtccaatactgtccagctttcggcccatgggctttagaccatagcctattagctcatactaatcacaacgttgggcttcttttcttcttttcctggattcctaacgtataactggcatatatccgaaaagaaggcactatgtaagggggatcttaatgggcgatcgatcgtccggagacgggggtagcgatcgatcccctcccccctccacccctccacctggtttcctttgttggcaccgcattactttcctattttagtaaatttatacacctaaagtttatacacctcaagtttacacatctaaagtttagagaccaaaagtttataagtcgaaagtttatatatccgattcaaaattgaatttgaattcaaatattttttatatatatagtatttctatacatctaaagtttatagacctaaagtttataagtcaaaagtttacatacccgtttcaaatttaaatttgaattcaaatattttctatatatagtatttctatacatctaaagtttatagacccaaagtttataagtcaaaagtttacatacccgattaaaatttgaatttgaattcaaattcaaatttgaattgaaatattttctatatatagtatttctatacatctaaagtttatacacctagggtgtgtttggataatgggttaggagaggtgggattgtgaaatggaaatgaataaaaggataggatgaaatggaatgagaagaatggatggctaggattgaaacttaccctttgaggggtgggaaatcatatcccaaacccattatccaagggggctgctatacaacggaatcccgttttcgaacgggatgagttctgatacctaacatgtatcatacgtttctaccacatatcaggtgatacttgcgaggtatcagataatatctatcatgtatcatgcgattcttaccacgtagagggtgatacttgtgaggtatcaggtcctaatacctaaccggtatcaagtgatacctatcaggtatcatgcgattctaccacgtatcaggtgatacttgtgaggtatcagatggtacttatcaggtatcatgcgattcttaccacgtagagggtgatacttgcgaggtatcaagtcctgatacctaaccggtatcaggtgatacctatcaggtatcatgcgattctaccacgtatcaggtgatacttgtgaggtatcagatgatacctatcagatatcatgcgattcttaccacgtagaaggtgatatttgcaaggtatcagatgatacctaccatatatcagaggtcgagcaccaaagacgtgcatagccgagtggtcccaccatccaacgtaccatgccggagcttgtcgccgagcggccacatctatccaccatgccgacaccacgtcagagttcgttgccgaccggaccgtgtcctccgccatccatgccccacgccggagctcgtcgccgacggccgcatcctccaccgtccacgccatgtcggagcttgtcgccgatggccgtgtccttcgtcatccactcccaggccggagctcatcaccaatagccgcatcctccaccgtccacgccacgtcggagcttgtcgccggcggccacatcctctgctgcctcgacgagctagccaggtacgtgctcgtcgtgctcgcgccgatgacggcagcgagggcagcaccttcgtgctctacttcctcatctgccgccgtgtccgtgttgggatcctcctctcctacgccggcgccggtgccgccggcgagaggctcgcggtcgtggcgcagtgcgtcgatggtgcgggcgtgggtgccacagccggcgccaccggcgaggagctcgcggttgcgggatagtgcgtcaacggtgtgggcgtgggcgccacagcgccgccacccatgtcggccatgcatgcgtgcatgttggagcggcaccgtgtcctgcacaggcagctgctgctgctgctcgggacgtccatggtcaggtatcgctcctctttgaataagcaagagtcccgtccggacgggattccggtatgtagcattcccgttatccaaacatggccctaaagtttatagacccaaagtttataagtcaaaagtttacatacccgattcaaattcgaatttgaatttaaattttttatatatagtatttctatacataaatttttttaaccttttgtttgtgaactgtctcttctcccaaggaaactactttctgggtatcgaccgtaataggtagagggcgtggtataggaaaggagtagatcaaaagtatctgcgcagaaggaagaggaacaaaggaaggcgacaagaaggccaagcatgcccgacgagtcaactctttaaaaagctaaaatagatgccaaccgcacatgaattgcaagaatgcggttagtgattgattgtgaaaggttttttttaaaaaaattgtgtggtgtactgtaaatgaagagaagaaggggagaaggaaggagggagaggagggaggagtgtatcgtataggggaggggccgggcgggtgatcgctgggcggacgggggagcgatcacccacccagggtaccattctcgctatgtaagagtagagaaggtattagtatctgccaagaacagaatattattggcctcttcacaaatctagcggtaggtaattaggtggtaacttagatttttttttttaatcttccctaccgcaaagaggtaacctgaagaaggcaagaaacggagtgggaaacacacgggatctctttccgatggtggtaaagaatagccgtcgaactaagcaacggataacctgctgcgcgaaagagagcctgacgcgaccgtcttttccctgaaatttgctcccactcttcaaagaaagttggcgtgcgcatctcaaaagaagaatcgcagcgacaaatcaggtcacctcttgcttcctggaataatggggaggcatgcacacggccgggaggccggcggcgatggataatacggcgcacggcgggctatctggccgaggcggcaccctccagatttgggccttctttgtttttgattcttcggggccaaaagctcggttgctttgctgctactgttgttatcgtggaaacgtcctttacagagtccgagacagactttgcaagggaagctagccagctaggcatctgccaacactggagagtttttacccgcgaactagtccagtatcaggcatgcatgcaaccgtcaacctgaagaaaagtcactactacaaaacactctttgggtttcgattggaaattttatgttggtgtcggatttctcaaccgatatcctactagcgacatcgataaaaattaattatattgatttaggaattaacacctttgagaattaggaataataataataataataataataataataataataataataataataataataataataataataataataataataataatacctttgagaattaggaataataataataataataataagattggccctaatgtatcggctcaaatcgagccgatacttcaagcgaccccacatcacctctgagatcgatcaacatcaagaatcgactagcatgctaaagaatcaagatcacacaaaacttacacacatcaagaatcaactacacattacagaatcaagaatcctaaccttatcaaatttcatataaaatcacaattttttttctcaaactccatccttagattcagcacaaaagaaggcaataaagcaatagcctgtcgtcgcgctgagaaagcgagggaaccaccgccgagcctagggagaatgagggagttgccgccgtcggtggtgcagcaggcacatagttaatttttttttggggggggggggcactgtcgatgtagggggaatgagtcgccgccaagccaagggagtggaagggagttactactgtcgagctggccgtcccaagctcatggcaaccggatttggtggtcctcaacttatggccgccactgttgtctacccatcaaaacaccaccgagctctaggctaccagatccgccacttcccactcacgcgccatccttccactgtgaagaagagaaggagagagccgagaaggaggatatgttgcgggctaggagaaggatatgaggtgtgctgtgagcgaggaggaggcacattggtgatggtggacagaaggcgactatgtgggtgaggaggaagcgccgacaatgcgagaaggcaacgctgctggcgaggaggagcggtggcgacagagagaacaagggtgaggagagacagaggacttaaaaaggcgagaggataggattggtggactagaggtagtattctctccttttttttatcttaatttcgaactaaccaacgtcatacgttaaagtgtaattaa

SEQ ID NO: 617 - DNA, 7068 bp, Oryza sativa
gcattacacatcgaaatattacaaatacttcgttttacaacccaacctagttctagttaactataatcaatttatataatgcaaccaaaattttctcaccttcatataattaatggttaaaagtttaacctatagactatagcatcaagtccatcaaattaaaattactttcatgcctcaaccataatttttcatccatccatccaaccaaaccatccaaaaattaacattaccacatatatggttaaaaaaatagtgacaccaatgagtacattgcaaacatgtagcactacaacaagccaatcctaagaacaaatgctaaaaatcacaaatttgggtaaaaaaggggttctagggttacccaccgatctacaaattcaaccaataaaaacgaaaaaaaaagaggggtgaatgaaggagtctacctttctcttcgatttccacaaaaaatcccgcgaaaaacgagttcaaatggagtggatttgaggtggggaggtgaggaggagagagagggggagagctgctgctgctcagctcgggctggtgcttgggcgaaaatgggagtggggaggagataggtggtggggcccacggggtttaaggggtcggcccacagaggaagggtggcgcagccatgctggcgccgtggtataaggggcggcgccagtgtggctggcgcccccttcggcctagtcagcacctccacgacagccctactgccacggtggcacgggcacggcgccagtgtggctggccccgccatgttggggtacggcgccagccactctggcgtcctaaaaaggaccatttccggtttaagtttttttaggggtctatttgtaaaataagtttttaaaaaggatcaaaatgtaaaaaattttagtgccggcggctggtcacactggtcgccaggctgcagcagttggaggagtgcctcgcgcggccggggccgctgctgtcgccggagacatggagccgcgtctcgacggtgcacaccatgagcatcatggtgtgatgaagggggcggggcgcccgcggcccgcggtgcgcgccggccttctgctgcacgcagttctgcttctgtactgtgggaggctcactaaggtgaaaattctgtagtttcttacttctcgcgagagctcctttgggatggggaaaatctggctcacatctgcgaccttgttcgtgcctgttttccttgttgctgcatgcggttctttgcttccttagacctcagagctcagacgtaagcaacttattcatgctttgtaaattgacccacttggtgcatttgtttccaaggacaaaatcttcgtacagacgctcttatgtattcacacagtcaaagtgtttgcggtacatgcacttgccgtagagatctactccctccgtcctatagaaaatcaatagtactataaatatctggttgtaggttgagttttttttacggagtgagtagtgacattaggttgatcagcacctctagcctggcagcgcgctaagccatgtcgtgaccaatcgtatctgaatacccgcgccatatactgtaccatgacgcaatctccctgttccggtctggaggccggcgcaagtacagtacagatctattgggtgggtcagggtggctcgtgcttggtttttccacttttgggatgtactatctgactatatctggcccacggcaccccggcagaggcccatgggttttcgctgaacatgacaaaggctagcgccgcaaccatctgcgcgggccgtgcggctccggttgttctttcgatatgggctattgcgttctccttcgggaataagatcactttgactccctcaactgaccccgaatctaaatcgtatccctcaaccgcaatactagaaatcttaacccccgaacttacaaaaccggtgcaatttgactccctcggtggttttggagggtggtttcgctgacgtggcgcacacgtggcagtgttgacctagtctttgtacaacgtggcattgacgtggcgctgatgtggaattaaaataaaaaaatatatgcgggcccatttgttattcacaaaaaaaaatttgtgggacccattggtcccacatgtcatcctcccttatcccttcttcctcctccctctcctctcttctctatctgtccctctttctcttcatgcgagagcggtgtccggaacggcggcggcgacggcgggcgatggacgaagcagcgacggcggacagagcggcgacggcgtatagtgggggtcaaaccaccccacaagctttggcgagattcgaaacacggcggaggagtttgccgtcgccgagatgccgcagccgccgccgtcggtgtgcacaaggagcgtcacctccgtcgcgctcccgacgcatggagatggcggtggctgctgccgcgtgccgctctccccattcgacgcatactgggtcgcgctgctgttcgtccgccaccaccaccgttcggagacgtcgtccacgcactcagggactccctcaaggcgttgctcccagcgttctaccgcttcgccagtgcgctggtctactcgccggaggaggaagaggaggaggggtcgctgtccatcgtcgtggaggccggaggcggcgtggcattcgtggaggccgaggcgttcgtggcatcggtggtgcgctcgccgcgggggatgatggtggcggggctagggccgcgctttgccatgcagcagcagccgacggtcttcgcgttgcctccgccaccgccgccgcagtagcaaggatttggcttcggcgggtccgggactggagcggtgctagcgccacgggagatggggaacgctgccgccccagcggccatcgagccccctgctcctgccgccaacttcccaagtctctgcgaggctgccacgggcgcggccggcagcaagtccaagaggaaaaaggggcggtctcgcggcggacgtggtcggggagggggcccgtgtcgaaggaggaggaggagctccagtcgctgcttcgcatcatggccaggtcgacgccggagcgctcgaggccagtccaccgccacgcgttggggcgcgcgagctattgctccctttccaccgcggccaccgcccaccttgccgtcgatgccgcggccgccgcccacctcactgcccacgacacagagtggggacaaggagcggcggctgggagcgtgctcccatctcccccgacgcattttgtcgcacgtcgcccgaggtccaccgcccatttcaaggagtagctgctcccgcgcttgtcgcccgaggtccaccgcccatcgcagccaccactccggcacccgctcgccgatgccgccaccgagcccctgccgccggctcatgtcaaggggagagagagagaaataagggagagaggaggaagaagggtagtgagagagaagatgacatgtgggacccacatgttagtgggtcccacatttttttttgtgaatgataaatgggtcccgcatatatttttttattttaatgccacataagcaccacgtcagtgccacgtggaataaagaccaggtcaacactgccacgtgtgcaccacgtcagcgaaaccgccatccaaaaccaccaagggagtcaaattgcatcggttttgcaagttcgggaggtcaagagttctggtattgcagttgagtgatacgatttagattcggtggtcaattgagagagtcaaagtgatcttattcctctccttcgagggaggacaaatatgttccacgataaggccgtaactcgggcctagtatatgcagcccacgacacgcacgaacagcatgccgggagcgcacgcggcacgccaacgccattgatccgccggccggcacccgacgccgcgccgcatacccaccaccactgccgcgacacgctcacgtcaacaagccttttccactgccgcggcgcatttatccggcgagtgaccatgagcccatgatgactcctcccccccggcctcaggccctggcgctgctgcatggcaggcaggcttgcaacagcatcatgcgattcatgccagtgaaacttccgcccgccgcgcctttacacatcagagtcaggagggtgactcagctgcagcctgcagatagctctgtacagtacagggcaatccgtgagagcccggcccgggaacgcgcggtcaacatacgggcacccaccaccgcgcgcggcgcggggcggcgcctcctgtccgagacattcggcgggggctcgcgcgcgcgggcaatgatcattcacaccgtgccatgataagcagtggcacatggatgatggcagtcaggagcaatggctgatatggtcacacatgtccggacgatatggctctcttcctccacacctcccgttcaggattttatcaactgatcgacctcggttcctttcacttatggcgagacaggtgctatctagcagcttattgcctgcgaggccaggccatcatccggttccttgcaaatcaagccactctacccagctttcggatgccatggtttttagccaacagggtacgagtatgaatgcttcaagtgatcataaaatctatagcttcccttcacaatctactcagttcagacttcagtgtatccttgagtgcgaaatttatggcgctaggggaagccatgatcgagcctgtagcattattcaccctgcgtgtgtagtcactaatcaggcacacatgactggttatccaccagctggtcgcatgtgaatggctactagctcgcgatatgattctgacggtgaaggggggcatcatctcggcaggcgttccatcacggctagcagcttcctgcttgccaataagggcgcgagcacgtatagtagtttcagctttctttgtattttcgaaagaaagtttcagtatatatatatatatatatatatatatagtttgtgcttgtgttgcagagcatcatatggcaatccttgcactacagttccgttcgtgccgggcgcgacgcctacttcgcttctacgtcactgaatcgaaggagtgggctgcagttactctccgcgcgcagacaccgcatttacctttgtctcgtcacgcggtgaaagtgcctgtctgggaagtaactttcccgtctcaggcctggcgaatgaattccctgcgcagtgcaggtttgccgtccgggccctagcagtcaaccatgctcgcatcaccatcaggatcagattgcatgtacatgtaacgtgctacctaacaatcctaacaaaaaaaaacacaatcctaacaatcctaaaaaaaacacaatcctaacaacaaggagatattagagaaaaataaaaataatcaaaataccccctattattgaaaaaaataataatgttgataggtaggtaaaggatatttaagagagaaaacttctcgttttatgtgtcgagattacgtaggatggtagaagttggatttttgttacgataaaattcaaatttcagaagttgatttttttttacggagggagtacgccactgccaagttcattcaaagtgagaattacccaaagatcacatcacactcgttggtagatgtacatctactccaaacagcttctccggcatctcaaaatttaacaagggatcttgggactgaaataatagtcttatccacaaatacaagagatttcagtgcttaaaatttatccacggatataaatggattttagatagaaaaaccattactattttgccttcccatctaacattcactgttcgctgttagttgcatcgctatacgtgaattttcataatcaagtatatatagtctcaggaacatgaagatagtaattcacctaaacattaaactttgctaaataatttagaatcaattatatttatggaggaagaaagtagtaggcgctctagtactactcctacttcatttacttttgatatatttccatctgaacaccacaaagctgaaattgacaggatgtggctaaattaaagatcacacaaattaacaaagcaagacggaacctttcttatatcggtcgtaatatgaaaacagaaaaaccgttcttgccgaacctggtaaaatgagctgatcgataagacctggaaaagaatgagctgatcgataagacctggaaaagaatcacgcaagactaaggtaacggtattactactcccactcctacaaactaaggccatgtttagttcccacgtaaaaattttacaccctatcacatcgaacgtttgaacatatgtataaagtattaaatatagaaaaaaactaattgcacagattgtgactaatttacgagacgaatcttttaatcctaattgctccattatttaataatatggtgctactgtaaatatttgctaatgacggattagttagacttaataaattcgtctcgctgttttctgacggattctgtaaatagttttttttattagtgcccaaacaccccatgcgattcctatataatatccgatgtgacacgcaaaaactttacacccctgaatctaaacaccgcctaagtaatttcaccctttgtggcttttatgtctggagatggggacagatgggagcagttggtatggggctaaaaaattttagtcctatcacatcggatgtttggacactaattagaagtattaaatgtagactaatgacaaaacctattttataaccctggactaattcgcgagacgaatctattaagcctaattaatctataattagcctatgtgatgctacagcaaacattatctaattatgtattaattaggcttaaaagatttatctcgcatattagctcttatatttatacaattaattttataagtagtccatatttaatactttaaattaatatccaaacatttaatatgataagtaataaagtttagtcaccgaatgcaagcacccagcagagagagagatatcagctcggctgcgtaggtatggaattatggatgatgcgggctcggcgagaggtcgatccatcgatgaggacgacaatgattggcggcggtggatggtcgaggacgacaggacgacacgcgtgagagcggattgttggtggtggcggtggcggtggggggtggggggtgat

SEQ ID NO: 618 - DNA, 690 bp, Oryza sativa
ttcctgcacccctagcagtttcgtgtgtaactaccacaatttaacttgatcaggttttgcatataaacaaatagatatgcaaggttatcctaatatgaagatttatcgtgttccacttttgtaactctttctacacaaaagattaaggacaaattattcaaactaatatcgtgctttaaaagaagcatcagtgtggtggtgtaatcatctgtacatgactccacccaacgtgtttcaaatccagcgtcaacgaatatggacagggtgacacgcattgcccaaagaagtttttacagaacatacgacaaccttatttcaagtagggtttgaaattcgtttcaaaatttctgaaatcccccccccccaccagcaagctcatatctcgcatggaattttttgtttttctgcatatttttgagaatttgaccaaatattattcaaattcattcaaaatcagtcaaaattttaaataatttcggccaaaaaaatttaaaatttctaaaatttcggtgcccccagcagaaatagcaatttctaaatttaaaaccctgatttctaagagatttattttatgcaggcatcatcggcgggcggtggctcaagtactggacggaggccggcgcggtgctctcctccgtcgggttgttcgaagcgcagctgagcagcggcgcgttccagctcctcggcatg

SEQ ID NO: 619 - DNA, 518 bp, Oryza sativa
aatggaaagcgcacctagctcccctagttatgtcgcaactaagattttgtttacgtgacaccagccggacccaataacagagtttgcttttccaatggaccaaaaatgttaggtcgagtaccacgctcagatcccacgacagtgacacaccgcattaattcggagcaacaaatgcacaatcccatgcatctccgttacgagaaaggaacacggaatcttctccgtccacctttggtgatttgatctgttaccaacctccggagccgaattctctcacgcgccaaaaaagatgcaggaggaagcacagtactcgtgcacggtaacgtttgtctctgttttttttcttggaaacaaaaaaaaaaggttattaatttgtggttaaccgggcgaaatgcacgtaccttgggcagagcagttgtagagagggccggggaggccgttgatggtgaaggcgtcggagacgttcgggcctccgccggtctggaccgcctggttgaccacctcctccgtgtccgcgt

SEQ ID NO: 620 - DNA, 675 bp, Oryza sativa
cagagtaccacgtctcgagaaaagtttccagtccacaagacgacaggaagcgggctgttgatctatcaatcgcactacgacgtcttttacttgcctcgtctatcaatccaggactacccgaaattataacagctccacttatctgtcttaacgggactgcgttagaatcataaaaataaagaaattgacacacaaggtgcaatgtcgagagattgaccttggggctatgatctaacgccatgtgtagggcaatgcttgcacccattgagtagccaacaacaaccaccgctccatgggttatatttcttatcaacttcagtaacaaatctgcaactgattgaactgcaaaggagatttggttggagctttcaacatcatgctgtagaatttcagactcgccatggccaggaagaacgacagctataacccgtgcactacgagagagagcttttatgattggaacccaggcttcactcgtactctgaaatgcatgaagaaagagaatagccttttgctacattggctgaagcatgacaatagatactgtgacagcaccatgttactacatacggagaaactaccagtatctcaagtatacagtgcaagggaaacgtaggataatgaacatatgcctgcatctggagcttaagcggataactggacaaccgaaatcaa

SEQ ID NO: 621 - DNA, 725 bp, Oryza sativa
attcctgcgccccggttcacgtcctctgtaacaatgatattacacatgtgtgtaaaataataagaaaaagtgatttcatcccttgaagggataacccctcatttagtgcatgtcacctaaatggtcataaaaaatataaaaaaatagcagcatagattaatataaaatatatcacttcacaaacatgcaagtttaaattcaactgttataagttgtaacaaagataaaaaaaatatagttgcgaatgtgcaataactatttttagtctaacttgttatttttgttgcaacatgtataggttaaatttgattttatatgtttgtggagtgatatatttcgtattaatatatttactattttttttaaaaaaatttgataactatttagatgacatgcagacaacgaggtaatattcctcgagagatgaaaatccacatcctgataataacatttatgatagaggactctcatcccgtcgtgtcacctaacgcatgcaggttgtacttcaagtgcacgttcagccgcgagcggagttgcgcggcgaagaagcaagtgcagcagcgggacgccggcgagccgcccatgttccttgtcacctacctcaacgagcacacgtgccagcagccgcaagctgttcccggcacgcccaacactgcaggtagctcgccgacgacgacgagccggcaacgacagtcgtcctcctcccgccggcggaaatgttggac

SEQ ID NO: 622 - DNA, 793 bp, Oryza sativa
caaccattgaaagccactctgcacaatgaattgttgcttccacatcctaaattgtcacagcaacaaaaaattatgaggaaataggccaaaatcagcaatgatacaagcatcacaaacacaaataagagaggaaggttgggatggcaacagcggaaaagattttctgcataggatgctctacaaaagaaaaatagcttgccttccacccatctttttgccgcattgaatgctccaacatgataatcaggaaattgtgtatgaggtcttcaatatcaccaatgcttatgccatcagcatatttcttagcacccatctataattagaaatttgtgaattagatcaatgggtagtggacagcacaaaatgtagcatgattcttcttgcaatatattctgacataaaaaaaaggcctacgatacttacctcatgattataaatcaaaacctccaaaatccattctggccattctgaaattgaggtcatcgtggttctattctctggatgactgcaagccaaaaacagaagatcctgaaataatatagagggaaattttgacaccataagaaatttaaacaggtaaggtcgcaaacaaggtttcaggaaaaaacaaagaatagataacagcaaacagtactgatgagcaaaaataataaaaaaaaaacaccaaacagtactaacatagaggttatatgtgggcatataatgcaatggaagtgaatatgattgtgcagccatgcaggtgtttggttaaaagcataagaatatagttaaacacggcatggaatattcgggc

SEQ ID NO: 623 - DNA, 717 bp, Oryza sativa
ccactagctcagtcgatgggataattgcagtattagacattctagtatcttgttgagccgcgtgctcgagacatctggccatgttttatggtcgtaattatccaactaaaatgcgactgaatggtgggctgtgggtgcgtggttttgtgagtcgcacccatggcaattaaggaccggttcacgggaaaccctggaagacttacagcgcttgccacaagcgggagtgggtaactgcttgatctgaagtatagctcgcccctttcctaggcaccggtggcgagggtgggcgtgatggagttgggtcggccggggtgtccggttgtccagctgccggattcaccgcggcgcaagaggggaccgcccactgccttttgaggggtgggggtgaaaccttagcgtggtgtggatggttaggggagggttatgcgaagggtctcgtcacaatcactcgacacggtgacgtgtgcatcatgggcacatgatgacgcggtgacatgtcggtgggttgtgtcttgtgggtacagttgtgcacctctggccagagtaaaactattcgaatagccgtgccgcggttatgggcgatcgaccagattcaccgtgattagtctcacacttaataaatcgacccaatacactgtagtttaggtgggttggttgggcctgttcaacgtggtgtagcgttgatcagtggagatttaatgttactttaattactca

SEQ ID NO: 624 - DNA, 1176 bp, Oryza sativa
gttagtactacgtaccactactatttacgaaaaccaaacgttaaagctgacagccgttgcccgttattacgacttgttggagtgatatcactgatatggcaacaaccctcaaaaccgagtcaagttcccgtataaatatttccaccacctgtacataattcgcaagaattttgagtcaagccgtttaaaagatccggaagtttcgtacagaaaccaaacaaattttgtacgaaaaccgcggctttatattaattaataatataataatatcataatccgagtctaaacgaacggaaagcgcggcatcacgtaacaaccctttttcctttcacttccctagtctcgcgtctcttctactgctctccctccacttcgactccactcctcgtctccacggctgcacctttcccactcccgttgaggccgaattaaaaataccaaaagaaaaagggagaaattccaccgcccccctcgaggcccagctcaccggcggccgacgtctccggccattcccggcgaccctccccgcccccccgccggctcatgcttctcggctcggctccggcgaccccccgagcgtagccagatctgggcgtaggtggtgggggaggaggaggaccttgctccgtcggggatggggcggggctgcggccgctggtggtgggtcgccgtggctttggtggtggtggcggcggcggcggcggcggagggggcgcgtgaggaggcagcggtggcggtggcggtggctccgcggcggcacgcgtacgcggcgatgatgtacatgggcactccccgggattacgagttctacgtggccacgcgcgtcatgatgcgatccctcgggaggctcgggtcggacgccgaccgcgtcgtgatcgcctccctcgatgtcccgccgcgctgggtccaggcgctgtaagcccccccccccccctctctctctctctctctctctgagtctatgtcgctctcgcgccactagcctcacggttgtcttttagcttggatcgctgggtaatgatcaaaatctgtctccctcgtagatgttcgatttgtactttggagtatatttgaatcgaggtctgattcagctctctctcctcttttttttttcacgcgctggagggttgacttcgtgcctgttttgttgtttgatgcgaatttgtgggtttctta

SEQ ID NO: 625 - DNA, 705 bp, Oryza sativa
ctgcagccctgaccatgtacatatcgggatctttcaaaggttggtctgacagttgtttctatatttttgcctatctaggatgctaaccgttgtgagtattatttgatgcagccgattggtgcactaaaccctgagcgactagaaaaattccaagagcgctactctacgtttgaggatccaatcatcccaaagttccattatggttcacattactccagtgctggcacggtacatcttaaagctgaatcaaatgtttatttattactccctccatcctaaaatataacaacttcaatatgttgtttgattttttttattcaatgtatatcttggttgataacaatacatatccgttgcaggtcttgtattaccttttcagggtggaaccttatactacgctctcaatacagctgcaaggcggcaaatttgatcatgctgatcgtatgttttctgatctatctggtacatgggacagtgttcttgaagacatgagtgatgtaaaagagctagtaagtcttaccagcaatttgttttcctgagtaggcagcgccgaaatccagtcaagatcttttgctgcaatataactatctgatgatatttatcaggtccctgagatgttttacctccctgaagtatttaccaatataaattctatcgacttcgggacaactcagcttggaggaaagctaggtacttgtatttcag

SEQ ID NO: 626 - DNA, 622 bp, Oryza sativa
ttagaactttctttcagaattcctatccagtaaagtggtatgcatctttctgtatgaaccattagacatatacctccgtccattcagtattattgtctatgtagatttttttttaaaaaaaagaagagcagtattcaccatggcaataatattctcctgtaacatgtggttaaaaaccaatgcaggacagggtagcctaagtgactggcataaagagcctcaaagatataggtaactatgacgaaaaaccagcagtagtaagccagaatatagattaaaaaaattctaaaaacttaggtgactaattgtgacacatagtgccaccttttgcaactatgcaccatcttgaagaaaatagtaaatggaatctcagaacaaacatgttgacgaaacatgctagtgcatatagacctaaaaatacaagtattccagttttgagtcctgttagaaataaatatcatttgatcaaaatgatgctaatagctgaagtaacataaaatatatatagccatgcgttacatacatctaatggaaggccaccagcatcagtggacaaagatgatcgtcttgaggtcccagcatccataggctcattaccacttctacacaatgaatttgatcg

SEQ ID NO: 627 - DNA, 726 bp, Oryza sativa
aaagctacgcgtgtcaactgcaccaagcaaactttctgcaaaaattaccaagaagtacgcaattttgcttctctttgttacctgtcatcttgttttagaatataaaacaaacacttcaagaacatgaaatacattcagtgtgattgcatgatagaagttgcagtaacccataggcactgttagtgttacgcctgctaccataatgcctctaattctctttacgtaatctgccaaaataccaatattttgaatattatccccttgattctgtattgctgtctgatatcagattcaaggagaagagctatggtagcagtggtgcaacatcggggctgacttctagtttggcgtttacaccagttcaggtaaattaaagattttttagctgtctcgtttgcttcaaagataaataaacggtatgcttaatctttagttgttttgacttgggtcatggaaaaggtagtacatgtaatttttgtttatcaatagcttcaccagtagaactcttctaaattaggtgtattctgctatgctgctggttattgcacagcttcgtggattttatgttgctattcttgtacggtaagttgggtactgcacaccattgcatggttggttttgtcttgaaatctgacgctgtatgttttgtaggctaatatcagagttgatatgcgcctgcattgtaacatatttgcaattacatcgattagtatttttaatgtaact

SEQ ID NO: 628 - DNA, 993 bp, Oryza sativa
aagcagcatcttcgtcgaatagtacggggagaaacagtaatagtaaccaggacatggcaaggacactgccaatccgcaagccagaaaattcagagaaaaatacagcaaaacaaggccaaaaaaagagagagtaacaacaagcttaagagaaggcaacaaacgacaatcgaagaatttgatacggacagggaagaagagattctagccatttatagtggcaccgatcacatagtcatcaattggcataaaacggcaagcgcggtgctcaaataaccaaacaacttcataagaatcagcaaaggcaaggtgaccaaaaaattgcattgagctacgggaagagctttgcactaagaaacccacaaattcgcatcaaacaacaaaacaggcacgaagtcaaccctccagcgcgtgaaaaaaaaagaggagagagagctgaatcagacctcgattcaaatatactccaaagtacaaatcgaacatctacgagggagacagattttgatcattacccagcgatccaagctaaaagacaaccgtgaggctagtggcgcgagagcgacatagactcagagagagagagagagagagaggggggggggggggcttacagcgcctggacccagcgcggcgggacatcgagggaggcgatcacgacgcggtcggcgtccgacccgagcctccgagggatcgcatcatgacgcgcgtggccacgtagaactcgtaatcccggggagtgcccatgtacatcatcgccgcgtacgcgtgccgccgaggagccaccgccaccggcaccgctgccttctcacgcgccccctacggcgccggcgccggcgccaccaccaccaaagccacggcgacccaccaccagcggccgcagccccgccccatccccgacggagcaaggtcctcctcctcccccaccacctacgcccagatctggctacgctcggggggtcgccggagccgaaccgagaagcatgagccggcgggggg

SEQ ID NO: 629 - DNA, 1234 bp, Oryza sativa
atgtattccagagtaccccaccagctctgaggactcgtgcttgcagacttatagctgcaaagtcaactctagcagcaaggattgattcgatcagaggtgatccaacaggaaaagctgggcgtaacttgttagaagaaatccgtaagaagattgagaagtggcaagaaccgcctcctgcaaagcttccaaaaccacttcctgttccagactttgagcctaaaaagaagagagggggtcggcggcttcgaaaaatgaaagaaaggcaggccatctttaacctcctctttttttttctcaagcgaaaaacaaacaataaacattctcttatttaattgtgtgttctactaatcattcatatttctattggcctattggtgcaaacttggttcatcaaatgcacagttttgtatcttgtcgtaaagttggaacttgattctgcagatatgcacaaactgatatgatgaagcttgctaaccgaatgcagtttggtgtaccagaagagagctcattgggtcagtattggcatccccatttgaatgatgttttattgttttgtttcacaataaattatcatggagacttagatttattttcttaacataatcaaatattggtgtcatcaggtgatggtttaggggaaggttatggcatgcttggacaggcaggaagtggaaagctacgcgtgtcaactgcaccaagcaaactttctgcaaaaattaccaagaagtacgcaattttgcttctctttgttacctgtcatcttgttttagaatataaaacaaacacttcaagaacatgaaatacattcagtgtgattgcatgatagaagttgcagtaacccataggcactgttagtgttacgcctgctaccataatgcctctaattctctttacgtaatctgccaaaataccaatattttgaatattatccccttgattctgtattgctgtctgatatcagattcaaggagaagagctatggtagcagtggtgcaacatcggggctgacttctagtttggcgtttacaccagttcaggtaaattaaagattttttagctgtctcgtttgcttcaaagataaataaacggtatgcttaatctttagttgttttgacttgggtcatggaaaaggtagtacatgtaatttttgtttatcaatagcttcaccagtagaactcttctaaattaggtgtattctgctatgctgctggttattgcacagcttcgtggattt

SEQ ID NO: 630 - DNA, 1119 bp, Oryza sativa
caaatatgtcgctattcttgtctctggttttgcgttggcgcggaacttacagcgagttgaggtgaatccacttggaatatgtccatttctgatatataaatttaccataaatcatatgaactctggaacatgcagatggagaggcaaacacaagctgatgtgctgaatcgacatcgggtgtcaactggagttcgagcatggcgccatcttcttcattgcctaacagagatggacagactatatggacctttcggtgaacccttgtgtgctcctgatcgtgtatgtacaactttttctaatctttcttcttttttttttgcatatgtgtgtgtgtgtgtgtttttctgccctgttccccagcaaattttgtttccagaccagcgcattctggtatactagcacccttacaaaagaaacaaaaatagaaggaaaagacaacctgcaggacatcttttgatgtttcttttctttcctgtatttcagattttctggaaattagattttactgaaagttcttcaaggatgagaagatttatgaaaaggaaccacaaggggtctgatcatttgggtgcagctgctgattatgaagagcgaaagctaagtaatgttgcacaatcaaatgaatgcaacccagagggtacagaacctttagtaacagacacacttccatcaactgcacctataataacggctgaggccatgtcagtggatgacagaaatgaggacaatgagcagttagaatcagacacaactcaaagcagtgttgacgatcgactccaacaagcagatcaacagtctgtgaaaggatcaatagattcacgaggttctggcatttctgctgatcgcaatttggttcggtcgacggttattgcacctggatatgtgcctagtgatgctgatgagagaattattgttgagcttccatcgtcgatggtgcgaccattgaaagttgtacgaggaacattccaagtaagtaattgatatttactaaattttgatggtgccatgaccagttcttaaaaaaaaataatcagaaagtgaactttaattttattacaacttggctcatccacgatctgtcatactgatgtgttctgatagactccagaatgtcaattt

SEQ ID NO: 631 - DNA, 582 bp, Oryza sativa
tgcattgcagatcttgctgaaagttggaagtacaggagccgcttgtggtatggcgttggaatcccatccaaatctgatacatttggtggcggtggaagtggttgggaattttggaaatctgttctggagaaggactcaaatgggacttgggttgaccttccacttgtgaagaaatcagttgcagtgctgcaggcattgctgttagatgattctggacttggtggtggtctaggtattggagggggctccggccctggtatgggagttatgactgcactttatcagttgctggatagcgaccagccattcctttgcatgctcagaatgactcttgtttcaatgagggaggatgacaatggtgaaggtgatgccttcacaggcaacatcagcataaaagatgtcatatcggaagggttgggccatcaagctggaagcatgatgccacttgacagcaacaatcgctcatctacaaggaaaccccgatctgcacttctgtggaggtatgcactatgcaccatcaagtatcatcagttaaaatcaaagttagtggtatgtgtttaactgcaggataaaaaatggaag

SEQ ID NO: 632 - DNA, 26708 bp, Oryza sativa
  unsure (1)..(26708): unsure at all n locations
atcgatcagctgcaagttcttcgaacttataatagcgggaatctggtcattgatccaaagctcacaaagagataacaaaccaaacaattcataggagtcccccactagtgccggtttgacatccactccagcagcgcgccaagagaatcaagtcagtggtagttatataagtcatctccgacgaaacaatcatccactacttcaatactggcttttcgccccaggcctccctctttgggagcagttcgtgtcgtaagatgtcaggttgagtccgccaacgaacgcaatccctagaatctgttttgatcttattatttgctttcaacaagaagcgggagataagccttcatgactgcaatttccagccgggaaagaagatcaaggccactgcttttgagccggtacccaccaaaaatcatatagagtgtagtttgtcaactcaaactttcctggcttcatttcccattgtcatttctttttccaaaaactcatttgctaagtagaatagttaaaattcatgctctgctagagcaaacacacttctcgggattgatgtcgtctccgtctactttttctcttaactcactcagagagagaggccgccaaggataaaaattattaaagagagtaccagacaagaggtagttgtgtggttctattattcgttcagtgtattattcgggaattggtttggaaagccttggtagtagtgcactcaaatcgacattgagattgggacatagccgcccaacgattagaccgactgggggattggaagatctggaactttcctttggccaactacaagcagttgatcaatttcaccatttctttcattcccttttcttcttttcttgagtttattcacgagttgatgtcattgctttatttaatgggtctcagaagttttttcaataagcttatctgagataggcatttcttgagactaggctagtgcattggtatagagagtaacagtagggtaagtaagacagtagtgggagtacttaggattggtattttttcttgggaattcagtaaagtttgttgtagcacttttcaacgaatggatgtcctcttttcttcttgtacggccctgggagaggtctttttttgtaactaggtcagctactcaactcatatagccgtgttttttcctctatttcaactccccttgtaccgagctcccaaagctttccttctgtttttccgcgggcgggtctgactcttcgatacaacctatgatttgtgaagctttccgctctaaggcattttgaagatatgattgcgagagctttctttcggctaaccctatctatctccttaccctgtaagaaaagcaaggcgccctccagtctcgttcgctgggtggtcagagtacagcttcgccttctcctcgggcggcaacttgaaaaactccattccaatccccaacactttcctcagcatctcctctgttatccccttacgatctatgcacattagaaaaaaaagttggaaaaaaagcatgttatctctcatttttcgtcggtaagatacttgtacataacagactagcagtaccataagcagcaggcttttggacacagtattttgagtaaaatagggtaataccccataccagcatgaagccatttacacaaagcccataatttggtatcatgccggtaccagagtcatacataaaggtctgtcttctccttctgctcgaaagagtctaatgctacatcctttcactcatgtagattgtccagcatttcatttgacaaaactccttctgatctgaggacgacgaagtttatgaagctgccaagcaagatattgatggaatctcgacaacgggttcttatgtatgatgtgtccattaggtctcaaattatcaacacggagtgtacacagagttatgtacgagatagtagtccttccacacagccgtcagttaataccatcaatgattctgatgagagtttcctaggtaggaaggattctgactttcacagccatcatttgaattgggtttgaggaaggtgaacaggggtggtcgggtcatctttatttacgccatgcgtaccagttgactaggatagagacaaaagatgtacaaatatgtcctaaaagtgagtcaatggcatgccacatggtgggaagtgtatgtaaacaccgtagggagacaaaagcaagcagagaaggcgccagtggcgcatgacatatttttacaagtgtataaagtctagaagagggcgggggaacatactctcacgttctccgagtgggtactgcaccgagtaaaaagggtactggtcgacacgggtagcccatttcttgcataaagaagttctcgaacgagacgataaaatcttgtcccaggttcgaacttctctcataagctttaccggttaaaccttataagctttgggtaccatcttccagttcagttttggaagtctccgaatgtggccatagcgaccgtcaatggtggtggacgccggcctatcatgcaatattaggacgaggaaggctgaatgcaatcgaagctgtagtttccacctctcacttgatgatgaagtttcccacgggtttaaaaaggacagcaacaggtagcgagggattgttacctagttgcgttaaagggaaaaggggccatgtggttatcgaataaaccatcacccttatcatagagatagccacgaagaggtctgactttatatccaaatatatcagcatatttaagtttctctgaatagtaaactccgataaaccggggaaaataagcaatccagtcttttttatgatcgatatggaaggaatggcttattcattgtttcaggacagtccacatatgcctcgagaaagccatacagttcctctccctgtaaattaccatcccatttagctgcacctatcggcattggggatgatttcattataaacggatacagagagcgaacgtcataatagaaaaaattctcacagcttatacacatccgcatgacctccatagtctcccctacgaagaaactcatcagcagtcctatgaggaattgctataggtgtactcatctcatcataataatccttcctaaagatggttagcgctagagaagacaaggtcatcatccttgtagtaatataaagctcgtaaagactccaatagatattttgatcagcataataccacccaatatgtcttgcttctctaccaattccctcttcctagacgcgaaattatccataactacagacgtatgatctacttcacctttactgccgagctctgggcagagactttgacctaaagaacttaaagaatctgggagtagcttcaatgaatcacgaaacaccatcctcctgagtagtccctttggcgactaaacgcgctttgtaccgctcaatcgtaccgtcggacttgcgtttggttttgtaaacccacaacctaccaattatattgtagttaggactaggtggtaccagtacccaagtgccattatttgcaagagctgaaatctctgaagccatagcagagcgccactgtggatgtttaacagcccctgaataacatgttggtttagtctcttgattggaaggaggcaatggatgcagggtagatgagtaggcaatgaaatcagggaatttctgaggtttcatagtgcgatctgtggttcgagtggtcatagagtgtgtcggttgttgagagtgttaaggacatggggaaggaggaggtggacgagaggaattaagaggagaagcagagactgaggagatgactggaagagttgtatgagaagatgttgaagtggagtaagtagtgggtgtagtttaaggcacagattgaaaaggaaatgtagattcgtcgcagagaacatgccgactgatgtaaatggtattgttggccagattgagacatttgcttcctttcttagtatcacaatatcccactcactcgctttggttagttatagtcaatccataccgccttcctaaggttagatcagatggttctgaataaagaggaggctcgggagagtaactcgtgtcgttcagttggattcctggtcggctttgtccaaacaaatcactccttacagaggcgaggggaaagaaggcagagcgatagggataggcagagcaagagctcttaaagtctacccgggctagcttcttcattcttcgatcaggggcgggcttcttcccttattatatacgatgacatagatagagcctccttctttgatccattcattgataaagtcttcgggggcagtttaccttttgaatcgacagtagagtaggtttgctcttgctttctcaatctttccctatgtagtagatccggctttattcggctaaaaagaggccgtcgtatctgctcgcccccttcttcattcatccaattaggtcagaatggatccagggaacccggctcgggaactgccctgagaaaaacacagtaagagagtccaatctctgaaatatagcattttctctcctaagtacctaagtagtagtagaaggcttagtatctgacttgatccaatagagtcagaacacactgtagatccagattccacaccttgctgtggactggggagagagcagctctgcgaagctgggcgttctgtgtgattatggaggaactgtagtactcgccccaaaatgcaagccgggatagatgcttaaagaaagggggagcggtgggccttcaaaaaggagcgagggagtgatgggcaaccgtagtctatatgttgctcgtgagcccccaagtaccagtctcgcaacagtactggcgttaaaggatcggtccttcacttgcgggtcgttcgcgagtcgaactcgctctcttgccacgcctttgactcacgaactcgagtcggactcattcactgctgactgaggatcgttcgttcttcactctcttgctattacccgcagggagcgcagcaaccgacggtgcatattatcatatagaaagaaaaagaagcgaagcgtagcgattcgtactaccggaaaagtgtcgctaaccgctaggcaatagagtcagcttacggggtggagcgcaagcaagcgtagcgaatcacatagaattgcccctacctgccagcgcgcagatagatagggcgggcgagcgcagggatggatgtctgagcggttgaaagagtcggtcttgaaaaccgaagtattgataggaataccgggggttcgaatccctctccatccgcgaggtcataagttctctcttgccttatctatagataagaacgaatctcctcgactcgactgatatgatggatggtagaaggttgaggttattgtgtgttgatttagttaggactttgtctccctttcgttatcttccgccccgggacctgtgggagctaagtcgaagatctcggtgtcgtcgtgagtggttgataaacagcgattgcagtttgatttagggagtcccaaccctgtgaagcttaacagacaaagaaaacgatagagacttccgggtattgggtgacgaccttaatgaatcaagtattcaggtggcagagttattagctacataagcgctcaaattcctgaatacttattgccctggcttctatgatcaacccctggcacatttaggttttgatctgaggctatcctggtctgcgggacccaacacaagtattcatcctttccaatctgaaaaaggtgttgccgaaagcttaccctcttccacacggatgctacagccgctatcacttttgctgggggggaattacagagttcgcctctcgacatcttgtttggtaaacggaatttggacccaggcgccctagtgttgcctaaccgttcggccggggatgtcggatgcgagatctttagctacttgtatcaatttgccgcagtgtgcttagatacaatgcgctggcagctgaggcttggcaggatgggagttaattagggtcgagggagcaggaaagagtttgttattcgctattggcttagtacggcctatacataatagggccatgacggttttggcaaggccttgaacttcatatatcccttttttactcaatccagaataccgataaagtcagattgaatcattttttcgagcaagaaaacggatgcgcgtgctaacgctttcgcgctagtgcgctcaatccgttgcttgtttggggacagaaaaagttccgtaatcgtcctattttttcgttgcatttccttgtttttaacggaagtgagaaatgcgtaattaatatatagatgtgatgattccatgaatctctgaaaaggtaggggtcaaggaccttatgggactgcaatcgtgcctgccaattggggaaggacgcgggcctggcaaccgctcggctctagtaagggaaacaggtatgtctcacatcattgctcgaagactggaaaaactgcaagttagctcagttggtttaaaacggcatatgtgagtgacgcgaactagcattttgaattgagaaagccagtggccggggtggtctatgttgttatggtatctctctttaaaatcgagattgtgtgggtgttcagtctaccgctcatgttcgacgctattatggaccgagaagaggaatcaacgaaaaacccaggaaagagctgcgaaagaaaagcgtgacgagcaaagtcaagtctccacgactcgacatgttagaaggagctaaatcaataggtgccggagctgctacaattgctttagcgggagctgctgtcggtattggaaacgtcctcagttcttcgattcattccgtggcgcgaaatccttcattggctaaacaattatttggttatgccattttgggctttgctctcaccgaagctattgcattgtttgccccaatgatggcctttctgatttcattcgttttccgatcacatatttcttggtgtagatatctctctttgcaaatagagataccgaggccccccaacctactagttgttggtgggggaaagaagagtgggaacgtgggcttctttcacagtgcgtacctctctttctcttctttctcgctctgttctggaaactaactacttctccagaagcaacgtcaacaacttatgcaagactcctttcgtaactacttttcggtagaaatacggacttcttcctatcaaactgcttttgcccagcaataataggcaagacttgattcaggtcaatacaatactcttcttcgaacttgtaagcttgggacacaagcgtaaactttttcaaaagtaagaccaggtacactgctaaacataagtataaagaggtggaaggccggctgtgcttgtgctcacctacaggtctgtcctagcatacagtatagaaaaagactgtctcttatttgtgatttgtctgaatcagcgtatattaactaatactactttatccagtcaataattaattgaaaggtcgtctttaattaaaaagtgcataagcaagcaaggaacggaaggcatgctaactacactactagagtcaatacactacaaaccaaactacttgagtaagaatctattctttttgcttattcgtaagcgcatgaagaaacttatttcactctagcaatgagcataaatagttgacaacatagttgtattaattcttattttcctcttcctactacatacacggctataatcgttatatattctcttcttttctttagactcttctttctgcatctcttttctttccattgtgagtaaaaggggacagcagtgggtcaagtatgttgattggtatcatactgtggcagtagatcctggtgtctttctctcagctttcagaagcacctttcgtgctctcgtagctgtaaggaaggcaaggagaagatccgcatattgtctttatgggtcctctttatgatgaggttgctaataagggtgggtaaagtagtcccaatgctttttccctcggtaaggaagacttatggcatctaaggtaggcaatttcttgtgttcgcgtttagctccttgaacaactttgtatcattcgataccactaagcagcggttaatcggacattccagagagttccttcgggaaagaagaagcctagcctaacattgaaataaaagtgccgtagagagagatcatttagtgatttgatcgtctaagatgaaatcacatagtatacggcctataatcttgcttcttttgcattcaacaagaaagagaattggtagtccaccatcatagtacctaagtttgattgaatagctctatttgtagtcttcttgtttttgagaaagtgctctagacatcggttcatcccgagcaccacatagtttccagatgcaagctggcggggaagagtttatggttctgagaggacattcttttgttattgaatttaggattgggaaattgatgtatgtcagtgaagaatgcaagttgaccaatagcagctatgaagaacagcacctgtgcagtatgtcatttataacggattgaccttgaataagccattgaaatgctatcaaaagatagctctgttgataagttatttgagttctagatgtctacaacttaccacactcgttttccctttgtcggacaaccggcactagcttgataaacgacaataactcgtatagccgtgcttgtaactaagctgtgaatggaactttccaaaaatagagatttttctgaaatgcagactattcacatcgcccttatgtgctcagaaaacactttattctcaatcgacgggacggatagagtaaagaacgatatagtgtgtgactatctatactcaaaacgcaagagcctgtacagcaaatcgttcagaaggcagcttttttcgaacttacaggggcgctgcgacagctaaataaagcgagcactcggcaacttcaatctcacctctaccccgcactgaggtcaaaaccatctctcgatcggggctatactactgagtcgaccaattcctctccgcccttctctgtctttacccgccgggagaagagtttgaggagcattgtcaccgaacttcactatactatttggtttggcatgacatcttcttctaactgagttcaaaagagtattgaaaagaatgaatccgggttttagcgctccttgaatctggcctatacgtagtgtaagccgcctgcggctgctaaaggcaaggtatgagggtgaaagtaagcgaagcccatcttgatatagtcaattgagtgagcctatcttatttagttctgtttatgcgtctagtgagcattgaactcctttgacaagcgcaatgcttctttatcgatcagttagacgctttatacctggttaaagctgaagtgacgataccagtgcctgccgaacttccaagccctcaaatatcgaggatatggtgtgccccgttaccttatttcaaggtgtaataaaggctctcccccgactagaaggatccagggacaacggctatttcctccaaaaatattggcagtagccgaaacgactggaaacccaggtagcggtccggaaagggcaaaagggcaaggtgagtagtgaaagcaagaacgttctttcgcatatagagcgacagcccagattcagggttacttgtccacaccaactgatcaggtatcggaaaatagggcatatttgtttcagccgggagaccccctgggggtctagttttaaggcgagtaggcctattgagatgcacataactaccttttttcatcttatcaccccgcctagcgactttgcaagcattacaggctaggcacctaacaacggttattcctccaacaggttattctgggttacgctaaaccttcaagccttctaccagcagatgaatacttaatctatcccctctgcgcacggaaagggaaagctactcttcacttcaagagtatatgccgaaaatcctatgtttggagatgaccatgaacacacagcttgagacccttctttcgtgagacagatgtgattccgctttcatgttttggattgagctttgtcactctttctatgcctctttctttttcttggaggaccttcccaacaacacacacgcggcgctaaggttacccgtggcaactgaactaggattcgaagccagaatgagcggatctaccgctccaggtcctttcctattcttatactaatatatgtaagttccttgcgtttagaactagaacgtgaggcatagtaatggcgcatgtgtgatattactattgatacctgtttagactgactttaggaaagcagtcaagcaggaatggaaaaaatgtcttctgctgctatcttatctgctaaaatggacaaaatcttctcttcttctctatgtcactaatcacagtcggagagacccatgagactttcttttctcccggcaggctctagcgctacggcaatgcttatggctgcaatccaaacagcaatggtcctcgcggatttagtgcacccaatccattaggggttcctgatagtgagattcctctagtcaagtctaaggattgagtatgagggatttcatccagtccattgcggaatgtatggtcacagaatagactcatcccccggcttatagtatgcagcttggaaggccttggattcacacgtctggtgctgccccgtcttctccgcatcaaagagtaaagtatgctgttgaggtggtaaaaaatcgactttgtttgtcactaaacctgcagcattcccgtatattgaagccgctgaagaagctattgagacttccttccagtcactcgaaatttggaatgctaattctgtttctgagggcggagctatgcccaaagatgtctgaagcttcgaagatggtagcaagatttatgctgaacagcccatatcagaaaggcaagggattgggcaagaactagcaaggaatattcgccccagtggaactcccttctgctgatgagagattttggataagagttcataaaaggcgctagccagtttcaaggtcaggaagggaaaggaaagagctgggtttctaacaaacacagaaacgtttcctttttcgtttttcgctttgatttcgatagtaaattgtttgtattcatcgcattgatttgaaaagtttgaactttgatttcaggatggttacgggaaatttcactctcttggctaattgtaccgtcctttcctctaggtattgagatccttcgacaagttgttcttcccccgaagaatcgtcaccaaagacattcttccatggtttttttacatgggggggggctcggttttgtaaaagattatgggtttgtgtcgaattattttattcttcttacccagtccttcggtggaatgatgaacatacaaagctcatgaataggattgacttccctagggcaaattgctttttaatgtttttcgggaattctttcaatcattaggttttatacctgtcggtatcggattcataatcttcgcgtggttcaaactgctcttcttcaaagggatagttcaagggcttgttcattatttcgtcgtctgatgaagaaccttcagtgcttgaagtctcctcatccgtttataatccaaagactggaatgggtttaatcatagccacctgtttttggggtgtgttagcagctaggttttttcggaggaggaaccctggtataatcaggagtattgggtttcttggcgttggatgaagtttcagccacctgtgaggaagagggttcagcttttccactccaaccatttttcaaggttgtcatttcttcctttgaaaagaagtattgggcgtctttatggcttatctcgtgtattccaaagggtctcagacccctagctattcttctttgtttaccattctttacatatttgaagcacgggagaaggaaaaagactttccactgtcctaaactaaggacgggaaggaagaaggcgagcatatcctctaaattgattatcctcaaatcagctcttcctggggtggggtattgtctgtcccgataaatagataattccaggagtaataaataggagtaaagtattgatataattggaattgcagaagcaaataccaatttactaaaaaaagaaaaaagtatctaatctaaagggctcattttcttttttaggatttaacaaaagggtttgcaaataaaagcgctagtgccacaactagtccataaattgttaaagcttccataaaagctagactaagcaataaagtacctcgtattttaccttcagcttctggctgtctcgcaataccttctacagcttgtcctgcagcagtaccttgaccaactccaggcccaatagaagcaagccctacggccaatccagcagcaattagtggaatgcctagtttgactagttggttcagtagcagaaacaacttatttccccgaaaaagacctagcttcttggacagctcaatccggtgcggcaggaacgaatgaaacgactagtggtcctcggaaccctacccgagcttatattccttgcttcaacgcccgcgccttccgtggaaaagtactagtgcttcttatggagcaagaaaacggatgcgcgtgctaacgctttcgcgctagtgcgctcaacccgttgcttgttgggcactgaacacttttcaagatccggttttggtaggacgaagatttttcactttcgtgaaggtcgttctgaggtggaatcgaaccactctgttaggatttagagtccaacgcgcaaagctaaagaggatttcaagtcccccgcccgccagaacctaaagattgctttatttttatacgatttattgagttaactaaaaagctggttcgttccatagagatcagacttagaaaaggaagctctgctaaaagctaaatcgctaataagttcaaacatcaaaggtacctgtctacatctacctacccgaagctactaaaacatcatcaacaacaacatcggaaactagatgaataattgaaacaatcgggttgaatggaattatctcgaggctattatgcgcaagcttggtttccaccaggtggaaaaggtgatgaaatgtgtgacgtcgatctctttttcggtgcttttcaatggtggccaactggagaagtttaagccaacgagaggcatccgtcaaggtgaccctatctccccatagtaagccagccaatagtaccctaacttaagaagttctcttagctagcgcatgtccattaatgtgaccaccgcatgctcctgcatgagtttcatgaatggtttgttttcgaatccattcttttttaggtatactatcttgcctcgagaaaggagctcgcaacaaaacgagagctttttgatagcccgttcactcgactaccacgcttagtaagtctgtctgcagggatgggaatggcgtagtctgtctgcccttcttcgtaagcaactggaactatcaaaagtcaatgtcaattggccttctaaaggctatagccctgtttcttttgaaaaaacgaatttcgagtttcgaagaagactggcttccaagaaagccactccgcctaaagagtcctaattcctatccggtctacattcactattcttcataggcactgcgctgggtcggtaggttgctgttttgacttttttcttcttgctttaatccagtcgctcgataggacttcccgtaacccgaaaaggttggttcttcccctacaacccctacccctccaaggcagtactcttcatcggcaaatccgaatgtctcgatccgagttgagacccacctacagaaattgatccatcaacggcttttttctatagtggcaggaagtctccaactcttcgatatgcgctagctaggtaatccctttacttaatctgatatgggatctcttgctaccagaaaggaactgaactggcttgcccggaaagaatggattgctacccttggagagctaatggtactggactgatagcgcactgattgaaccgaccccggacgtaccactggggaacctgtggctggagagaatctctcgcgatggaaagaaataaatcgaatctagaaagacgcgttctacctatgactgccatttgttcgcttttatctatcgtattggatagaattcaagtcccttaccgtattcatctattccctctcctttcagtcgagttgacctcggattctaaagcaacccacgggcataagcaaagaagttatcaagcttttgggatagcaagttatttctagggtaaaggcaaacaagctaacagtctaaggctaagtccctagagttccagttttaatagtcccattcctcctgccttccgccgacctgcggccttatcatagtagcccttctttcttgccagcgagatagttactacgaagtctgcatcgggagaatgggaataacgatcttttatatgatacggaaagcgaagagaatagactgctacatactaagttggttattcgtagatttttaccttcttggaaaataggaatggggattggcagggcatctactatcaactagttacttgggcaccggtgatacaccccaggataccttacctatttagacatttacgcctcgctgcgcgccttcccaacgagccaaaactatgcctaggcctcgggcttaggaactatactacaactagttttgtatagaaaacccagaaatacccatattcctttaaccttcacgaagaagttcgttagctccccctatgtcatactcctaaagaagttgtaataaaatgtgctgatccagatagatcaaatcctgattacgacttcttcattcggtttgtagccataccgtatagagttccaaatgcctttttttggaagtaactagattcaagcaagcatcctagcaaaacgatcttttgacaatgggctctgcccaacactgggactgactgactttatacagagatagaaaaggcagcaatccaagctctttttgaatcggatattggataggctaagctaggtgtagcccgctttctctacggttttgctgaacttgtcaagcccggggggcctttagggaattttggagaatgatagattctaggataacactttctaaggttgaaagggatggcatgggttaagcatctgactttggaccttcgagctaagttatttaataaggtcctactaattaattggaaatcctttttacaaatctcctcctcagagcgccctgtaaccttactttttctgaatggtacaccttatttaagacattcagaatagaagaagagcagtcgtcgattgattgaaagtggattgacggcattcatcagttgattgaaaatggacttttcttttatgatcgagcgaggtcccttttgggcttaaaagtcctttgagccgtggaatcccttttgtcttgatttaggagaataggcgcattgattaggttacgtggtttgagcaatctgcaggaagtttatttttttctttattatatataccattcatatttattattctatataccattcatattaaagtaagacggatagggcatatttgactaggaagcaagcaaagctagtccctccataccagctagcagtcttgtttagggagtctccttctttactgagtaaggttcccgggtgcctatgcgattattaaggcagggtgctactgtaccagtagtagagtggcttgaatcaaatcgtttgtctagagagggtgtagcgataaccaaagctgactgtactagaaactttagatcctgtataggcaactggccttagaatagtgtcttgaactacaggacaggaacgacccataatcattgacgaagaaggcttggaaaaggataaaacatattgaagagaagctttcacaaaggccaatagccgatagctgatgtcactagccttaacttctttatctacttgaaagctgatgagagtacggctttcttaaaggaagtgtccgtccctatgatattatatcatagtaaagagcccttggattcgcctttttccgtaagcctaaaggcaagggaagctcttcgtcgagcttcttatccattgaaaaagacagacttcaactttaagactaaaacctgcccctttattattattagtaagtaagataggttgcttgagccaatccttaaatcgtgggaggaaaaggcaaaaaagtgagcccacccgactaaaggaacggagaaattctgaacttcaataatcgaagagtggtcgtaggtgagcccaccccaggcaaatccacttatcgttatcttgctcctggtcaagctcccgtacccgctcctttccgtgggctttctttctgctttgacttgttccttttcttgctttcaggaagtcgtccttgacgagggccccttgatagccggtcttcgttgccaatgagaaagaaaggctcctgcttgtgtgcttagtctagccttgcaagcaacctcttcctaccagaggactaccatataccgatccttgctgttaccgcaaatcgatcaattcgttacttttcatcggaagaagtagcacgcaactcggaaagaaaaaacctctgatgctccttttttcttaatgatgcaactaatgtaatgcctagaactgatctattgcaagcccagatattcgattcctaacagaacaactcatgtgtgaagtagatagataagtagagttgctttcgctttgttaacttacgtaaggttgcgtaagatatgtgaatgtagttacgtgagcttgcttgcctcactttcctaatatattgttgacaacgcttgcaatagggcgtagtgttgcgctgggtcgtcttgttcggaagttgattgagaaaatatgcaggcgcaaattggatgcgtaaaccttggactcatcatagctatgctatggctatgtactagttgacgagcttgcctccagtacttgatagaagcccatgactctctatctgaaagtggtcttggccgtaagccgataggcgtagttgtagcgaagcggcgtatatcgtagttgttcggatagcaagctacctgacgtgataaggctactagtgccctccactcgtgcctactttcactaacctatagctattgcatgcaagctcaatcttctatctcgcattgctacgtgctcgaaacagccaattcgctcgtatagctaacgcaacctatagagtttggggagtgctgctattctttccaaatggtctctgagtgcggtctgtcaattcctgttgtagacatctgaggagagggggaagaagagtagacttactacttttgcaaatcaaagaaagaatttaaacagacatcaatcatctaatctgaattctttgacaattaatagatacctatcatagaaaaacctttctccaaggaagcttgcttcttgttccagatttgatctgatcctaaaataggttactttgctttccgctctatcggaaaacgttctaacgtattgattccgtaattctatttcaaaaaagagtgagactcaatctccttatgccatcccacgctaccgaagcagactcgctccgtctatgcgtcctgaacccgaagatagagaccccagctagacctatttagtttagttgcctcgggtgagctgaactaccagaactagttctttacaactcgtgccccggagccctctatctagaatagctctctctagatttcccagaaatgttaccagaataagttacaactgactatatcttcttttcccagcgacgcgccctcccactaagctctcaaccaatccaaggttaagaaaagaaagaaccaatggaatagttgcgaatagatcagtcaaacctcatcaagtccaggttttgtaggcaggtatccggataggtttatggttggaagagatagacacgaacggatagccttgtatgtatcggtatgaacaggtgttcaggtttaggaagagtaatttgaacagaagggctagctgcgcttattccgacaaggctgaacatgagttgctctcaaaggacttgacttctgaaatctctattctacgtttttcaactaatccacacgagaaaatcctatctttcaagctttctctcactaacttcgccaattgtccttcgctccagatggtcaatgtcttcagactagccatcagcccttggcttctgtacccttctttctaatcaatttagaccttaaatgaatagaactacccatttttttttctatgccttgtcaacttgcttggaaaacaacatgctcttcctttccaaaaatgtttttagactaaaaaggttcctttttatcttgtgcactctgatgtgcggggaccagcacctactacacctacaatgggtggcaatatttcatcttatttttttatgatttttctactttgattttacttggattatcttttcaaacatcgctcagagctcacgaaactttactttgatttgatttgaaaaaaaaaaagtttttttgctactagaatgctgctgagtacacagattcctctttcctttcaaggaacagcgagcgttttagggaaggatataggggcgaagcggctgctaaggtcctcttagactaaatagctttttatcaagctattatgatgctcgcttctcttcggtcctcgtcattaaaggaaattgtgcttcttcagttctacattaaaattgtgagtagattcttcagttttaagctgagaaatcttggatcaagacatacaaggcagcattggtcaaacataggactacctaggctaggtcattcattgcttggtccgctatattcgttttgtcttctagttctccacagggacttcctactactccgccgaatctctcatctgagaaagtaggtcacctgagtcgggtttacctgtggaatctaatgcattagggacagaatcccaagacgacgttggcgcagaagcaatctctgggtctctacctttagattacctggccatagaaacacgttctggcgaagatgaacaaacatcctcgggtaagtaaacttagagcaaagagaaagcgacaacgagatcatacttttattgcttttgaagttccttctactggtgtaccgggcacaggggatgttgcctcacctaactcctttatctccggcggattcgcatctatgtctctttgagaagactgccttgacaagtcaataatcaatcactagatttaggatcacaagccgatgcttcacgtcgaaatgggttagtctgcatctgagagaccccgcctagctctaaaatggtttcaacctttcctcgaccggaagcattatgatagttttcttcggctagaaaaggaagactcatagtcgcactgggagtgaacgatacaaacgatgaagctcccgaattggcataattgatgtataagaagaaataggatctgttgtccttggaaccgggcgcggccctctttccgctattatgagcgggttttgggttagccagagcgggccaatagggataaacaaagtatggaagtagttgtgaggtaatcagattgaacaaagcgtgctctcgatgctcccgcagttgactcatttcccgacgttcttgttgctcgaagcaagctccaaaagctgtgcttaaggctgttgttgttcctgggctggattcgactggcgagatagactacttgtttgcgactttccgtgctttactttcaaccgcgatgaggtcagcgtttcttagcggataacnnnnnnnnnnnnnnnnnnnnnnagtcgtaagatgaagtagcagatcctgaaccagctttggacatagttctttctttttttgattagaggaaagacggaggatgcttgccttgcgaatttgcaaaggactaacgagattgtttctatcgccaagatgagccgcttcgggctcaggagactatggtggtctatgatcaaataactggtggtgagactgcggctcaagtccacgtcgtgagaaagactgagctattctgtacttttctaaccctttgaaggatgaagatggcgaaggcgcgggcccatgataaggattcccaagcctacttggtcgatttggttgataacttttagtatgcctagggcggagactttgcatttccatgggtagagcactactagaatgttagccattcctattaggttactgagctcaagtagggattgtagcttcgaggacgttgaaacccgtcaagaacagctagtaaagtgaatggatcatgagccaaatgagtgaaacaatccttcaacaagagaagacaaaaagtatgaccttacactcctgtgcattgaatgaatagaaataaccaggattcgccgccagacgaaaggaatgaaacatgttgtgtctgtttcagatcgagattgtgatgtgtgatgaacgcagctcggttcttccaataagccaggtaggcgggtaattctctccgtatggctggaagtgcatgctctcacttcgagtttcaattcaatcttatcgcaaacgctctacgcctcgtcgaataagagtgtttctggatcatatctattcttctcgggtactctttcttaatgagaaaatcataacttgatctgatctttatgtcgcacagtggtgtcccaggctagggctgcaggtccagcataagaatctaaactaaaaaagtatgtttacgtggtccataaataatagtgacagaaatccctcctactgcgcctcaacttggactggagctttcgggtctctaggtattgaattaaagaacgggtttagctttgctttggggggagtcctggtggggagatatgctagcaggtaatggctcagcttctacttaaaaagcgttttaagcgggtttccttatttatttgcgggtctctcgtacaagattctatcagttacagcggattcaagggatggagccagatctactatccgcttgctgtccctaagctgataattgcccgagcctatttgtttttttccggggaggggcacatagcgatagatactttataaacctatcactaagaagcgggctcactgaaaaccaaactgttcgtatttctttaaaacgctgctgccctagccgggggtctgtctatagaagaagggaatccagaggaagaagcagctccccgaaggaatccttctaactaccacctatctacctcccgcttttgttcggacaaggcgagtttcctaagattcacccaccgcggatacactaagcgttcttcccgttggtaaatctgattcttgcaaatcaacatcagacttagaagcttcatggggtctggtctcgccatttggcaatttaagccaaacaaaatacagtacagaggttataaccaatacacaagcaggcgtgaaccagtcagaaattagaatggagaagtagacacagaagaggaggttgttgggacagtatcgatagccgccttttcacttattgctaggagtgattgtgagagaatacataacataggtgaaagccaaaaggcatatatgaccccccaatggaagtgatttgaaactgacgtttctttagaattcgattaagaataagaacatagaccggcttctagaaaaagagacgtgccctcttctctatctgtagattcaggagcaacatgctggttccttttgtcataatacctaacggctgtgggcagaatgaatgaaaaagcagatgaaagacactatacataccgatagaatgataaatttagaataaagctaggtgacatcacggcatttgagaaccaattgcttcttttgcttttcaccaaccttcatgtacaatcttatttcgtattggagtacagcctatcgtaggcccagcaaaggcaagacggaaagcaagcattaagtgaagaagcaaggtccaaacaaagtagtgaaagattgacattgaaaagcttctccatgtctatatctgtccgatggaccaagttcaaaggaaacggcttctctactgcatcaaaaaaccaatccaagcctgaaaaggagagttgcggttaacgattcctataaattgagaaagaagcatgttcttcatgcccaaaagcggataaagtagatggaacctgttctctaaccttctttttgtagcagatactgcataaagtttacctgccttgtaaggcttttgtaggattaatcaaatttgctttttctcgttctatctcagagtatccattcattcgatcttgctatccgctctcaattgaatcccttctctgttgtcgacaggtgtgtccgcatcaggaccagaatcacggtctagtacctccgtactcgaatacctcctactttattaattaggaagtgaagtagggaacggtttcctattcaaagtacagtgcctttggtacattggtgcattggggatttccaggtagcaggtcggttgagtgagggctccatccataacagatatagctagcgcacaggatctcccttctgcgaacaaaaggacaaaagagccgggtcgggcgttgattcgccgttgctatcagtcggtctactcgtgcctgctgcttactttctcgatcgatggaatcggtgattcgaaaaacctaacatccataaggagtctcaatcgtagctcactcgttgccttactctcccacaagatcacactaaatacaataggtgcgtgatctactagattcttatataatcaatttctcaccttagttgatagacaggaaccaccatcccataacaaaaaaggggggcgaaggttattttgtaccaatgaagacggatttctctctcgagctgctcaaagatctttaagtggcttacgaggtagacttgatcatgatccatatccaaccttctcccatctgcttctgcctaagtatttgttttcatttctttgattgaacattccaagcttcctttctattatacctaatgcccatagctagttttattttatatttgtctattctttttgaaaaagctttatccgccccgtgcgagagagttgaacaaatagcatagcctctgggatgttggccctagtgaaggggagctcttcgcagctgtcagtggaaagatggaaattggttctaaaagagccgagctagggataagagatacggttggttggctgaatggaaggaatgctattctaatgggaaccgggaaaagaatggttcccaatacagggcccgaagaagagagacgaaagaaagtagtgaaagaagaaataaagtacgcggataaaagtgaaaaatcacatagctactaagtcaaaacgtccaatgagaatggagatcaagaaggacatgaaatccattagcagctctatcagttatttcattattggcattccttaaccaatagaaaaagaaagagatcacaagcgttatcagtctccagacgcatctatctataaaaaggagtagggcacctgatatgagatacatactggagtcaaggattgagaccactagtgagaaggcaaagaaatcgtttttatgtatcggaagggaaagaaggaccatccattggcaagcacttaaggacaatggctggattaatgaactccgacaactgctttcccttgcagcacgttgccaactaagctctcttacgtaccaactgagccacttatttacaacggaaaggtaagtccgttaggcacaactgcaaatggagtttattaccttagcattcccaactgtaagggattaccttaggacaactggaaatgggacgggggaggcttgagcaacaaatctttcagcttcatatgccgccgatccttgacaggcaaaagaaaacctctattccgaggctagctttcttccttgtttggtggggctctccgcctttacctgcccgttctttccttgccaccattgtggtgccggtctcaccccctctgctgaggaatcaaagatcctcttcttcctgtgtacctctagtgactcgactcgtgtcttggaggtccaaatgttcctatttgcctttgcgtttttgcgcctctagaagcctcatcgctttttcacggtcaaagttcaagaaatagggtttctgatcagcagaaagaatgaactgtagacccgctaaacagctgcaccaagaaaaatggctctttcggcaccctcaagaatagcttgtgcgttggcccaaagaagccctgggtaaagctcgattagtacataaaaaaaggaccctccccggggcggaggaaacggcaaccctactgcattggaacatcgtctcctcaccatctccctccccatcgtctccttcttcacttccccggaactgcacatcaggattcttcaatccttctatctggcctccgtacccgtagtggagtaccttgctactttcaatattcaagtcattttcattgtttgtttttagttttgttgtggagaaagagggctacttaggaagcaaggtaactctatcaccttccgtccgtcttttcttgaacatttgacttcgcgaatcctagcttttataagggaaaaccaacatcacgtaagatgaggcctatccttcccgaaagcgtcggctagttctattctattctaacttgactgacttcctctaaaagaagagttaacacggtcgaaggtcaaagcagaaagggtttgagcttctttggcaacttagctattctttggcaacagagctattgcaatagagaaatcgagggaaataggcttaacctacagagaaagagtgtaaggaaagaatgcagaaaaagatagaaaaagtgagtgaaacaaatgaaatcagagtaagaaatctcacaaatagtaggttttaccggactagaacaaacgaattagcttgttttaactaaaaagcacagttgagcaggaacgaagtgtgaacataggcacaaaaacaacgttttggtgatcctgtgtagttgcttgctttccgcttgagctactttcactgtgaagaagaggacttcatctcttcacttacccaaggaacttggaaataacgcgtctggcttggaaagctagttagggatattcgatagaggaaggacccgtttcgagtagtgaacgcaccaagaaaagccttttattttaagccatgcttggtaacgcacatgtcctactctacctgcatcgggactggtgagagccggcgatgcacggaattttggaaacgctctacttcactaaggaagatacgtttcacttttccgatcggaattttaactctggctggttcaggttacagtcagaggaaataagaagtatggtaagatgaatgaaaggcaaaaatataggacatacgctttatcgcagaacatctatttgctttctattcgacaagaaggacaaggaaaagataatggatatggaacacaggtcctggcactattggaaaatgaagctctctcagttcaaacatatgagattacttaccccggtttctaagggcggaagaggaaagtaccaaggtgcactaggtgagaagaacttttttcgcttttttatcggaatttgactcattttagtatagaaaaacaccattctatccgacctagtaggaaaagttactattttgcattccttagggaaagtggcattttcaagggtcatttttgaaaagcatttgtcccaaccatgtgcaaaagtaaagaaaattgcttctccctcgtaaatggctccaaaatctgctccatttttgaaaacttgatagccagcatggggcaatttggtagttttttcattttgcttgtaaatcggctctttttggcatcccagttctgaactttttcatctcgcctagtggaacttgagactttttccagtatctttatccagcagcaggactttcactactttcccaagtaaagctagtgttaagagactggattgtagaagtgttgactgacttgactggaaatataatatggaaagactgatggactgactgaagtggctatttcctgattccgatatggcgtcctgaatccgatattgcttgattgtctgttgatgcccagccgaagaagtgacttgcttaacgcagcaatttctgttttcttgtgctctccacctccgcttgacactctcgtagtagatcataagagaagtattctttcaagaaattcgtatagaaagatggactagctcgagaacaagcaacggattgagcgcactagcgcgaaagcgttagcacgcgcatccgttttcttgctccttggcttcaaacaatcgattgaatctggattcctttgcttatccttcctggctatagtctctcttgtgccttcggcagttcagttaaagatttctgtatcagcagtttgtttccccatttgctcaaagaacgcataaaacctgttccctcaccgtatcaaaagatcaagcggaagagtcctcttcttcaagaagagtttttcatttcactcttccgcagcaatgcccgggcaagaaaacaatatgagcaaatccgcaaaacaatatcatagcaaacggtatgtgctggttggatagagcaatcagtagttgacgttcgaaccaatcttctctctagtagactttagattcagtcgtccgtttgttttgttttcaattgacatagagaaatcttcccactacgtaattaaggaataggtggcgaaggcccttggcggactatatataaaggaaaggggttatttttcctttacggcaataagagctgattcccttgcttgtagtttttgatcgatggagtgtatttaacatatttaagagtggttaggagagagaatcaatgtttagtagtaggcccggttcaccaggttctaccactgttcggcccaatcatagtcaaaatct

SEQ ID NO: 633 - DNA, 3488 bp, Oryza sativa
ctttgggcaactaagtgatttttaaatgcggtttactgcaaaacttaatccctatattattattcccttgtacttcccttgcattaatcatgcacctccggtgtggcttgctgagtactgtggttgtactcattcttgctctatctttctccccccttcagtaagagaagctttggagaagaagtcttaggtggagtcttggcttataccccagttgagcgcctgtgaagatggagccgtaggccgctagtccgctgctgtttatttttgcttgtcaggcctgaagtgcctttgtaataatgtaaatattatcgatataataaagatgtgtcttttatatcatgtttgtgtggtgtaccccggcttttcctgggatggggattaatacactagcgttcgggaaaaggcaattttcccggtcgcgacaagctggtatcagagccaggttgactgtaggataagccaagtggataaaacctaaggacatattttatgaataaaactatttgcgaaagttcctttttctccttcccctaatgctatttgcaaaaggtttactccgttcttccttcttcggattttcaactagtactagatggtcaggtcagtgaagaagaggacatcgtcagttgtttgccgaagctccagaagactgcaggatctgctagtgaagtggaggaagcagtgaagccagctgtgaagcaggagtgaagatcttggagaacccgtcgcagaacctaagccaccctctagtgtttcgtttgtagtgtgtttccttgcttgtgtgtgtagcgcatggtttgcatcggtgggttgtgatgtgaccatgctaggttgtttgtttaatcaacttgcagaataagcctaacatacatcataacagcaaaagacttagatctgttaaggtcctatccttagtttctaatctgtctctccccttcgttttccctctctccctctccaaacctttgcaacagatggctgacaatgagaaaggcaataaggtcagaagtcaggacattggtacctcaagctcccgagtgaatgaagcaccagacaccagttgtgtggcagtggtccaacacctgattaaccagaacaaattgcttatagagatactacagcagcatcggatgccaattttgaacccgagtcagatgcaacctcaagtgcagttggaggcagtccaagcactcacaccacaagtcagcgcaccgccaacatcccagaaggcccctcatgccatgccgcatgttgacccaaaagaagcaagtatcatctgttttatgtgtgatgagcaagggcactacgcaaggaactgtcctcagcagaaaagaaaagcaccaatgcgaatcgaagatgaagtccgtaagatgatcattaccagcacagaatggcctccaccaggaatgacaaaacatcagagaagaaattccttccgaggtgcacaacagttgacagagcatcttttagctaatggaggtagagtgtctgatagcgaagattccgatcaagtctcctcagatgatgaagatgagaagtctccccaaggttttaaccagaataaaatggaacgtaaggcatgctctcgttgtggagaaatcggtcatgttgccagctcgtgtgccactacctgctttcattgtgaggaagaccgtccacccggtgaatgccccatgagcaggatcacttgtttcttttgtgaaggaactgatcatgtaccaaaagattgtcaattcagttttctgctgacgaagaagatggccaaccaacccaccagttccaacggagagaagcatcaaggcaacacaaatccccgccaagattaccgtttcagcctaactccagtgccaggacagaggaatcgaaatgagaaaagaaaatgccgagtccgggaagacatctgttgcttcaattgtcaaggaatgggtcatttcgccgacaagtgcccaaaaccgagaaacatagctgccagcacgtcagtccacgcaactccctgcaatcagaagcttgctcctcagcgaattgtcatccatgcatcccaaagcagtcctatagcccgcgttgcaacagctccaactccagcgagtgcattaccacaaggtgtcaatgctcaatttcagccccagccatcagttgacaagacagaggccagtatcggcattgtacctttggatgttccagcacagcagccaagaaatcaagtacaggatgaagaacccaagcgtaagaaagttatttacaacggtagtacctgttaaggaagcagacgtgccaatcgccaagtggtcactggagcaaatgcagtacctgttaagcctagcgctagtcagaagcaaccataatactcttatatcagtaatcatatacttatgttttatagttgttccccgtcaatcatgtaataacagagaaacatgagataatgaatgagcttgataagtttattgagggatccatgttagggttgcaagtgctgtgagttgtgtacattttgttgctgattagggagacctagggtctcatttccgtaagctcataatcttttatgaatcaaataacctagcgattgatggcgaagcaaatcaagtgattaacccaagagacatttgtttggactaagagtttcagatgtgtctttttcggatcaaaggcaatgacagtcagtatagcttttggcgaaacacttcaaggtttcactgaaaggtagcagaccaaaggacctcatcgccaccagaagcatccacaactctcggagtgaagagtacttagtgaccaaagtcaaaggatgactgatagaagatatcgaaaaagatgtttattaccaggcaaagaagtaggtcgaaaggtgattgataagagaaatcgggaaagaacacatcaagggcaaaggtgtaaaggaatacgttgaatgctaaatgatgacaagcatggtatcctagtaatgacgagctgatctcgacgcatgacatgaagtgggtaacttgtatgaggttgactccaaagatatgaactatgcaaagttctggaactgaagccccatcttcaagtgccgcaacccagtcgaagtcagctaaaggttcaaccagggacaagtcaggtgaagagaagattccatttgcaacaggagatcgagccaagcagttcggagtggagaagttgtcctaggcaagtttgttacaaaagacggagcggaagaagtcagacaagaagagaggaccgccaacctatcttcttgctagcctcttcgaatctcggggacgagattcttgtaaggggggtggatttgtcacgtcctgataaattcatcccgaaataaaaatcattcgctaaaaggaataatagaattaattaaaattcgaaaagaaattggccaaccctaaaatacgtacaagaaaaatttgaatgtgggccggaggatttttggttaattttccttggtttaaaaggagccttcaaatttaacttgaattttcagagcaccggaa

SEQ ID NO: 634 - DNA, 647 bp, Oryza sativa
atatatgtctagattcattgacatatatgtgaatgtgggcaatgctagaaagtcttataatatgaaatggaggaagtataattttaaggtctcaacttacctatcatccttccagaatgagtggtgatctaactcaggtacaacaagtgtggcattcaatattcgggcgacaacaacagcatctgttatctggaaactgaagatcgtaatggtaatacaatggataatacaaagcaacgcaataaaaagttgaaatacagttgtacccctatgcgctgctgatttagtcccccgctagtaccaatcagcaagtaaccagtagaactgttctccggcacagcagctgaaagatgaacatatggaatcactgtgttaaatattcttccactcatctagttataattgtccaaaagggaggatgatttaataagcaaactaacatctgaaatttacgctcctcctgctgcagcgttatgggcggggccgtttcgacgttcccgtgtcactgtgatactcgtcgcgtgctcgcgctcgcagcagtccaacagaatgcggactcgcccaatcatggtacggcaacagtgtaggaatatatgtactgtttgacgattatgcaacctgcagtatgtggtggttgtaacttgtag

SEQ ID NO: 635 - DNA, 2079 bp, Oryza sativa
ctcagcgcatgcccttaacctgaaaacatgctgatgttcctaggattacaaactgatatagacgtgtgattgtacaggaactgacaagacaagaaggcttgatgctatgaatagagtaatttatgaagttttcccagaaccaaaccgacaacttttgcagaggtatctaccttggatgttttttttttttttttgaaattacacactttgtgtatgtctgaggttttcatttgtgaagaaccagttctcattttttgtagttctcaatcattttattatgaatgtatgagttagctttagattagactgtagtacaataatactccctccgtttcatattataagtcgtttgattttttttcttagtcaaacttcattaagtttgaccaagtttgtagaaaaatgtagtattattttcaatataaaagaaacatattattaaaatatatttaatgttaaatttaatgaaactaatttagtgttgtagatgttgctagttttttctataaacttagtcaaacctaaaaaactttgactaagaaaaaaaacaaacgacttataatgtgaaacggatggagtagcttcatgttccacctatggattccaaaactcactagttttcttttaggactcttaagatgatgcagattgttgaatcacacaaagctgtgaataggatgtctcaatctgctttggcggcttgcatggaccactccttctccgacctcttcttctcggtgaatgtgaaattgatagcgactttagtatggctggggatggttcattccagctgcttcaagctgcagctgctgccaaccatgctcaagcaatcgtcatcattatgctcgaagaatacgatcagatatttgatgtatcctctttttcctttacatgttcctttctacacagtcaagttccatttgaagttatactgcattgactcttgatggattctaatttagcagttacctgtataggacttggaagacggttcctactcttcagatgcatatactgagtccgaagacggtgattttgacaaggaatattccacagacaacgatggccctgaagaggatgactcttatgattctggtgaagataacattgaagaagacatggatgatgatactgagcactcatctggtggcagtgaatgtgacaacaacattaagaccagtgtctctgatgacaaggtacttcaactagtcatcgtttttccaatcttaattacattgaatgacctccttcggtcattctggcaaaaaactagtcatcgttttgatttcaagcattacagatgtgttgtgtctaaaggtccagtaacgagggagcttcccttgtgttgccttttatgatccggcgatgcgtttttttgttgatttcagtggttaactgctgaatttgtgttgtaattgtccttctaaatggttagcatacttggattaacttcttatatactatctccactcctaaatagaagtttttacgagtttgatcatttttccacttttgataacgtaatataacattgatagtagaacatgttagtttataattttaaaccaataataggcttaaatgtttgaccatgctaatggtgaacctgaaatgtatgcaaactagaatatactgaaagccagcacgagactgttatgctgctgcaattgtacaaagaactgcagtagctgctaccccactgtctgctacagttttttatgcttttagatcaccgatatgagcaattcttaggttacctctgaaaaagtatgcccaaagttgaatcagtatttcaagctatatgcccaaagttgaatcagtatttcaagctaacttagaattgaagtgcaaatctttcatagggatgcttgtaactttgttctgacatgaaaagaacgatctgttcacagtagctcaatgatgtgagatgtgaaaatgaacacgaccatcgactacatctccacaactttgtagaagccttgaataagtaactgacgtggttaagtatactgattacccagaattacatctttgtgtctctgacttaatgcaaatgcaatttctacgccacccttacaa

SEQ ID NO: 636 - DNA, 601 bp, Oryza sativa
agaaaaagtagaaactaaacaagtcccattctagattaattattttgagatagagtcagttactacagctgatctggatgacaaccactcggcaggtgttgatttggagtaaccatcgttccatcgtaggtggtaggcctgcatagttaactgatggcatcccaatccaagctcaacagttggtgcggggtgtttggatggggctaaattttttttagtctgtgtcacatcagatgtgtagacactaatttggagtattaaatatagattaataaaaaataataatttcataaatgagagctaatccgtgagacgaattttttaagcctaattaattcataattagcaaatgtttaatgtagcatcacatagactaatcatggattaattagactcaatagatttgtctagcgaattagtccaaggttatagattatgttttataattaattcatatttaatactctaaattaatatttaaacatcttatgatacgaactaaattttagtccatctaaaccacaaacttgcggagggcctgtttgtttcacggcgactggggaggcaagcttgaccagcaatatatagctgctcatttcgg

SEQ ID NO: 637 - DNA, 611 bp, Oryza sativa
acatgtgggcgtaggcctgttaagcagaaagctcctatggtgcttgtcgattgggtgctcgactattggcgcagcggttcaatcatggaaacagttgatccaaggctcagaaatggctatgccgaggaggaggttgagcttgtgctcaagcttggcctgctttgctcgcatccactggctagtgcaagcccgagcatgcgtcaggttgtgcagtacctcaacggcgacagcgatttcccggaactgagggcagcgcaaatgggcttcagcatggcgactctgctgaagaacaaggggcttaacccagatgctatgtcatacgcaatgacatcgtcatcaagcatcggtactatgtctagtactctctcgggaggaaggtgataatatggttttgtgttgacagatgatatttactacaaatgatgtaggagtatgattgtagtagtactagtggcgctaatggaaaattgtactgtaaatctgtaatggacagcaaaattcctggtagactggattcgtggtagacatggaagttttataggagtacaaatcaagactttgctttcgcatgggaaacatccggagtctgattcttagtgtacagtgtatat

SEQ ID NO: 638 - DNA, 2545 bp, Oryza sativa
cccattaatgggaactaggcgagcaccatataaaatttctacaaagatagttcaaaggttcttagtcaaaaaaaaaaaagttcagaggttcatcctacagatatttttcagagatcgtttaaatcttcaatatatactgtggtgcaaacttgataagtcactaagtcactttggaccaatttctctttttcaagaataaaagtttgcacaatttgaagggaaaataaaagaggcattgtacaactgccacaagaaatctgcgtgtgcactgtttgatttgttagtaatttacactttttcacatgtacaatcatagttagttgttacaatttgagatggtctcagagcaagtttatcttctcgtgagcaccgttgcttccccaccctaagtttcaatgaccagtaataagatattaatcagagacagaaacacggtcgtcgtcttgagtactatgatcttccgtccaagctgttcttgcatgatgtgttgtgctcaagctccccatggcatcagtcttctccatccttgaccgcatcttggagttcagagaagtccactacaatgttgttctccatggcgatctctttggtcaccttcttcttcagctccatgctgttcaattgccagaaaacctccacaccaactgcaagacccaactttgttagctctccattcttccatctttacaaatacaaatcattgactcgtgaaatgaatggataatatatgctatctagtaccatgggatcaacaatgccggtgccgtcctttgccgcctcggtgaagtcgctgccaaacttgtccgcaaggatggtgcgcgcgaacggcaactccggcaattcgccgcaccaaccggcggcgagcatgaccgacgcggccgcctcacgtatctcatcggtgcactcactggacacaccaaatacaattgtcatgtgaccggaaaagagatagaggacgcgatcaagtctagtgtgaggaaatgaaatgtatgtacccaggcttgtccagctttgcagcatgctcgatgagtcgcttgcaatacatctctatcatttcgaacgcctctaacatgttgtcctcccctatgacttgctctgcctgtgaggagagagcaagacattgctggcattagcacgcctcgccttggagcaatgtggatccctctcttcatcagagaaggtcgtagacacttacccggtggatggcgcgatcgaggtggtcgagggtgagaagctggcgaacatcatcggtggcaatggatttgcgagcgaggtggggccggcgagcggtggcgatgcgcaagacggcgagccccaggagggtcttgagcttgctcgtctgcttggaggtcttccgatggaggaaccccattgttaagttatcggttctcggcggcgttcctgtcctaggctgttggttatatgaactccgaccttatcagttgtatggtcagttcctttgcgtgggggaaaggaaggaggaggagaatgcgagttgcttgtgtgagctgatggaggaagtctgcatgaaggggcaagggttttgtagggccatgttgcttctgttctgggtagtttaacttttgtgtttgttgcttcactttggtgtacatgaactgtcgtactcctttcttgcatatggaaaatattgggtgggggagcaattgagcatctcctagagaatgtcaatgagcaaagcatgcagaatgcaatgagaagacagcgagccaaacgtgcttacgtgcaaagaaatttaccgtatgtaaaacgcaaacaacatgcagaaacaccaaagccagggtaatgtgctgctctgcttcaagcagttacgaaaggaagcacaatttgtgcgtggtgaattttattttaagatggtacagtgaagacgagcaccgcatgcacggctgagatagcaactagttcagtagttttactcgcagataacaaagccattacacatctaggcacttatgcagagtgccatttttcaggtgtagcgcagcagcagcagcagccgtgcatcgatccaaactttgtgcaaatagcgtgcagagttgtgcaattcatcgatcaccccgtaaagactcagttaacccgtctcctttcgcaaaacggtgattacaactcctttgtacaggacaacaaaaaaaaaagggaatatatcacctctgtaatttgtacattctctttcgtttctagcgcaatccattttaattatacacatttgatttcccagaggcagaatatcatatctgtatctcgaaagcagatcctctaatttaactgcacatgcagttgagtcactgacatgactcaactgcacagctgttaagccaggggatccctttccctgtatctccagggatcccgcgcgacgaacctccggtttgccagcaaaaaagcaacggcccccagttctcctgcaccggaattcaacagctgagctgactgaccaatgcgctgcgccgcgccaaaaccaacgaccggaagacaccacctcatcttcgggtgcgcaccgagttgagcctcccctgctcctggttca

SEQ ID NO: 639 - DNA, 701 bp, Oryza sativa
gtgctgtgtaaacactatagtgtatggaactaaccatagattactcggatataccattagctaatggctaaaacacacaaaaaaactgcgaaggaggaagaaaacatacccataaaagaatgttcgccatccacttttcagcctctgataaatgaaatagatatttgctgcacaagagatggccacctggagagttggcccttcttcagtagggaaaacaagggtaagcactccaagcaatacaaaagttattgctgtctgccaaatcactttactagaaggtgtttgaaatcttccctgaatagccttgactggacgtgactgagtaagttccctatactttttcttgagatccacttttggtttttttctatcagagaaactctgcatgatgattctgtcatgggcagactcaattgcatcaacacttggcttatgccctgcatacttgtttatcagaaaattcctggcagctcgaatttcttcttcagatgcttccctgctgattccaagtcgctgatagggatccttcacatggattctaggaaagatggctgaagaaattaagcggttaaaaagtgaggtgataattacaaaaaagaactaatccaaacaacaaaaccgacaggacaataaaaagtatatgtgatctcaaataaaacatgagaggaacagattgtgagaaaaagtatatgtgatct

SEQ ID NO: 640 - DNA, 942 bp, Oryza sativa
actgcatcatttgtgctgcaagcatacacacatatagcatggttattacatctaaaagaaccgcggtgtatttatcatgcactggccaataccagtctacaagcaaagcatcagaaatcttcagaaaaaaaaatgtaacagtaaatgcttgacagagaggattttttccccaaatgcattgaaagaaataactttcagcactacgctcctaaaggatgatgctagtacagttacaggtagctttagactgggattctaaaacaaagaattcactgaacttgactccatcaaatccctaacaatgtactacatagcaaaataaagactgaccaaataaaaatcaaaataagcctggttcctactgtcagtgtaatattgcaggaaatactgatgtattcattggtcaataagttagatcctaacttgaaataacagccagactacagcatacaatgattaaacatatagtggaagatatttttgatagcaatggaaatcctcgcccctcatatatgtacagattagagagtaaagatgttgacaaatatcttgcagacttccctgctcatattagtgcgtggatgtttttaacaataagtatctactgaatgaacagtacaaagtagctaatcagtttctgtgattaggctccatgcacaattttccttatatattcttatagcatgttatggaactctctggagctctggtttgtacaaaaatcaacaatgttcaaacacgaaccggaataccgcttgaattactattaggatactggcatataatgatcaacttacaattgatgaaggcaatcattcaactcttttgcttgtttgcggcattgccataccaccgaaaaagttctacctcgagcacactcagcatattttgagcagtagaaatcacactccttaagggccttctgcttcattttgctccgca

SEQ ID NO: 641 - DNA, 1316 bp, Oryza sativa
cgtttctgaccactcaggtcatccatctgccacataggctgattctggttacgattcccacaccacaacaacttttcacaaagcacaggcaaacaaatctacgcaacgggaaccacctcacatccgcccatgaccgtgggcacggctgttcgaacagttagttaacctctgcagaggggtacactttacccacaagacacgaacttactccagacactggccggtgtcagaggttcgcagacaaagcctttcccaagccgacccagggatacctcatgccacatagaaggatcaaatcctcacataaacataggccattttagttttcacaaatcaaactccaaccacctcgatcggtaattcaacaagcttcgcgttcttgcattaccaggaacccgggttggctccaaccgaccccgccccggcgttccccaactattggcatgcgaggtttccctgaaccgactagttacttagctagggtgtcccattccaccttgtggttgcactttgttatgattgatgagtttcccacaggaatcggtccttatatgcgaatacgggacagcgccacgcaggcaccacctccgcatcgtgagttttcacaattcattttatttttaaacacaccgacaccacatgtcgggttttcaaggcttctcaaacccatttcccaatttttcgacaatcacggtgtatgtgggatatttggtatacgcgctcagagagcacggataccgaggtaccacaagagtggagcgacaaggaatcagggtagtacaacctataggaattagtgcgactactgggtaggtccgtcggtttggcacgcaaaccgaggccaagcaagttaagtgtgtgattctaataatgcaagttgcaaacaaaataataatgacttttcaattataggggcaattgatcaaagggtgacttgccttgctcaaggtcttcacgaagcttcacgaatcttcgagagaacccgcgatcaacgaaaaccgataaccgcaactatacgcaaacaatcgaaaacctaaacaaaagaccaaaagaaatatcctatttagacctattagtagtgccattaaatagatctcaattttacggaattactggaagtggaacggaggcgatcggagctacggatcgagggatatgaattttggaggtctaaatggatttcctggacaaggaaaaggaattattaattcccttggaaaagaaaaggaaggagggatcggatttagacttcctcgggcgacttaggcgcggcccgagggattctcaaggcttggccggccattgggccgagcgcg

SEQ ID NO: 642 - DNA, 1350 bp, Oryza sativa
aggttcagtttgtcaatgtcggggtttttgccggttttcctttaattaaccgtgctgttgtaaagtttttgggtccggtttcccttataaattgaatcaactctcttcttctatagtgaattgcaggagctccctgcctgtcccctcgaaaaaaaaacacggagcagaagcaccggctgatcaatggccactccactcgatgcaattgcaaggtgaaaaaaaaaaagaaatggttggtagtagttacagttgtgctacattgaccagttaaaactttgtgagattaaagtcgttcgaatcgtcttccatgatattcctcccaaaataaaaggctaccatattcagtgcagaatatttggttgttctcgaccactttgagcatggatcgattcaggctggcgttcatccgacgcagctctagtcagcttgagactcaagttaatccctagtgatacaataccattttatacctccagaaaggaagaagggagagcccctttacagctagaaattttaatcagtgaccggtgactaggcagctgcatggtgtcgaaacatggattcggcaataataaaagggggtagcgcacgagacctaaaagtggatggatgcggagacaaaggatttagacaggttcaggccctctcaatgagaggtaataccctactcctgtttggggatttgaatccgccgggtgtgtattgatctgatgatcaggttatgtcatctgccccctagagggcctcctgcccaccttatataggatggggggcatgattacaagatagaaaccttaaccaatacggtatcggtttcctaaatctactttacaatattatcaaaccaggactttaggccgttccgtaatatacaaggaaacgtaatacccgagtcatgatctattacatattccatagatataagttatcccctatgactagtcggataaccatgccgtatgggtatggggtacccacaatatccacacatggtaatatatattagaggatataagggcccctttgaatcgtaggattgaaaaaacggaggaataggaaaaatataggattctgataagaatgcaagtataaaacagaggattgcaaaacacaggaaaaacacaggaatggccgtttgattggaccacaggaaaaacgcaggattcagatgagagagatagactcaagagaagttttccaagaaattggagtggatgttaaatttcctacgtttttcctctagaatcgtaggaaaaggaaagtttcctacgtttttccttttctcattcctacaaatcaaaggtatgaatagtgtaggatttcaattcctttgtttttcctccatttatc

SEQ ID NO: 643 - DNA, 1808 bp, Oryza sativa
  unsure (1)..(1808): unsure at all n locations
atagtaaaaaagcaccgagtccacagtttcctcagactataattaaccattaccatcattcaccggagtcaaccaagagagaccctagatctcactctgcttaatcccctctttacttttttcacacttcctttactcattagaacttatgcaagacatctaattacaaaagatgtgcaatccttatgtgcattctcaaaaagatatctgattaaagataagacaatcaacacacatcatagcattttgggaatatgaaaggtgttacagcattaatctacaactccaacttcatgccagtaagacccaaagcaattatgcattaattaacagcattttggttgcttgaaaaagtaccacaaagaaccaatgccacagcgaaacagtgtgttgcatccaacagaaattttaatgaaaaacagagaacaaagacacacaagatagcactaataattggtacaatgagccatttatccttttctcggttttattcgaagtatgctactatagtatgttgctttggtgttcattgaaatccaattatgtgcctacagagcctcagaaaatgagtattcacagtatctcagtccaatcctcttatttgagaaattgttgatagatagtaaattctgcattagttctaatgaaatccatccatgacaaaaagtagttacccatgcaaatggtcaatgttttgcaaccgagcagcatcatggcccctgcattccaccacagccaccttctctcgcttgttctgtcaaatgagcatcgcagtttcatgaggatatttaactcttatgagcaaagatacttcttatagatccaactccaaggaaatatatagcacaaaaatagtaggtgcttgatggtggacaagttagaatttctcaccttaaaatcaattatggaaagctttatcaggcggtaatcttctcctcgactgcactccctctcacaagatatcgcttacatgacagacaagaaaagggaaagaataatgtaagttaaatttttttttctatctagcagatacagatggtgcacaattccacccactttgattctcttatactagatagaacatattatctacctcagaacatattatcttactgtgtatcactcaagcttccattacatgtcgataaggcaccagcagttaatcatgattttttttcataaagcacaaaacaaaccccaatttcctagataataacaggtcgtacaattttatacacattttcttttgaatgacacgctagtaaagggcattgtctaatacgatttagcacgtcttatctcactatgccttcttttcttttgagcaagggaggagacccctcccccgattccattaccagaaatttaagtttaacggaatccacagtttcatccggcaaaaaatgaagagtaaagtgcattggcggtccttaaacttgtatggttgtctcatataggtccctaaactctcaaaatgcatatccaggtcccagaacttgtaaaagtgtatcatctaggtcccaaatcgacacatcccctctaggatcctacgtggcgctgatgtggcatgccacatggatgacgtgccattttctttttttttcttcttttctttttatttttcttcgttttccccntttccttaatttctttcttttttttttcccctttcttcgtgctcgggntcatagagaaaggagaagaaagggaaaaaaagagaagaaaaaaagaaaaaggaaaaatttttaacgggacccatttgtcagtcaaaatgatgccacgtcattccgtgtggcatgccacatcaa

SEQ ID NO: 644 - DNA, 1971 bp, Oryza sativa
ttcccattttcatttgtcattcccttgttagttttcttaacaaatgcattggccagtggccatttccaattcagattgctcgttaggaagcaaaaggcaaagcctattattatacgagcgttctcaaaaaaaaagagagagagagagagagaggccggggagtcacctgatggactggaagctgctggcgctggcgctcctcctcggagagggcggcggcaaaaggcgaggaggcgccgtccttgatgggcgtggtgggcgccgaccgcttccgctgcagcgagtggagctcgtcgatggtctgcgcccgcaccggcgccgagctgtcgtcgtggcatatcccgttctcgtgcttcttcgtcttcgccccgtgcgtctcgatccgcgccagcccgttcggcgtgctcgccatggccgtctccggtcgcgcgaaaccttcaaaaaaaaaagtaaacagtcacgttaattagcaacgccaacataacagcgctagttacgatttacgacccggttctgccattgatgcttgcagcatccaaatgccggtgcaaaaaccacggagaaattaaaagagatgatgaacacgtacgaggcagtcgaggaggagatcagcaacgcgatagtgtacaagatgacaggacaggagtggagaggtgtggggcgtattgggcggagtccgggtgcgcttttaaaggggcagcgagttaaccatggttaggtgctctaaccatgagtaggtgttccaacctgagttacgaggcccaaataccgacgtcgtcgatcaggattgagaaatgggaaaatatacggtgaaaactatgtatacggtgaaaacttaaaacctaccattaaatcgaaaaataaacgtctaagattcatctacgttatcacgggtaaaaattttactcgtaagtttacttatgagtaaaaattttattgagacttatattgacatggacgattctcgtacatttaattttcaatttaatggtaatttttgagtttctaatatatatgatttgcaccgtatatttgtcggactttctgtcccacgggaggttgtggttaacgtcggaggctcggagcgagaggaatcaccaccaaattcgctgcatgcacactttgcacggttgcaccaggtttgggacttggataaatgaattcagacggcggttaactggaaattggttggattagctaagctacgaaatggatttgtcacacgcttttccttttgtatagatgctcagagtaaattatagtttacagtagttatccatcgaaacgttccacatatacacttataatttttttcctttgaaatcaacaaaaacaaattcgtggtaacttgttttcctaattagcaaatttggctcagtagattcagtgattcacagtagtcaccaccgttgtttccttctcaaaagagtatatctatatatttatattaattaatttttacaaaacttatcttttacaccaactggtactatgctcctgcttttcaacaggactaaaagaaatactaacaattagtttgatggggttgaattttatctatccacttttttatgggttgattctcgtgcagaaacactcttttattttgtcttttaggcaatatggttttttcatgtggcggatgaagatgtgcgagaagatgtagacgactatctgattttaatagattttgcagtattagtagagatacgtagaagcagaaagaaaaggaccatcactaatctcaattgcaaatagagcaatgtgattaacattattcatgtggttagcttttataaacggagcaggagatgacgagatgtagctgtaaattcattgataggaataggattaacacccgtagcagtgagaactggattgcctaagatatataagtaaacaaattggccaagtatgtggaaaaggcattagtactacaaagtagagtaatttacaaataggattattatg

SEQ ID NO: 645 - DNA, 1676 bp, Oryza sativa
gtagtcgtgggtggttagttttaattgtaagctccttctctgtttgctggtgctgtgtggggttttcagatggtgacgaccaggagaaatgttaacaccggtgaaggcaaccaacccgaaggcagcaaccccaaccaccaaggcaattcacctccaccaccaccaccagacaccaacgccattctcacccagatcctcgcccaacaagccaacatgatgactgctttcttccaccacctccaaaatccaccacaacagaatgctccaccaccccctccccaacactccaaactcgccgaattcctccgcatccgcccacccaccttttctagctccaacaaccctgtggatgcgttggattggttgcatgccgtggggaagaagctggacactgtgcagtgcagtgatgaagagaaagtcatcttcgccgcccatcagctgcaggggcccgcatccctatggtgggaccacttccaggctacgcagccagcgggacagccgatcacttgggcccacttcaccgccgctttccggagaacccatgtgcccgccggagtcgtggctcttaagaaaagggaattccgagagttgaagcaaggcaaccgctccgtgatggagtatttgcacgagttcaacaatctggcccggtacgctccggaggatgtgcgggaagatgaggagaagcaagagaagttcttggcaggaatggaccctgagctgtccgttcgtctagtctctggggactatcctgattttcaacgactggtggacaagagcatccgcttggaagccaagcacaaggagctggaatcgcacaagcgccgcttggcgaatttccgcaatcagcagggtgctaaccagagggtccgctacaccaatccctacccagggggatcctcctcgcagcagcaacaacagcagcagcaacctcgcccagcgccccgacctcaattcgtggtgcgcgtcccacagccgcagcaacagcagaatcagcaagggactcgtgcgccccgtcctcctacgccagctgggcagcccgttcaaggccgcagggacgcttcaggtccgcagcggctgtgcttcaactgcttcgagcccggacactttgcggataaatgcccaaagccaaggcgtcagcaaggccaagcgcctccccgctccaacaacggcgggaaggatgtcattcggggtcgtgtgaatcacgtgacggccgaggacgtgctgacaactccagacgtcatcgttggtacgttcctcgttcattccatccctgctacaattttgttcgactctagagcttcccactcgtttatatctgtgccattcgtggggagaaatcagttgggggtagaaaggcttagaaaccctctgcttatcaccacccctggaggggttatgacagcaaagtattatagccctgccgtccctatagaaattcaggggattccttttccctcggatctgattcttctagacacaaagaacttggatgtgatccttggatgaattggctggcacaattccaaggagtagtggattgcgcgagacgcactgttactctgtaccgaggaccagaacaaccggttgttttctttgcacctccaacctctgtcagaagttcagaactgcatcagataggtctgtcagaaatccccatcgtcagagagttcggagac

SEQ ID NO: 646 - DNA, 1243 bp, Oryza sativa
agctcggtacccaaacaagtaccctcttccccggatcgatgatctgttcgatcagcttaaaggtgccactgtattctccaagattgatcttcgttccggatatcaccaattacgtattcgtgaagaagatattccgaagaccgcattcaccacgcgatacgggctgtatgaattcacggtatgtcgttcggcttgaccaatgctcctgccttcttcatgaacttaatgaacaaagtgttcatggaatacttggataagttcgttgtggttttcatcgatgacattctgatatactcacaatcagaggaagaccatcagcaccatctccgtctggtgttgggaaagttgcggaaacatcaattgtatgccaagcttagcaagtgtgagttctggttgtccgaagtcaaattcttggggcacgtgatatctgctaaaggagttgctgtggaccccgaaacagtgaccgccgtcaccgattggaagcaacccaagacagtcactcagattcgcagtttcttgggtttggcaggatactaccggaggttcatcgagaacttctccaaaatcgctcgacccatgacacagttgttgaaaaaagaagagaagtttgtgtggagcccgcaatgggagaaggcgttccaaaccctcaaggaaaagctggtttcctcgccagtgttaatcttgccggatactcgcaaggacttcatggtgtattgtagtgcttccgccaaggattggggtgcgtgctcatgcaggacggtcatgtggtagcctatgcttcacgtcagctacgacctcatgaaggcaactaccctacgcacgacttgaagttagcagcggtggttcatgctctaaaaatctggcggcactatctcattgggaaccccgctgtgaaatatatactgatcataagagtttgaaatacatcttcactcagtcagatctgaaccttcggcaaaggagatggttagaactcatcaaggattatgatgtgggaatacactatcatcctggtaaggccaacgtggttgccgacgctctaagtcgaaagagccactgcaacactctcaacgtccgaggcattccacccgagcttaatcaacagatggaagccctgaacctaagcatagttggtcgcggattcttggctgcgttggaagccaagcccaccttgctcgatcaaatccgcgaggctcagaagaatgatccggacatgcatggactcctcaagaatatgaaacag

SEQ ID NO: 647 - DNA, 849 bp, Oryza sativa
tagtgacttcaacaataccggaggttttgttgaagacacgataggcatgtgcatttgattcatagccaagtaagaatccctcatccaccttaggtgagaatttagatgagcaaggcctcttacttaaaataaaacatttgctcccaaagacacgaaaatatgaaacattaggcttcttaccactcaagagttcatatgaagttttctttaggatcttgtggaggtacaagcggttgatggcatgacatgcggtactcacggcctccgcccaaaagacatccgaagtcttgtactcatcaagcattgcccttgcggcttcaatgagggttcggttcttcctctcaacaatgccattttggggaggatcataaggggcggagaactcgtgcttgattccttcttcatcaagaaattcctccacttgagtgttcttgaattctcctccattgtcgcttcgcaccctcttgatagtgagatcatagaggttttgggcttgctttgcaaagcgcttaaagacatcttgagctttgcttttgtcatggagaaagtacacccaagtgaagcgtgaaaaatcatcaacaatgacaaaaacatacttgttacctccaatacttatgtaagccacgggcccaaataaatccatatgtaaaagctcaagagggcgtgttgtagtcatgatgttcttgataggatgtggattcccaacttgtttccctgcttggcaagcactacacacacgatctttctcaaatgtgacattagtgagcccgaggatgtgttccccctttagaagagttgccaaattctgcattccaacatgggctagtctatgatgccatagccaaccca

SEQ ID NO: 648 - DNA, 2266 bp, Oryza sativa
aaaatcatactgtataacagttcaagaagcatactcattaatccattcatcaaaatggaacaagcagggcagaatgaaggtgtctgatggtatagtaacagaggagcaagcactggacatatgatcaaatcaagatgctttcaaattccaattcagaaaatagagatgtgtacaggggaagggggaatggagcatactgcatacacaccgtcaagctagacaaactgacagaacctaacagacacgcatgaaacttataggaagctagctaaactctaccggtagctgcacatcgatccaacattttcgtcatcatcattggcaaacacgcatagacccacttctttattgtaaccaactgactagcttcatcgcgttctttatctgcatattttttattcttcagtaactcaaaagtttggtccagcagcgaggatcttgtctgtcaggctgctgtctcccccgatcttgtagttggcgaacacctcgaagttcttcttgaacaggccagccagcttcaggagcgtctccttgtacgcgcccttgtccgtccactgcacagaggccacatttccgacgaagaacaactcagactctgcattttttacatgtatagcagaaatggcatgaactgatgcgtgatgctacggagcttacggtgttgatcgggtcgaggatttcagaggggatgccgtcgatttcagtggggatctccaggccaaacacctccgtcttcttgtagttggcggagaggagctcaccggagtggatggcgtcgatgatcttcctggtatacggcagcctgatccgcttgccaactccgtacctgaacagtgaattcagagttagttcatgccacaggtaaatgtgcaatggtgtggacgctgttacagtggacagtagcagataccttccaccggaccaaccggtgttgacgagccacccggtggcgccatacttctgcatcttctcggcgagcatggcggcgtacttggtcgggtggagcatgatgaacgctgcaccgaagcaagcagagaacgtagcctgcggctccttgatgccatcctccgtgccggcaacctgttgaaatggcaatgcaataacgaagattcaggctaaattcctttgttgatcatcaaggtgataggaaggtaaggcaggtgactctgcttctgaacaaaaattgtttaccagagcagtgtagccactgatgaagtggtacatggtctgtggaaggtttagcttgctgacaggagggaggacgccgaaagcgtcgcatgccaggagaatgacgttcttcgggtgtggcccgacgcacggtatcttggcgttggggatgtactcgatagggtaagcagcgcgcgtgttctctgcagaaaagttcagagttgtgagatttccattttttgttttttgctgtaacttttgtgactgactgaaaccggattgcgctttggagataacttaccggtgacagatttgtcggtgtaatcaacttcacgggtgtgctcatcaaagacgacattctccaacactgcagacgccaaacattttcgatcaatgaaatggcaagcgggagaaactagaatgatcgactaaattaaactgaaggttcaggcaacttccggtcccaaacttgatggcattccaaatatcgggctttttctcctgtgacaagtcaatgcacttggcatagcaaccaccctcgatgttggacacgccagtgtcactccagcagtgctcatcgtcgccgatcagcagcctgttgtggtcagtagacagagtattctttccagtacctgccgattaaaataacacatactcaaaatcggccaaaaggatgacagtaaacaacaagggcactaacaacacaaattcttcagtgaaacaggcatcatgcacacagcatcttaagatctcaaacagatatgatgtatgcagttattatatatatggggatcaaggggaacgcgtcagatgagactgacaggtgacggcaccacgggtgttttttcatttcatccaccgtggagagccatcttattacctgacagtccaaagaagagggcgacgtcgccctgcttgcccatgttgcttcccgagtgcagggagaggatgcccctcctgggcatgaggtagtgcatcaccccgaagagccccttcttaatctacccagcgtactgcgtgccgaggatcaccatatccctcctagcgaggttgatgtctacgctcgccgacgacgtcatgttttgcgtgttccggttgc

SEQ ID NO: 649 - DNA, 3732 bp, Oryza sativa
  unsure (1)..(3732): unsure at all n locations
catgttgatatttatttctaggtattacgttgtgcatctgagaaagtatttgtgccacttacagttggtggaggtataagagacttcacagatgcaaatgggaggtcagttccatttatgttcatgagtaccatggatcgaaatgtttttcttctgccaagcaatcccttctcttactgacttgatgagatagttttttctgcaaatgattcccaaagtaccttttccttctctaggcagacttttttttttttgtattccatctttcttacgaattaagatagcctgtattttatttctttttcgtttttttccctgcaacctctgcatatttatgttctgatgttcaatcttacaaccttaagtgcctctcccccatctttttgaggtgttatttgttgtttgtcaatagtcaatactgagaaggaaaaggacagacagagtaattatgtattcttcccttgtcagatactactcaagtttggaagtagcgtcagagtacttcaggtctggtgctgacaagatttcaattggtagtgatgccgtttttgctgctgaagcctatttgcagactggtgtatgtattttatttttccatacaatcttcatctatttcccaattatacagttctttttgtgtatcaggtaaagacaggaaaaagcagcttggagcaaatctctagagtatatggcaaccaggttttccacgagaaatccagttacaatttgtttattaccgtatacaaccaaaacattatttttagtattcatgttagcagctaatcttcataatatatggaaaacattcctcctttttttcttcctaaaaaatatcacaaaaaagtttttgttcttccatccatgtgccactaatttcagaggtgtatccattgttgggaactctgctatttatattgaattggtgactgataagttttttgaataaaaacatataatgtatcttctgcatttgctcaagatacttggtgtgattacttatgttcaaccttgttatatagcattcaccttagtcattggtataccatatatctattcatgtcctactattatagttattaacctgtcaatcactaattgcagtgatgatatttctcttattaggcagttgttgtaagtattgaccctcgaagagtatatgtcaagaatccggaagaggtgcaattcaaaactgtaaaggtgtccaataaaggtgcaattcaaccactcatcctgaatctccatttgcatttcaagcattaagatctcatgtacttttttcaggtccattaggagaagaatatgcatggtaccagtgcacagtaagccatttgttttccatttactgctaatttcgcgttactctcttatccatgcacataaggggtatttttgtatattcatatgaaaagtttttcccagtacgcaggaatattattacccaaaacgcccataccaaatttcagactgattaaaacatgtgctttcttcagatatttggtgtactaccttttaggcaacattaaatgactttatgctggcataatctactgtggcatgctgtcctttaataagattgctcttttgttccaacaagtgttgtttatgtcttttccaggtaagtggtgggcgtgacagccgtcctataggagcatatgaactagccaaagcagttgaagaattgggtgctggagaaatacttcttaattgcattgattgtgatggtatgttcatggttttgaacagttcaatattatgctttgcctgatttttatttacgcaatatttgtagattttctgctaagtaatagcaaagtggaacccactaacaataaccagaacattctagttatgtttttctttcaagaatccaagttttccttttaagcgtacaatcacagtaaactttgtcgtcattaatagcccagtggtaatcacacatgcatatttgactattggtagcagtttgaccatgtatgtacaccnctaanagtntcggttaggggtggttttttgccagttgactttatttttcactgtctccattactcatgttaagaggtactccctccatcccataatataaggcatggtcaaacttggcacagtcttcaaaactaatctttgacttataatttatcatatgctataacatttattgcagcaacattataaccatcttaaagtaaatttaaatgtcaatccaatgatattaattttaacaaataaaatttaatttatattataataattgttggtcaaatgtttttaaagttgaatcttggaatatgtgcacgtcttatattatgggatagagggagtataaaaaacaggtgaataaagacaagacgaatgccaatatgccatgatgttgttttatttttcaggccagggctgcggatttgacatagatctggtaaaaatggtgtcagatgctgtgactatccctgtcattgcaagcagtggtgctggtactgtcgaacatttttctgaggtctttgagaaaacaaatgcttctgctgcccttgctgctggcattttccatcggaaagaggtattgtcccgccttgtactttttattcagcatgctatgcctggagctctacatgataatcctttattccctttcttgcaagttctggaaaactttgacctagcttacgttatttgcatttgctcagcagtgttagtctgttctatatgatcaacagagctacgtgctcagttaataatacttgcccacgttatgttagaatctttgttcacgttccatagtacctgtatagtaagattatttagggttgttggacgtaactgagcgcttctgctttatcacaggttccgatttcagcagtgaaagagcatctggtagatgctggcgtggaggtcaaagtgtaggatggaaatcctttgatctattgggaaaataaatcagggctttgtaacagttgtgtgttctattttgggaataagatggtaattcataggccatggattggaaatgcaatttcgtaataaattgtttgaaatcttctgtttgattttttttctgcctgtatattactttttgtcttttcttatatcagacaaagctagaaaaactaattcagtcccaattagttgctactcatgcaaacaaatttggattctgtttggtttactgcaaatattgacaagatagtctggtaacatcaatattgtgtgacgaagcaaagtggacgaaatgatccatttcaataatccggtgaatgatctgaaaaggaaaacgctcgagaaccccaacctttaaccagtagtccacaatgtggaatttgcacgagcctttgaaaatactggcagtgccaagggccacaataaagaaacatatttaatcagaacaaccagtctatctggacctgaccaaggattataatacagctagctgctctgtatagatttttatagcccatctctcaattcacttgtacagtgggtaactcttcactataaatatatggtctacctatctgtttacaagattttcttgggtcatgtgtctaagccagctgtaatctaacaacccgcttttatctctcctctcctctctcatccacctcagcattcaacctttttatagccctctattatacttgctcttaggctgtgttcgagaggcctcacttcccgcacacgcaaaacggagagacgtattttcttatgattaattaaatatttacttttttgaaaaatggattt

SEQ ID NO: 650 - DNA, 2656 bp, Oryza sativa
tggaatagaaatgctaattgagaactttgcatgcaccacatagtacagcaactactcaagccaagttctatttactagtgaagccatttccaacttatatcaatccatttattagaaatatgcatgtacattgtgtgtttactgagtttttacttgtagaatgtaccatcctagtataattattttaaataaaactcccttagttgatctctgcaaattaggtggctagctgtccttgcagtgagttgtcgtagtacaaatttgaaacagtcttcgggcttcagattttccatctacattaattatgaaaatgtcacctacatacatctcaattctaatataagttaacatttgcaagtgggagccaattaaactgtacttcagcacttatcttctttttatttatttactagctatgatttgcgacctgtgggtgagcaatcaacttcttgctgaagtgtcagagaagggtacctgaaggaacagaagatcaacactaacttaaaggctcatacatcatgtaagctaaaatcagtttgttcccatagtttgtgagataaattgcaatccttgctgcttgtaaattgtaatgaaatctgtacgattgcaattatactgcttcaacataaatttctcataaaatggacctggtaatttaatattggtggattgtgagaatatcgaagctatgctacagattgaattaaatggaactacatcagttatgttattgacacttatcctgcacatttgacactgatcttcaattctgtattgaaatagtaggtgttgcatagattacttatcattgaatggagtattattataatctatatatctgacccttaatacttttgtctttctgataatctgattcaagtttttagatgctcaacttatcatggcggtcacaagatattttggagtggcatttctcttcaagggaaatgccttgcctgttgtagatttgccatcgttttgtctcattttgtagattgtataggagaatttctctttttgtacaactaacctatgtacatggcatttgtaattaaatggaattggtatattcagtactagtggaatgtggatgcatgagaactgttggtggtatattcaattctagatcagtaggatttgattccatgaactatattttttttaacccaatgcagggcacactaacagaatatctgtcagaaaaactgatatatgcaaactgcgtatctgtcagtaatccgttaactgtcggtaaaggaccatctgtcggtaacttccgtctgtcggtaattcatttgtaggactgtcgagttatctgtcagcaaacatttatctgttggaaaagacctttgccggcagcacttggcctgacagaccctatctgtcgggaaaagttatgctgacaaataatttgacagcatataggtcctttcctgacagatatgtagtaagcaaacttggggcatggtgtagtgtcggggaacatattttgctaaatttttctatattcaagagtaatagcctaatgggtgttgccatttgttcaatctctcaaatagtatttgggtccacatgtatgtgagataattcggtggcatgtgtgaataagaagatgaatgcaaaatacgatgcatgccacaagttattagtggtaaaaacattttttcccttgtctttcatttacatgtttaagtgttacatgcacaaggttttggggttgatacttgacacctatagcccgtttctttcttaattagtttgtttattctacttttggaatgaaagatgatatgctttgaataaattgggggaagctctaatcttcttgtgctagtaggaaaacataactatacttcttgtaaaaatattcttccatttaaataagagaaatttatagttggagttatgaattatagggacagaaataaatttaaaataatagtggtggtagtggtgaatctcctgccatgccaccacctctgctactattctttctacagaattctccctaagcatgcattttcatattatttataggtgttttacgccattcccttcttatttcgtttattagaaccacaatgtaacaagaaaaaaaatctaagatgttccaagtattgtgtatatgtggaattactctatggaaaaaagagcgaacaatagatttgatgcaaaactagatgcagcggctaaaagatatacatttggttattgatgaaaatataggcacttatattcttgagatcttgggcataatactaaaattatattgtttatacatgggaatatttcatcaacggctataaaaaaattgtgtcgcataattagatatttttgttggcattggtcacactacttcataaaaaaatataaatttttcattacttcaatgtttcttcaacatcgatacatatgaggacagtttcacaccaaagaaaagaaatcacataactcggaaatcaaactctaccaaaaattggctatatacatacccttgaggggtgagacagcacgacaacgccctcaggagggggaatgaaccatcgttgtcggtccggccaaggcccgactgagtttttacccgccgctcaccacctgcaaatccacggctgacgcaccaatgctctaccaccacacaagctctgccgacatgtgg

SEQ ID NO: 651 - DNA, 546 bp, Oryza sativa
aaccacaatattgcaaaagatagtgattcggttagtgagatgtgtggttgtaccggtacacccccaacacataggggagccgtttgggctcaatttttttggttcatatctttcttataaaaaacacacgggtcctcatggatattcatgttctttttttaactgtgactagtcaatactagtattcccagacggcaaacatacttcaatttaacatagctgccattgacaggcatacatgtggcagtaaataagtacagctagctgctgacagtacactcccatactcatcaataggagcatcgtagtcgtagctcgtggcgatgaatggccctcccgtgcttcgtccgaagttggtccccccgtggtactgcaagccaacaaaaaaccagtgttagaatcgcagagcgcctctgtttacccaagcgaattggcaaaacggcggtaaaaaaggaaaacaaaaaagaaaacgtctcgtcttcgcgcgcgagctgcttaccatgtaatagttctggaacgtccgccgcgctggtagaatcgcgcgac

SEQ ID NO: 652 - DNA, 1453 bp, Oryza sativa
caagtatccagctatatattatggtattgtgctgttggaagagttccagacatatactttagaagcactgaattatttttccctttgtgattctaccttatctctttgctctcctttttgtctcaataactaactactcctttgatggtggaccaacaatgggaaattgagttttgttagggtaataatgcaaataagtgatattgcttactcttttagcttttacttgtcatcccgcttgtcttcattgcaacaattaaatatatatatcttctgttatgctaatatggtatcaaaagctatagaaggtttttcccattttctcctgccccaacattttcttgaacttcccttccactcccattaggattagtagtggatagaagtgcttgtgaagttaaaataaaagcacacttccataatcattcctggaattttttggttcttccattgcatgattggtgaattttccagttgcttctgtattgtactgtttagagtttgtctcttatctttggttaacatatttaaaaatatcaaatcaagaacagttggaaactttaagagaagatatcaaacagcttttacactgttgttaaattttgagatatttcttttaattcgaaattttcaactaggactcttattgagaagcttgagaacagcaagacagatctccaatctaaaattactaaggaggtacagacttttccctggaatcaatgagagattctgtagcattaaatacttacacatgaggtgatgtgctgtctatttcaggcgaaagaaaattcaatcctacaagcaagtctcgaaagaaggaaagtagaattgcataaacgccgattagcactcgaaaaaaagtaagagctcaaactatgggaaaagtattatatttttttctagaaagagaacgcccaggtagattttatgatttagtctctacatccataagaaatccttaaatctatgtcaagcacaccagaaattttatacatcttaatatctgcctgaaacatgcattctctgttcactgttaaacaagaaaatgtttttgctgtttctgcactcaacaggtggaaaatttgcgagatcagctacagaaggagagaaatttgagggtctcattggagtcagggctgatgaatttgcgaagagggcaggcgtccttcccatcaacaattgacaacaaggttttctttttaaaattttattattgagttaaagtgcaagtgttttttcaccatttgaaaaaaaaattgttctgctaataaaagactaaggctgatcttgaggaagttgctactgctgaagctgatattttgaacttgaaacaaaagggttctgatctccgtggacaactcaacaaccaggtccagatgagctccgcctcattatgtgactcatgcaacaaacgactgctaaatacagacaagctaaccgagtaaggatt

SEQ ID NO: 653 - DNA, 3256 bp, Oryza sativa
catctcttgtgctgtctccttgtcatccattacaaatcttccaagccttccttccaataattcaatcttggcctcacgaacggcgggacatccctcatgagccaattgcaaagtatcccatatctccttggcctcctctagtcatcaaccttgttgaactcctccggattcaaggcggagagaattgcattggaagcttgagcattgcggtagatgagttgttcttgctccgaagtgagctccatgtcatcatggggtatacaatacctgtacaaacaattttccaaatacttggatgcaaagagattagatgcaacttcatcttgtgcttccaagcggcataatatgtcccatcaaattgaggagcacgcctagaaggcatggagacgaagttgtgagagggaatagtaagtttgctgtaatcaaaaggtatagtagctcccttgggtggtggagttcccttgctgcttgcttcatcttcatttccattttccccgttctttccccctaagtctgacatcgtggatcactcaaagcggtgaagcttgaatcaagagcaccttgctctgataccaattgaatgatcagagatgtagcctagagggggggtgaataggctttcctgaaattttctcaacaatcgtagcggttaaattgacagggcccggaacctcctggtgatgaacaccggaacttccgggcaggatgagtagcctggaacttccggagttcttgagccaggaacttccgggcagcagagataaattaaaacagagatgaaaaacaggtcctagcaagagaagtttaggcacacagaggaacaagatgaagattgcagaatatcagcagattcacacaaagatcatgcacaagagagacaaagacgattttttcccgaagttcggatcacatgaatcctactctctgttgaggtgctccaaagaagccgggtctcgattaaccccttgcctcacttatgcaaagatcccagaagaggtccacaaccttgaactcaacacttttaagtcattttctagaattgagtgaccaccaagatccaactcaaaatttcttctacaaaaaaccacaagtgcaagttgctctacctaagacaacctctgaaaactcagcacaagaatctttactcacttacacttgttacttgcggaggtgaggaaaaccttcacaaacttttccgggacatccacaagatctttagaagctcacgggcgacacctaaccgtctagaagaagatctccaagagtaataggcccaagtgacaacccacaaggtatccaaagtgctcaatcagacttaatcttcaagccatctccaaaacactcctactctctcatctaatctctcaatctcacaagataggctctagatttgagtggaggaaagtaaaggaagcttgggagtggctagaaaaccctagaacaagaatgaacagaagtggaatggccaaagggtgacctggggatgaaatccatatatataacgactaggtgacgtcatctagccgttactcacaagtttgacctgaaaacttgccaggaggttccgggcaaaagtgccaggaacttttgggcagtacttaggaaattttttgcaaataaacggcgcccggaagtttcggccagaacctccgggtagccctctctgtcccgaggagaaaatcatttttcaaaaatgattccaaaaatattttgactcaccgatattattttgactcactttgtataccctagaaccacacttgaaacccctcttaatagtacggtttttttctaaactcaatttcgaaagtgaaaaacctagtctaatcaccttcggtgttttttgcacttaggaacattcaaattggggggtctccttgcattcttagccatcacaactcgctttgggactaaactcctatgaataaacttgataaacatgttagtcctctttaaccaccttgtcattaatcaccaaaacccactagggggtttaagtgcatcttcaatctccccctttttggtgattgatgacaacatggttaaagcacacaaaaagataatagaatttaaattttgaatgatgagagaagtgtgaagctccccctaaagatatgcatataaagaacttgaaatgaaaacattatgcataagatgaaggaaagctcaaaagaaacttcacactgccctcatcaaataagagatgtagatgaaagtgcttgaatgatgagtgatgcaaaaagaaagactagatgacatggcaatcactcaaaaaagatgaaaagaacacaacatcacatcaaaatgcaacatccatatggtctaacttactgacataaaggataataaagcatctaacagacattacatccaaccaaaatagaatacgattacatgtccatatagagagagataatagagaggaaatctgcctggccggaacctccagatcataggacccggaacttccggtcaaatgaccagacaacagtcaaggcagcaaaaaggataaggatttaaatgacccccttcaattcacaatttctccccctttggcatcaaggcaccaaaaaggcgagaaactatgaagagaagaagatgatcactcatctccatcagagggaacaatctctgtatcgccggagagatgagactcatcggactgagcagcggtgtcaccctcatcaacatcagtgggagcatcctcagcagctgcctcggtgtcaccctcatcaccatcatcatcatcatcatcatcatcaacagaatgggaagattcttcattgaagaaggtggatggaccttcaacggcaacgttgctggctgcctcataagcttcaaatggatcaacatagacctcatcctcagaatcatctaacacttctttcccagcctctcttctatcttccttctgacgcctttctatctttttcactttcttggcagtcttagcacacatacagaaaaattgcctgaagtgccttcttgatgggagaagaactcgaggaacttggtggggcactagtagaaggaccagctgaagtagaaggaacagatcgagggaccactggagaaaaggaaggtggagcacgagggcgaaaagaattatggtgcccatctttgatgtagaataccccggtgactgtctcaatcatctttataataaaaggagcatagatgcacccccgctaaggctcaagaatggtgttggggatctcataccaaatcaatttcatcacactgaagggaggctgat

SEQ ID NO: 654 - DNA, 2538 bp, Oryza sativa
  unsure (1)..(2538): unsure at all n locations
ctcattgcattattatcactggaggtagaatctgacaaggtcttgataggttctgtatttggggcctcttgatatagatatacgctatttctggtcatcataaaattattttaacacctgacaaacacagtaatcattttggtctttgagcactaaatatagaaatcgaattataattgtagaatattcagaaataggaaacccgaacctttgaatgaggatttttttttagaaaatatccgtacctgatcagcattcatacaccccagcaatagcattctggcttggtcataatttaagcacctatgcctacacagtttatggaaaaagaaaaaagaaatacgcggacctgaatgtgaagcggaatgcttatttttttcacatactattagttgtatatgaaagtgaaaaaacaaacactgaggctactactggctgtcagtgtagccatgtcgaagcggatagacttgaatcacatgattaaaagaactacttaagcatattatttttcgttcataataatgtacgtttcagattgttattgaaatatcatgagggttggttacttgatttgataatattcaaaatgaaaaagattaaggtatttataaccatgataactcatcccaaatttctgctttaatttcagaatgcacctcccagaggaaatgaaccgattgttacactaggtggaattgacttgaataactccggaaggtatgcattgagaaattaatgtttgtttaaaggctatagttcctgtaatctgataaacatattcttgagctatgatttcagtgttgtggtcaaagaagacaagaaacttttaacagtgttatttcctgatggccgcgatgggcgaactttcactctcaaggttggtcgcacacctgtttcatttttaatatactgttggcgttcatctgcagtatgtactgctaccattgggtggcagcgattaatgcagcaataaagacgagggaagagagaggggatgatcatctccggcagaccaactgtttggttgagattagatcatgcaattacaaggagttgttccattcatgtttgacacacctgccttttatcgaactgtaatggaatgattttcattgagcaggcagaaactacagaagaactcaatgaatggagaagtgcactagagaatgctctggcacaggcacctgnngnancaagtgatgttggtgcaaaatccaattttcagcactgacatancannacctgctgaagctccagctgaacagtgtaagttaagataactttcatcagttgcccacgatctaaagtactagattcagctagggggttgggaaccctacattctactgaacaggcaaatcctatcgtttccattgcagcggacaataaatctatcattggcagacctgcagagtttgcccttgtagatgctgatggtagtccagctttcctggagaaggccttaaagttcattgaagattatggtgagtgttttttttttcaaattttaatttcatgctatcctggtgaatatcagtaacagtcaaatagaagtatgatatttatctaaaaaacaataactcattgtatgtatatttattaatctgtagtttagtgacgagcagaaacatactctgtttgtaggtgtcaaggtggaaggaatcctacgtcagtctgctgatgttgaagaagtcaaacgaagagttcgggactatgaaaagggtgattctctctctctctccctctctctctctctctctctctaacaagagctgtactctaatcaaataataaaatgtttattcatgactcctgaggatatttatgtcacttgtaagccgttaagcatagataacagatccttgaatttcctatgtcctgttcacatgataaataataccatttaaatcactaatgtgatcttatagggaaaaatgagttctccccagaagaggatgcacatgttattggtgactgcatcaaggtaatctttttttgccaaacgttgactacatagtgacaacatagagttaccacattcttcagtaacatatcttcagttcttctttgctacagtatgttcttcgagagatgccttcatctccagttcctgcaccatgttgcactgcactggttggagcttaccgtaagattgacttcaatttttctttatatattacttcttttttcgccgggccggcgtaagatacgcggccgaagtttattaagattgagaagaggttcaaactagtacaacagatacagctgccatggaggctaagagctgtacaaccgctattgttacaacgatgcacattactttacagcaaaaacaggcactctaagccacaactccggctaaaaacaccatccacattactttatatattacttcaacaatcaatcaatgtagtcttgcatttaactgatgcataagtaaatcttctaaagtcagctcagcgcatgcccttaacctgaaaacatgctgatgttcctaggattacaaactgatatagacgtgtgattgtacaggaactg

SEQ ID NO: 655 - DNA, 1045 bp, Oryza sativa
aaaattactgacacggtcactgaacttgagagtcgtatatcaccttgtcaagggagttgaggtagtcgacggccctctccctgttggtgaggaaagtggctcgccatctcgatgttgggcgaacccctgcagtaggagagacacagggcaaaaaacaaggatcagtcgtgcaatcacagcagagcctgcaaacagagctttgacatgcacaatgagtagcgggaactacttgcccaccaagctctgccggaggcctatcttgacatgccttgtcctcgcgaccggcggcttgggccggcagcgtcgcagcgcgccggtggactgataacgaccccttctcgtacttgatcgcctgctcgtacagctctgctcgcccacatcccaacagaaaacacgtcacttacacatgtacgagttataatccctgaacaaaaattacagccgttctggcgtcgcgtcgcgtaccagcaggcgagaggttgtagagcacatgggtgaacttgagggagctgtcgctgacggcgatggtcggggtgacgtgcgggtggtggtggtgcaccggctgcgggtgcggcgacggcgcgcccttcgccgcggcctcgcccttcctcgccggatctcccctgacgaccttcggcccggtctcacgcgtcagcgacgccaacgacgcgctgcatcagacgtcatcgtgacagggatcgttccatcagttaattaccactttatcaggtcaaaataataataataagaacatccaaagaaaatcagcacttgctcagttgcttgctaccactgctaaacttactcctaaataaaagtaagaccatgtctcaatgaactcattgtgtctagttagtccgaatagaatactgtgtcgagcggcttgtgtagaacgatacgaggtttcctctaatttcttgggggaaattcaggcgcaagttacgcgacgggaacagctaccgacgccgccgcgtcaggctgatgaggagattatcgggtatccccgcggcgcatgttggcgccccaaattgcgctcgcgttcgtt

SEQ ID NO: 656 - DNA, 1523 bp, Oryza sativa
caattcctacgttgagtttaaacgggtggttacgtggcaatatggtcagccagataaataaaaaataatggaaaaaaaattgagctccatatgtcaatcagcaaaatagacccacgtgaccccacctctttctctctctcctcttgccctctcagcacactgctcgagccgacgacagcgctcctcaaagtctagctgccccagacgcgaccacatggtccttccttcacctgcgtggccttctctgccgggactgccgggagtatgtgtcgtaattataaatctgaaaagatgtgcacttttttaatcacgtttcgtaacaaatattaccagttttgctgtttgtcacttgatattttcacctgacttgtcttctttgctttgaatccttctgttttcctccattttcctctatcctttatcctttttctattcctgaataaatcgtggaatccaccgagtactttgaataaatcgtggaatccctaatttgtcatcgagtctgatcttcatcctcggtccaaaaaactggatagaacgtatctcctaacttacaaaaccatgcaaacgaggtccctcgatagtattgatctcgggtttagctgacgtggcgtttatatggatcgtttaactaagtcttcgttccacgtggcattgctgtgacgcttacatgtcaattcaatcttgagaaataatacaacccgtagggcccacatgttagttacacacaaaaaaaaatgatggggcccatgtggctcgcatgccatcctccctacccctcctctcaatctcctctctgtccctacaacgaaaacacaggagcgctcgggcggcggagtgggaagggcgacgggcggattggagtggcgacggccagctgagtggagcgagcgacgggcgtagcggagggcggcggctggagcaggccgccggcggaggaaaggggcaacagagggcaagctctcgcttccccacctgcttccctatcatagctgccgccgaagacaacaacaacgagttcgaggaggaggaggacgcgcacctcaccatcaccatcgcggccctcgccgccacattcgccatcctccgagctgctctctgaccttgacagcgtccttgccgtgggcgacaacgggtgagctcccgcttcccacctgcttccccgccattgtggccgttgaagatgacgaagacgatggcgatgggttcgagaaggaggaagaggaggacacaaacttccattgtggagatcggcgccgacagtggattgctgctgcttcgctcgccgccgccttgcttggccctttcggcttcgcgcgccgtagttgctccggctgcagtcaccccactatgcctgccgccgcccagtggacttcttgcaccaccgctcagcttgcttcccatgggacttccatggtgggagacaaggggataggatacagagggggaagaagtggggcccactgacatgtgggtcccattatttttcaatattaatatttgactgacatgtgggcacgcat

SEQ ID NO: 657 - DNA, 2236 bp, Oryza sativa
cagtacactgcaaatgtgcgttccgttgaaacgttcaacggagtacgtacaaactacaggtccacaaacctgtacttctcaacctgggattcagaaaaccggttgctaaatacggagtaagtaagatctcaacatcactacagtttctgatgtgacacctgcaaattccaatcttgcttttgttgagctaacatatgttcaatgcaacgccatagttccttcgctgccacacatactctctctttgctttcctcctgttgcctgttggacgagatggcaggatcataggattttgttcatcaataccatatgttttagaaatattattttagtagatcatattattggtagaagttggggctttgttccatctcgtccattttatgcttttttctgttcacttctaaatttttttttagctgtgtacctacggacagaggctgaagatataatccatttccaatatataaaaaatgctataagtttagttcgacttaagaattaagctaaggtcgtaagatctatgttcatcaatcgtgaaaaattcattagtgtctcattaccttattgcaattagcttagtcaacttgttacttgcacggggatctgagccagacatcttcttttttgggctacacatggctacctacaattgcaatcaagatgctgacagctgatacaagatgaagaactatactacacacgaataatgaatccatctccttcgatcccaaaactattctgatggcctgatcaagtccaccgccggtaatcgacccaagttggggattgttaattacactaaacaaccagccttgtgcagctagctgagtatgaggcggcaatacgaggaaggaagtgcgtcgtctgagccgtgaggcagagatgagagatggcagaagggtgtggaaggcaaaggtggtgtggaaacactctttgggtggtcttatataaaaaatggcaccaataagatcatcggtaatccgtaatcaaacgcgaataaacaatagatctaaatttaatcacgacatctaaacacgatatttaaaaaggaggctcaaccgaagtgtatattacatatcaatgttatcaataatcctcaactagctaggccgatgggtgtgcctctatatttaagagtgtgtccagaatagaatccgacactaattttactttgcactatgcatattataagtttactgagacgccactcaataaagattattaattgattgagataatcagtagcacggaaaacacaatagtgattagcacatgattaattaaatattaacaaatataaacgtgaaaattgagatattcgattcttaaaagaaaacaacgtagaaagtgtttgaaaaaccgtaccatttaatagtttgaaaagcgtgtgcccacgataaacgagagaagctcccctcaacagcacaaacaaacgaaacctaaggctgtgtttagtttccttcaaacttccacaaattccgtcacatcaaatgtttggacatatgtatggagcaattaatatggacgaaaaaaaaccatttgcacagtttgcatgtaaagtgcgagatgaatcttttgagctaaattacgccatgatttgacaatgtggtgctacagtaaacatttgctaataacggattaattaggtttaataaattcgtctcgcagtttctaaacagaatctgtaatttgttttattattagtctacgtttaatactttaaatgtgcgtccgtatacatcaaaaaaagatttggaggaggaactaaacacggcctaagtcctactcccttcgtcccatttgagtgaagcctgcccaacttttatcttctgtcttatttgaattttttttgaaaaaattaaaaacataagtcacacataaagtactattcgcgttttatcatctcatagcaacaaaaatactaattataaaaattttcaaataaaacggacgacttaagttgggcatggaaactcatggttgtatttaaaatgggacggagggagtactttataactaactttgtatacatatatttgacaagaactctaatggatggagctagtccggtctagtttttccggactaccttatatataaattattgtttttaatattcgcacgtaatgttggttccacaatattaatacaagtgatatccgatggacgatagtttcttaacatgcatctgcccgttgacagtgggcgcggatagccaacctcatgtggatcc

SEQ ID NO: 658 - DNA, 1091 bp, Oryza sativa
actcccacccggaggtttcgcccggtttgtccggatgttccgggtccctggcagctcacaagaccagtcacctcacttgcttgtggagctttaccttctcgcacaaacatcaagcattctttcccatttaccatcacacgcttagacacaggacttctacccgaaaacccgaacccgtgtccatccttgttaggatgagcggtgatggtcttgtaaagggcatcttttgaatggtatgtcttgatgcatccatatttcaccaaagtgcacaacttttcattctctttcttaagagcttgcatagcatcaatattagtagcataagagttcaaatcaatattgtaacacctagcacaccattgctagtagaagggttagaagaattagaaaccacatttggttgagaggtgctattccaaagagtgtcaaattgaacttcaagatctttatgacttttgtctaaattagcaaatttttcttgaagagtttcattaacatccctaaggctagctaaagaaccattagccaaattaagctcattagcaagttgtttatttttagcacattctttagctaagctctcctctaagacaaggtttctttttttctcaagaataagcaattcttcttgcctttcgagtgattgttctttactatccaaagctctcattaacttagccaaatgttgcatagcgggtttgctaaagctcttaagcacatcatctaattcattatcactttcctcatcactagaatcaacatcaagagaagtttgagagggcttttgagtcatcaccttgcggccttgggccatgaagcaagagtagtggtaggagtcgtcgtcgtcatcactcaagttgttgaagagacgctccttgcttgaagaggatgatttgaaggcgacggtagcaacaccaccttctccttcaaccttgtcttttgacttgggcttgggcttgacctcgggatcttcttcatctccgaagtaccacacttccgccatgtgtgcctccgccacatgagcacgctccggcttcttcttgcctcccttagcgttagcttcatttgacttgggacaatcggcaatgaag

SEQ ID NO: 659 - DNA, 1734 bp, Oryza sativa
  unsure (1)..(1734): unsure at all n locations
ggggtgcctgcgtgttctggccaccaccggcccccgccggatccgggtgcaccaccgccggatccgcggcctccaccattgctaccccaacgccgtcgccattccggcngcatcaacccacaacaccacngggcgcaactcacctcaaccgccacngtcgccggtcnccgccgcaagcccatcccgcaagatcgggccggaacggcgcggatctggcggacaccgcngtcgccactccggcgggctccccaggccacccgagcgcgaggagacaaggagcgccccaccgccaccgtccttgcggccgcgcggcttcaccggcgcccgctcgggtgacggcaagncgnaaaagggggtgggggtggggaagaggnacgnccgggtccgcccctcgggagagcgacgcgagagggtttttctacaagcagtcgcttttgctccgtgtcgatcgatctagcaagccggctgacccgcctctgcaaatgcaaagcttccgtgagcagcccggagtgatttgccccgggatcgcgtggtttgtgtcgtgtctttgcatacggcgacatgctatgaatccccgctttacacctgtcagatggaccaaatcaccaaacgtgattggcggtccaactgcagagcagtagcaaagatttgaggaacaacaggcaagacatcggcacggcacctgcagactgcggatgaaggcgttcgccgtagaatttgagctttcgtttactgtaacagggctagttggttgtacttgtaccttacggttgaaagataatgacacctagtagatgatttgccggagaaatattataggacaggaacttaatactcattttcttcgaaaagtcatacggaataaatacatgtgctaaagtgttctcctttaagcaggaacatcagagctttcaattgagtagaacaatgcaggtacacattgccgggtttcaaaccgctgctatttttctcccttgggatcatggcaagcatttttcgtcaacaagactgttagctgcctgtttagcacgcgtcaccaacaaatgtacagagtatgtaaccaagatataatcgaagcaaaccgcctggggtagtgtttttttctctctttttgttcgtaatagcctttataagatgtagaattgtaattttttaactgatccattaatacgaaacatcgcactaactcgtagtggttgcttaaagaaaaaatcatagcaaacaaaacaacggccaattccatccttaccaatttatcttgatgtgttggcacggtaaaaagaccaaaatcggcccaacgtttttccatcgaatggacggagaccaaaacaagcaagcaacttggccttcaatcttcttctccttcgcgctctcgccacgcgccgctgctcgccacagagcaccaatccaagattccagagcgggcggtataagagaggggtaggaggctacacccccgccgcctccacactcaccacccgatcgaacaccgccgtcacagcgcgtcgcggcgggggcgatgggcctcttcggcggcaagagcgcctcttcgaagcagaccgccaagctcaagtccctgatcaagctcgctgccgcgcgcgtcgccgtcgcccgccggccccgcctcgggcgccgctccattgcccgcggcgatgtcgcgcagctcctctccatcggccacctcgaccgcgctctcctccgtgtatgtccatgccatgcttttgccttgcctga

SEQ ID NO: 660 - DNA, 506 bp, Oryza sativa
aaattgacaaaaaagcattgttttagctcgtctccgcgcttaggcgcctagcccattaggcattagcccaagcatctttctggattcaggagagctcttgtctactccgttctctagcgtacaaaaagcatccgcgaggaagcgcatccatggtagcggcggtggtggcaacaccgacgagatcggaggctctgacccttcctccgcatggcatggcagttatccaactacaacatccacgagtacacgcgctgccgtgtgcagcggatgccttctgcgagaaccgtgcccttggcgacggcgttcgcggacgggaagaagcagctggatgtggcaaaacggcatgcggtggtgtactctctgtacgccccaaaggccaagagcatcatggagatgaagctacagtgatcgacgagagaggtttcgtgcccttgcttgctctacaaatactagggatttctttctgcattgtttatatcatcatgtgataggttcgagggaaattg

SEQ ID NO: 661 - DNA, 2064 bp, Oryza sativa
aaacacccggggcggggtcggttggagccaaaccgggttcctggtaatgcaagaacgagaagcttgttgaattaccgatcgaggtggttggagttggatttgtgaacgcctaaaatggcctatgtttatgtgaggatttgatccttctatgtggcatgaggtatccctgggtcggcttgggaaaggctttgtcgcgaacctctgacaccggccagtgtctggagtaagttcgtgtcttgtgggtaaagtgtacccctctgcagaggttaactaactgttcgaacagccgtgcccacggtcatgggcggatgtgaggtggttcccgttgcgtagatttgtttgcctgtgctttgtgaaaagttgttgtggtgtgggaatcgtaaccagaatcagcctatgtggcagatggatgacctgagtggtcagaaacgaatctgtgtgattcgggatgtctgtgggcatcatagactaggcttcccgagtgtaagcggattgttgtgctgccgggcagcaggactctgggagtccgagaaaatgaaaaaggctctgggagccgattaatcaagtggaatggctctgggagccgagaagtaatgatctgacccgggaggtcggtacattactgatcgagctgttgaaaaacatctcttaaagacgaatcgagacgcaagtctcttttcggcccaaacttaaaaagaaataaatcacttagtgatttcaaaatgtcttcaaataaaagatttgcaaaacaaccttgcctctcttccaagcttgcattaaacacctaagttcccgtgacttgctgagtacgaaagtactcacccttgctctatataaatatatatatatagttcctccgtcgtgaagagaagacaaagtgaagtgaagattagggtttcgtcctggttcccagccgtcgcctgtggtgttgggtgttagaccgttggttcccctgctgctgctattgttggtgttcgcctcgtccgtgtcgtcggttgcattctcgggctgtctgagctacaacctaagttaaggtaaataagtcctctatttattttaaggattgcaatgattcatatttgtcaccgtgggtaccagcgctatgtcctgggactggtattgagatcgcggtttcgtaggaagcggttcgcgccgtttttcctacgacacgctcctgtcaggtgccgttgtacggcagtgccggatcggggtgtgacatatttagatcgtctggtaaaattttacacgctatcacatcgaacgtttggacacatgcatgaagtatttaatacagacgaaaaaaataactaattacacagattgcgtgtaaattacgagacaaatcttttatgcgtaattgcgccatgatttgacaatgtgttgctacagtaaacatttactaatgttgggttaattaggcttaataaattcgtctcgcagtttacagacggattatataatttgttttgttattagactacgtttaatacttcaaatgtgtttccgtatatccgatgtgacacgccaaaactttacacccatgtatctaaacacaacctttatcccgtcgatagcgaggcgtctgtgatgacttcgtcaatctctaggatttgccgacccagtcttcgaagatgctcataggggtagggtttgcgtgcgtgtgttcacaggggtgagtgtgcgtgcgttgtgggtgtcttgtgttgtactgcgtaattcttaaaaaaaaatgaaacttttaaaagttttatgtcagcgggtttatttccaaattcataaagaactagtactcaaaatgttttgagatgaattatggggcaatggggcttctgaagaaaatctttattattaggggggttacactaggctgtgtttagttcctttaaaagttaaaagtttgatttgaaattgggacaatgtgactgaaaagttatgtgtatatgacaggttgatgtgatggaaaaagttggaagttgggatccaaagtttgatttaaacacagcctagcaaaagtgcagaactcccccgttttttcggtgccaaataaaaaaaaaaacccaccgt

SEQ ID NO: 662 - DNA, 536 bp, Oryza sativa
ttctgcctcccgtgaactggtgatttacaattacaacggtgtaaacattaacctttactataatgacattggatccacattttatagatacagatggacccatttgtcattcactcagagtgtcaaaacagcgaagcctctatgtttgcaatcccaatattacaattttctccccattttctccccgtgaactgctactgctactagtattagtaatatcattatctggaaattctaaagcggcattatcacactactccgcttctgctacacggacgtttaacgatcaactaactgactgactcaaatgaatttgcaacgaaaaaaaaagaacagtacgacttcgagggcaggaaggacctcgtcaggttcgtgaaggccgtcgccgacgccggcctctacgtgcacctcaggatcgggccgtacgtctgcgccgagtggaactacgggttcgcattcacatctctctcatgctctcgcactggctatcgctgggcgaattgatcgatagattggtaagaaacgcaagtattact

SEQ ID NO: 663 - DNA, 574 bp, Oryza sativa
ccctgctctcaacccatctaagctgcctgtgttgccaaaactagagcagaggcaccatcgatctgaaattttggtggttgtgctgccgatagccacggctgctcttgtcattggattgcttcttgtggggttcatgattgtcaagagatggtttaggcatgccgagctgagagaagattggaaggttgagtttggaccacaaaggttttcttacaaagatctgttcgatgccacacaagggtttgggagcaagcgtttgcttggaattggaggattcgggagagtgtacagaggagttctctctgtatccaactctaactcagagattgcggtgaagagagtgtcacatgactctaggcaaggggtgaaggaattcattgcagaggttgtcagcatggggcgccttcggcacaagaatctagttcagctacttggctattgccgacgcaagggtgaacttctcttggtctatgaatacatgtcaaatggtagcctcgacaagcacttacatgacaagaacaatcctgttctagactggaacacaaggtttcacatcatcaaagggattgcatct

SEQ ID NO: 664 - DNA, 654 bp, Oryza sativa
caagagagattcttggccttccaccatagtattttagttcctgcagaagtgttggggacttggggtttagtgtcaggttgtagagaggacatgtatatcggcaccacactagtaaaggatggatggtttaattattccgcaccaattttatcattgatccagcttacatttgagtgcaagtttccactgtgttcagtgtgcaacctgttgaaaaatttctactactaattcattctattttacactgcagtaaatatagggaaaatgagtatctctggcatcaatctggacgaggacgacgaaccaagtggagacaactaaaagcagaggcacatttgtcatggtgtggtagcagtggctggctggcccttgttctcctccctccttagcttttgaaacctcgcttttgaaacctcgaagaagcgtgactgtgtggttaccatcaaacgccaaaattgcatccaaaaattacgtataccttggacagtcgtctgacattctcagtaatctgctaatgttaagtcaatgtggtttgtggaatcgcgggcaagatgtttcaagaattcaagtactcctaatcaagtgtttagcgtaatgtttgttgctgcatcccacaaaaaccctggagggattgtacacttcggtttggttctg

SEQ ID NO: 665 - DNA, 1003 bp, Oryza sativa
  unsure (1)..(1003): unsure at all n locations
aacccctctcgtgctcccctttgaaccggtgaactccctctcgatcgaatcgctgcgtcgtgctccagtgaaaccccgccgtcggccaccgttggttggagctcctgttcttcttcctcctctctcccggcccgcgtggctgccacgtaggcgccacgtcggcgccacctcgacgcgaccgggtcaaagctgacctcggtcagccgcctccctccgtcccccaccctcgcgcgcggtccacggagagccaacatgctgcgcgtgggcccgccgcacaccgggtccacccgcgggccgcgcgtggaccgcttcccccccgaaccctagcgccaccctcgcatgcgcccatcccaccgtgggccgtatcaccgacaagtgggccccaccgggcccccgcgcggtggaatcggtccaccgggccgtctctctctcccccgcgccccctctgttgggccgcctccccgtggccgcgcccggcccaatggctcggccgagcctccttcaaccctttgggccgcaccaatgccacccgagaaaagtccaaatcacaatcccttcctttttcctttattttcaagggatttaataaatcttttctttgttcataaataaaattctttattccaaaattctatgaatcattttcctttggtcccccacctcggagactgncaataatattcttgagaatattatttctataaattccataaaccatttctcgtcttccagaaattccaattaaacttccaaaattcatatcttcccaaccgctcttgcgattgactccgttcaacttctagtaattccgtaaaattgagatctatttaatggcactattattcaagtctaaatagggtctttttcttggtcttttgtttaggtttttgtttgtttgcgtatagttgcggttaccggattttcgccgatcgcgggttttctcgaagattcctgaagctccgtgaagaccttgagcaagacaagtcaccccttcaaccaattg

SEQ ID NO: 666 - DNA, 600 bp, Oryza sativa
gacccgaaggtacacaaaatcatccactgcgaattccagatcacggcgtcggttatctgcataacttttctgccgggactgtgccacctttagattatcccgaatgattctgactttagcttcagcttctctcaggatatcagtcccgaacacttggctttctccaacttggtcccacaatagcggtgtccggcatttgcgcccgtacaacgcttcatatggtgccatttgtatgctggcttgatagctgttattgtaggagaactcggcataggggagactcttatcccaagtcttcccgaagtccaggacacatgcgcgaagcatatcttctaagatctgatttagacgctcggtctgtccatctgtctgcgggtgatacgcggtgctgaaatttagtcgggtaccaagctcttcttggagcttcttccaaaagtgagaggtgaattggcttcccctatcagatacgattttcttgggaacgccatggagactcacgatcctagcgaagtagagctccgctagtttattccctccataggtggtcttcacaggaatgaatcgagctacctttgttagtcgatccacaattacccatat

SEQ ID NO: 667 - DNA, 2533 bp, Oryza sativa
agcaaaagtgatattaggaattgtcaaaaaaaaacaagcgatttttccctaattattgcacacgaattggaccttcgtctgtgaaattcttaaaccgtgaaatgtggtcatataacatggctaaatgttttctccagacatatggacccaatttcaatataagatactgtgacattagttttctttctataaaagtgcatgtatacattatccacaaatattgtaacagcaaggcgaccctctttacaagtcctttattgaagtaaattatttgagttatcacaattagaatctataattcaagtgagacaagctgttagaatcctaaatccaatcttatgtaaatgctcaaaatttacagtatatatataatcactaccttgtggggctttgatttcagaaagcttcaatacttcagttctcacttctcagttgtcagcaatgagtaggaccgttgttttcattttctggctgcgcagaacaattctcagcttcagtttccaactctgatggtggatcagcctccaacttcatttcctcagagctctgatcatggcagttgtgttcaacactcgccatcagtggctcactgggggcattttcctcatcatcttcactagaagatgacatagaggcgacctcaggaattagaggtgtcaagctgcttgaaggcaattttgctattgtggctcctccagatctgatcttggactcaatagccttgatcagcgaggcagcctcctcaggaggcacgacacgagcaccacaagcaagagcagtagcatgcaccagcgagtttggaccttttcctcgtttgtacagtttaggtagaaaaccgggtagtgggccctgaattaggaaaacttccctgtggttgttggatgggttctgcaggacggtatgaaattggaactgcttcaataggagcggccaacaacctgtattggccatctgcattccaggaaaatgggaagatgtcaggagagcattctaacggcaggtagcaatcaatcaagatccactggtagatagttatcaagtagggaaatcgactaaatgatgaaaagctttatgatgatgagtaagcactcatgtgatcgctggggaattgaaaccaaataatactagtaaatgttttaacaagtacagtgcaaatgctttatgatagtaaatactcccagtgattcactagaaatgatataacctctttttgaaagctaccagcaatggtatgaattatacccatatttgcacaactatacaagctttattaagtatcctaaatgacttatgttcttggattgcaaaaaagaaaaaaagtacccagataaacacaatgctccaagccacctatcattccaaagaaacaaagaaatgccaaactgaagagtttcaagatctatcgaactaaattgtcaggcaaactactatagtaggcaaaacaattggtaaatttttgcagatgaggacaacagaccacacacgaatattcttgttccttcaaaagaaaatggtgtcaagaggcattactaaacatataattattgggtcatttctaaaattttagtgttgtaaacttactatcttatcttgccacatatgatgaagaaaacaattgacaggcataaatatctaatagatttctaaactgatgcatctgtaatttctatctagaattttaaatattacttttacacttatttcctgtaaacagcagaaggaaatggattacctgcagaatctccagttggattcttcattataggcatgtacagcgtgagaggtatcgcaggaatagcaaccgtagtttctttagaaagtacatgaaacctttcatcctttccctgtaaggcttgattacaagtggaatccgcggtcagaactacgcataagatctttctagtccaatacagaatacacaaatcgtctaggtatattagggcctgtttggtatagctccaactcctaaatttaactccaggagttgagtctggagtggagttgtggagctgcctaaacccagctccacaactctagttcattttgtgagagagctccactcagctccactcccagttttggtggagccgaaactgtttggctgagctccagctccagaaggggtgaagctggagctggagctgtgccaaacaggcccttagtaacagtatgacatataagcaagcaggtaatttgtaacctgggatttctgcgaagagtcttcctttctgttcgcagccaaacaagaactttctgatacatgcttgacttcccccgctgttgatacaaaagcaacagttacaaataaaacaattatcccaacatcattcggtgtggagaaagcactaacaaagcaatggattagcttatcattatcataacatagttaccatttatagttaaatcacatgagagtggaatattgtcagcacaattcgagcttgaatgagtcaaaaggttggttggtattagcacaagactgggactgggctcttgcaaaaacttgagctgtggtgtcattgttttctgtttg

SEQ ID NO: 668 - DNA, 2067 bp, Oryza sativa
tcaagggtattacccaggtaattcaatttgatatatatcaaggttttctcaccattttatgtcttgggaagtaaaattttgtgcattccttctattttgtaacttctattttgtaataagttaatctaatacatgatacgatatatctcgagaatacttataattggccactcgattcacgggataagaatcggacgctctctggcagaacagacaacagctagctaatttatctccttcctttcttctctcttttaagaacttttttcttctaaattacttatccgatctataatccaatcgctctgttgtattcgtagaaattaaatctttaagatatcataaattatattctgataaaagaaaaacttgtgtttgaaaccattagaacttaatgttccatacgtgatagagacatggctcaacgtgtgttcactgtgttaaataatattcacgcagctaactgtatgtactctctccgctccatccatgcaagcgcttgcatgcatttagtgacattcaaaacgatttttctactaaactagttatctaatctacgatccgatcccaacattttattccttgcaattaaatttttacaacaagatatcgcatgtttatattctaatagaaaaatatgtttcaatatgttaacatggaatgtttcatacgcgatagcatcatatttcaacgtgtctgcattgtttttcacaaaaaagttaaatgttttagtggctgaaattttttcaccattataactccatgtttccatggtaaactgaaagtctgaaacgcttggctgtcaaattttttaagaatcaatcgggcgcccgatttgaattttttcgatatatctcagcactactaatctggataaggattctatagattcaactaatgcgtagaaaaacaattgaaacgaaaaaaaaacatagtcgtgttcacaggtatattttttttgttcatgtgcatgtcgaatttgacttttctttctgataaatatagtaaatttagattgtctaatttttattctattttttcatataagtattaggacgacattttcatacagtgcaccatttggcatatgccttgcgcaggaccttgtcactggtggtgcggacaccagtacggtgaccgtggaatgggccatgtcggaggtcctgaagaatccggcgatcctcgccaaggccaccgaggagctagacaccatcgtcggcgtcggccgcttggtgacggagggtgacataccacacctcccctacatccacgccatcatgaaggagacgatgcgtatgcacccggtggtgccgctgctggtaccccggatgtcccgtgaggatgcctccgtcgccggctacgacgtccccgccggcacgcgcgtgctcgtcaacacgtggaccatcagccgcgacccgtcgctgtgggactcgccggagagttccggccggagcggttcgtggaagcgagatcgacgtcaaggggcgagacttcgagcttctgccgttcggcacgggccggcggatgtgccccgggtacagcctcggtctcaaggtcatccagctcgccctcgccaacctgctgcacgccttctcctggaacctccccgacggcatcgctgccggcgagctgagcatggaagagatcttcgggctcaccatgccgcggaagatccctctcctcgccgttgtcaagcccaggctgccggaccatctctatgccgagccatgatgcatgacgcaccatgcgtcgatgcgtgcgtgcatgcatgcgcgtcttctgcattcgacgaagctataggctccagttcaaggatataaaactccctagtgcgtcgaataatagaactagggtggtttaaataatcgtacagtagctctgcaagatatgcaagctcaaaatgttatcacctgcactatagatgtatgatggtaagtcatttgttgagacggatatgtccagtccatcaatggctccatcctaaataaaggaattttatgtttgccacaagtcgatgatcaaatttatttttatgtttattttattctttatctttatctttacgga

SEQ ID NO: 669 - DNA, 678 bp, Oryza sativa
gtcacctttcttcaaaataataaagatatctttgcgtggaaaccatctgatatgcctggtattcctagagaggggattgagcactccttacatgtcaaagaagacgctaaacctattaaacaacgactccgccgcttcgcacaagacaggaaagacgcgatcaaggaggaattaaccaagctgttagcagcaggcttcatcaaagaagtccttcatcccgactggctggctaacccgggtctagttcggaagaaaactgggcaatggcgcatgtgtgtcgattataccgacctcaacaagtcttgccctaaagatccttttgggttgcctcgcattaaccaggtagtcgactcgaccgccggctgtagctactcagttttttggattgctactcagggtatcatcagatccgactgaaggaatccgactgcttgaagacttcattcatcacgccctttggggcctattgctacatcaccatgccattcggactaaaaaatgcaggagcaacttatcaacgtatgattcagagatgcttctcgatgcaaattggccgcaatgtcgaagcttacgtggatgatgtagtcgttaagactaagcagaaggatgatttaatctcagatctagaagaaacctttgcaagcatccgcgctttcaggatgaaactaaaccctgaaa

SEQ ID NO: 670 - DNA, 2221 bp, Oryza sativa
ttcggaacacattgatatccaggaggacctaacatatgtggagaagccggttcgtatacttgataccagcgaaaggagaaccagaaacaaggtcacccggttttgccgagttcagtggagtcatcattcggaagaggaagcaacctgggaaagggaagatgagttgaaagccgcccatccgcacctcttcaccagctcctccgaatctcggggccgagattccgtttaaggggggtaggtttgtcacaccccgaagttttcctcccaagccaaaattgtaatttttataaatgaccctaagaaaatgcaggtgaaatcaggagaaaaccctaagaaagtaatgcaaataataatcggatttgacatgtggaatttttcttgagttctacatgtcgaaattcattaacaggatttttagtggaattttcagagctctagaaataattttaaccaattaaaattgagcaagcaatattttaattccagggaaaatcctttttcctttttctttttctttttcctctctttttcctccttttttttcgaatgggccgccggcccattccctccttcctcccctcctccttgctgggccggccgcaggccgaggcccagccaggccgccctgccgcctcctctctcggggtcgccgacaggtggggcccacctgtcggtccttcccccacctcccgccgatctcgctcgcgccgtcgcgcccgcaaccgccgccgcgccctcgtctccgcctcctccgggccacgtcgaccacgcccgcgcgtgcgccgcgtctcccgcgcccactcctctccctctcccgctcgcgcctgcgcccgagatcgccgggattcgattttcgaatcccgcctctctctcctcccccactccccacgtcggccggcgattcccgcctctctcggccagtccggttccctctccccctttttaagcatcgccgtcgtcccctctcactttttccccatttcgccacactctctcgagcctcccatcgctcccgcgccgtgcaaccccttgccgccgccttttccgctactccggccgccgctagccgccgttagggtcgccgccaggccgcgccgtcgccgccgtcgggttcgcgtggccgagatccaccccgtccacccctcctccgtcgaggttcgtcgccggagcctcgttccctcgcattcgggtgagcaccacctccaccgccgccttcggccatggtttccggtcgccgtggtccatctccctctctctaatccctctcttctccttccttagggcaccccgaagctcgtccgcccgccgacgtcgtcctcccgtggcttgccgtcgccgttcgccatcgtcttcctccgcgccggccaccctcggtgaggcaccccctccctttttttttcccctccctctccctcctagccgccgctttagcgccgccgcccgttagtcgtcgctttagcatcaccgcccttcggcgccttgcgccgccgtctccgccggcggttgccgtcgtcggcaacgcgcgtgcgcgtgcgcgcaccgtcgccatgaccgctcggccggctttgtgccgagccgagcctagcctggccgccgccgcaccgtccgatcggccccgggccgatccgggccgtcgatcccgtggaccggcggtggatcacccgcgtggtcccggtccacggtagaccggccacccgtgcgccgctgacatgcgggccccgcttgtcggcgccgcaccccccccctccgtgctgacgtcagccctggaatatattgcgcaataaatgatttaaggtttttcttttatagtaataaacacagtgaatcttctaaaattcataactaattcatccgagctccgtttaagcccattcaagtctcagtaaatcaagaaaaatgtgtagaatacattaaaaatggttttgttccctgtttcagtagtcttatagcctgtttgcaatgtttgctttgtatgtcgctagattccgattcctccgacgctccggtgtactttgagatagtcaccgaggttcctccagcagcagagcaaggcaagtcatgcttgtcacttgaacatgttgatcctatagtgcaaatgctctattgttttctttcaaatattgcattgttttataatattactatgggatggttacctattgttacagccatgtttttggatatcttgctcctttgttagcttggggttatagcatgatta

SEQ ID NO: 671 - DNA, 1034 bp, Oryza sativa
ttcgaattgtataagttaaattttagcttgcatgtttgaaaaaagatactcatatattgatctatttaaaaataataattttttaaacgacatgcacaacaagagaacgtccccgaggaaaaaaatccacttcctatactccgtgacatcagttgctatattatattcctattcctagtcggagttgtagtagcgtttcagttcgtacgtagagtccgagtcagcttccacatcgctcatatatatgccgcgtgtttcgtaaccgtcagtgaaacccttcgcgcgaagcaaagcaaagcaaagcaaaaccttttttcccgccaagaaacctcaatggcggcggcgaagatggcggggctgacgccggggttcaagttcgagccgagcgacgagcagctcgtgcagttcttcctcctgccctacctgcgcgagctgccggtgcccctgggcggcctcgtcatccgggacgacccgaggagcgtgccgccatggaagctcttcgcgcgcaacggccggggcgacgaggaggacgcctacttcctcgcgccagccgacggcgagggccggcaggcgcgcacctgcgacggcggccgcggcaggtggatcacccagcggctggagcgcacgggcaacctgcggctcgccggcggcggcggcagcggagaggccgtcgtgttcgagaagcacaggctcaactaccacgccggcgaggggcggtgcggcagcacggggtgggtgatgcacgagtacgccgtcgtcaagcccgcggcgctcggcgcccgccacagggcgtgccacatcgccttcaccggccacggccagaagcggaagcgcgtgcccgacggctacgtcgacgtcgaggacgacggcagcaaggccagcaccaacgcggccgccgccgtccctccttcctcgacggcggcgatgtcggcgtgcccatcgaatgtcacctataaccaagggtgccatatctcgccggagcagagcatcgaacagcacttccccgcggagcataataatatccaaatccaaca

SEQ ID NO: 672 - DNA, 661 bp, Oryza sativa
  unsure (1)..(661): unsure at all n locations
aatccacttggagaatttggcaatggccacaaagagatgcctgtaaccgcccactgtctttttgaacgggccaaccatgtcgagcccccaaaccgcaacggcaaaaacgtgggaatggttggcactcttgaactggtaaaaggatntggctgggcgaaaatgggcaaccttcgcacgtgcgcacaatnttgtcggcgtcggacactgcagtaggccagaaaaaaccctgccggtaagctttgccgacaatggtgcgtgcggcggcatggtttccgcatattccagaatgtatgtctttcaacaattgtctcccttcctctagagatacgcacggttgcagaattcctgaagggcttttcttgtatagctcggcttcatgaataacataaagtctgcttcgccttgaaatccgctcggcttcatctttatctttggggagttcttgagaagtcaaaaatcatatgaggggctctctccagtcggcttcaatcatagctatgttatgagtgtccgcaacttgagttgtttctttctgaggtacggcggctcataaaggtgttcgacgaatacatcggagggcgccgactcgcgcttggatccaaagtggcaagtctgtctgcggcttcattgctgtgtctgagaacgtgactaacctcaagtc

SEQ ID NO: 673 - DNA, 1552 bp, Oryza sativa
gcgaatgaacgtgaacgaacgtgaacgtgaaatgcaatatatatatgttacttcgcgtttatcttaatacatctttttgtatcttgcagaaaagacgtgttgtcgaagtcgtccctcaagccggagtggaagagctagccctagaaggaattcgtgcaggcaagtgacgtaataatataaatgattgttatatttgtaatgcaattaagattattatatttgtaattagacttagcatataagattgtgtagtgttctaatattatttgagttttaatataagattattttatttgtaattagacttagtatataattattgactatgaattggtgcgactcctagcaattgactattttagtgttaattagacttagcatatacgacagttacacttagcatacatgactattttagtcttagcatgtaatattatttgagttttaatataagattattttatttgtagttagacttagtatataattattgactacggaattggcttgtgcgactcctagcaattgactattttagtcttaattagacttagcgatacgaaagttacactgagcatacatgactattttagtcttagcatgtaatattatttgagttttaatatagattattttatttgtaattagacttagtatataattattgactagctagggtcgtataatatacgtcacctagacttagcttatatcatgatttgtaattagacttagcagtaaggttgtgtagggttctaatgtacgacagttacacttagcatacatgacttagattgttaaaacataaatgtctcatgacttagcagatgtttcttgtatcaccagatggctgaccgcgatgagtaccagataaaatacggtacaatcgcgaaggtgaagcaggcaagtactagaaataagaagagttggaacgaggatccaacccagtacttgaatgaggaagggacgtgagaagggatgcggaggggaaccagcaggggcacgtggaaagggatgtggaggggaaccaggaggaggaggctagtggaagtcaaccctccgttgaccagaagagggcacgcgggcaacgaggtgcagcgaagaagcttgagggtcggcacatcataacgaaagtggaagaagatggacgtcctagtgccccggccgaagctgccaagaactatgtacgtcacagcggttgggttgtgcgggataacgtgcctatcagtacggtgtactggcgaagaacaagggcacgcggagatcatgagagctttgtcctagattcggagaaagagatgctgtggaccacaatgctcgagacattcacccttcctgcgggtacagaggacaaagtgaaaaggtggactctgaagaaaatggcagaacagtttcagagcttcaagggagatctgtaccagaagtatatcctgaaggggcagacaccgaacttcgacacattcccaaagctaagggatcactgggacgagttcgttgtatataagacaggtgaacaagggcaggtgatgatggaaagaaacaaagaaaatgc

SEQ ID NO: 674 - DNA, 27500 bp, Oryza sativa
ctcgggttcttggtctctgcccgaggtatcgaggccaaccccgagaagatacgagctatagagcggatgcgcccccccagcaagcttaaggatgtgcagtgcgtcaccggctgcatggccgccttaagtcggttcatatcgaggctgggagagaaggcgctacccctatttaagctcctcaaacgctccgggccgtttgcctggacggagaaggctgagagggccttcactcagttgaaggcgtacctcagttctcccccagtcctggtcgccccggagccagatgagccgttgctactctacctggcggcaaccccgcaggtggtcagcgcggcgttggttgtggagcgcgacgaggacaaccctcgctccgcgcgtccccgccctgtgtcgactcgacccaggagagagcagggaggagaggcccccgagccgaacggcggcccgaggcccccgacggccggagctggccctccgcctgcttgtccgacggtgccaggcgcccccgacccccaggatggccccgaggccactgcgggaaggccgcgcctgtcgccctctgaccccgaggtcgtcggcacagaagccgagtgcgccccgcgtggcctctctgacgaagagcgccctggagatgcggcccctggcgaagaggatcggccccgccgaaaggtgcagcggcccgtctacttcgttagcgaggccctccgggacgccaagacccgataccctcaggcccagaagatgctttacgctattctgatggcttcgaggaagttgcgccattatttccaggcgcatcgggttacggtggttacgtcctaccccctcggccaaatcttgcataaccgagagggtactggacgggtggagaaatgggcaatcgaactctctgaattcgatttgcgctttgaaccacgccacgcgatcaagagccaggccctcgctgactttgtggcggagtggaccccagctcccgagccagtccccgcccccgaggccagctcgggcccctcgcagctgcctcacaccgcctactgggtgatgcagttcgacggctccctgtcccttcagggcgccggtgcgggggtcacgttgacctcgccgagcggagacgtcctcagatacctggtccgcctcgactttcgggcgaccaacaatatggcggagtacgagggactccttgcgggactcagagtggcggctggactggggatccgccgcctcctggtgttaggcgactcccagttggtcgttaaccaggtctgtaaggagtaccagtgctctgacccgcagatgaacgcttacgtgcgccaggtgcggcgtatggagcgccatttcgacgggatagagcttcggcacgtgcccagacgggataacgcggtcgccgacgaactctcaaggctcgcttcctcgcgagcccagaccccgccgggcgcctttgaagaaaggcttgcccagccgtcggcgcgacccgaccccctaggggagacggacgcgcctgaacggcccctgaggcccgtcggagtccaggcctcgggacccgaggggagcgctcccagctcccctagattgattgcttggatcaccgagatccaggcgtacctcgcagataagactctacccgaggaccgcgaagggagtgaacgcgtccggcgcatctccaagcgctacgtgctggtggaagggaccctcaatcggcgcgcggctaacggagtcctcctgaagtgcattcctcgggaacaaggcgtcgagcttctcgccgatatccatgaaggcgagtgcggagcccactccgcctcacgcaccttggttggcaaggcctttcgccagggtttctattggccgacggctctcaacgatgcggtcgacctggtccggcggtgcagggcgtgccagttccacgccaggcaaacccatcagccggcccaggccctgcagaccatacctctttttacatatgacatcggctcagagataaatgatatgacatcggcacttagccgatcggctatcatttatagatttaaccgcggtttctttgtctttatttcttattgattgcaggatcaaatcaactggcacgctagcacacccgaaggcgagttttggacctgcactggagttatcgtgttttacgtcaacagggtcccatatcttttttatctgttttggctgactagactgccacgtatgcgtccacgtaggaccaaaaccggcctagattgatttaggggggtaattcatccggtttgtaaagtttagggttaaaaataactggtattgaagtttagggtggtaaatcggacgaccacaattgttcaaggggtaattcgtacttttttcctttgttttatgggatgaactgatggaggaagtagattttaggcaaaatttgctacaggacaccgaaagattgcggcctttgctgtgagacattcgaagatcgtgaatcttttcgtggacactgtaaaaaagtagtaattagctgttggacactactcccatttttttattatttccagttaaaatggagagagaaagttgtgtaagtaccaaaatgcccctgctctctccttttcttttcccttcttcctcgtgcttgctactgagccgagcataggcgcgacgcgcgcggccagcccacggtggggcggtggtggcagtgcatcacccaggttcaccgccgacggcgacgccgtacctgaagctgccgagtaggtaggcctggagacatgttgatggcgagcacgatgtcgttgccatacctctttcgtggccgtttgctgtctgggggctcgatatcctgggtccgttcaggcgggccccgggcgggttcgagtatctgtatgtcgctgtcgacaagttcactaagtggcccaaggcttatccggtcatcaagatcgataagcactccgcgctttaattcatcaggggcatcactgctcgatttggggtgcctaaccgtatcattacggataacggcacccagttcactagtgagctcttcggtgactactacgaagacatgggcatcaagctctgcttcgcctcccccgcccaccccagaagcaatggccaagtggagcgcgccaacgcggaaatcctcaagggcctcaaaaccaagaccttcaacatcctcaagaagcacggcgactcgtggatcgaggagctgccagcggtgctctaggcgaaccgaaccacgccaagccgagcaaccggggaaacgcctttcttcctcgtctacggcgcggaggcggtcctcccatctgagctcaccctgaggtcccctcgggtcaccatgtattgcgaggctgatcaagatcagcttcgccgagacgacctcgactatttggaggagcgaaggcggcgcgcggccctccgagccgcgcgctaccagcagagcctgcggcgctaccatcagcgccacgtccgggcccgatcactctgcgtcgacgacctcgtcctacgccgcgtccaaacgcgtgctgaactgagcaagctctcaccaatgtgggagggtccgtatcgagtgatcggcgtcccccggccgggctccgttcggctggccacgggcgacggcaccgagctgcctaacccgtggaacatcgaacaccttcgtcgcttctacccctagtgggggtcgggtgtcatgtctcgggctccggccaaccccgcacccccccgggcgtgcaaggttggccgggggctaccacatgcatatacttatcttttttctcttccgtatttcaataaaagcattttcgatttcctgaggactgtgtctgtgccatcgtttccttttgaagaatcttggcttgaattagcacgctcgtgcccgaccctgccctcggtggcccgggccggctaaaatcgccaaacggggcccagaaccgagccgtgccccggggcgtggtgaactccgggggggaatcggcaaaggcccacaatcgggtcatccataaccctcggtcaccgcgctcccggcctagccagtctcgacacgtggatctccccaggcactagccccgacccgcgccgtttgaggctgggacctgggcacgagcccttgttcaagccaagacacagaaggaccgcggcacagaccatcctcgtctcatacacacaacaaacagaactgacacagaaatttcctctttacttgattgcagattaaatcagtctatacaagaagggggcccgaaggcctcggaagaagaaggaaaaattattaagattggcaggggcctaggggctcactccgacgcgcccgggtcgccggcctcgtcgtcgctgtcgtccgcaccgtcgtcaccgccctcctcgtcggagtcgagggcgaacgcgagccgaggggccgtaccctcgaagctgtggacgatgtggtcggcggcgtcccggacctgcgcgcgcgcgccgtcctcggttccgggagggaattcttccagcgctgcccacggggagaagtcagggtccctggcctggcaacttgccagtacgagctccaccttcgtgtcacgcctcttcgaggagttcatcgttttcacaccaaaagaaaattggcaccgcgttttgtgggaccttataagattgtcagtagaagaggagaggttgcttatcagttggagttacctcaatctttggcaggagttcataatgtgttccatgtttcgcaattgaaaaagtgtttaagggtacctaccgaagaagctaatcttaaacagatagaagtccaagaggatctgacctatgttgagaaaacaatccgtatcttggaaatagatgagagaagaaccagaaatcgagttatccgtttttgcaaagtccaatggagtaatcactcggaagaagaatcaacttgggaacgagaagatgaattgaagtcagctcatccgcatctgtttgccagttcttccgaatctcgaggacgagattctgtttaagggggtaggtttgtcacaccctaaaaatcctaaatatataaattgttgcttaaatggaattattagattttattttaaaagcctagaagagaagatcaaattttaattaataaattccaatataaaatgggccagataaaatttcattaaatactttgcttaattctataattcctagatttttctgggatttatttgagctaagaaagtatttttaataaatagaattgcatttaatgaataatttaaattgaaaaaggtttttaaaagtctcttttggctttgggccgaaagacggcccaaaaacctctctccctctctccctcggcccagtcggcccagtccagcaacagccgccgctcgcgcgcgcgtccgcccgctgacaggtggggcccacctgtcggagtcgtcgtcttcctcgcatcggccgccgcccgaaaccctagtgccgcgccgccgtcgccgtccgctgctcttccgccgcttctttggtcaccggtgagttcgccgcaacgttctctacgtcctggtgccctccgttcgtgccgaagcgccgtcgttcgccggcgagcttgcgcgcccgagccgccgagccgccgccggagatgacgtcaccgctgacgtcatcagggtctgtctgctgtgagccgccgtggaccgctcgatctcggccgtccgttttggatggatcgatctcggccgttcgttcccgtgaaccgctgccgtgcgcccggtccaccgcaaaccctagccgctgacgcaataaaccctttttccttttcaaaaataattcattattgcgtcataattcaattaaaatccatataagtgttttaaatcgatttaatctttgaaaattcataactaattcatcttagctcggatttagttggttcaagtctctaaatttttctaaaattgagatctacatgttaaaaatatccacatgtattgttcaagcttgtttatgtgctgtttgggtgtttttgctcttttctgtttagattccgacgtttccggagagtccgttttcgcaggagaagaatttgaagagttccaaggccagcaagacaagtcacacagatcccaaacaatcctttgagcatgttgatcccgtttaaagctattgtttctattcaactatcgcatttattttcgaatgtcattgggtggaattaacctattgtttgttatagcccttttgttcttgaatactttattccttgataccttgggttattataacttgactagttgggctatatatattggttcgactacatattagatgtgattgcttagccatgcttagaaacattagcacactattgagataacttatgactcactattatttaatgatggcttaatgatagttcacgatggtcaatcgtgattggttaattaattacttgccaattaaaacttgataatggtgggttgtgagcacatggttttgagagtcgtgctcatgacaattaaggaccggttcacgagtttcggttgtgaaacattaaccgtgccaaccacaagccagcgtgggcaacggctttaccttttgtatagcatggttcattgcggagcaccagactgagaagtggcggagataagcccacgggggtcgctggggagtccatgccttgtttataagggggtgattatgatccaggaaaggtgctctgtagtggattgtgttgtgcgaggggtattgtcacagctcctttccgaggtaccgtggtggtattgaggcacatggtgacatgatgtggggctgtgtcttgtgggtacagtggtacacctctgatcagagtaaaactattcgaatagccgtgcccgcggttatgggcgggtctaacaatgtctttcgtgattagtctcacacctctcatcatgataacagatgctataactggtaataatttgtttagctcctggtttggaatggtatattcctggtttggagatagatctgtacagccgggtatggttgtttagaaaggttgggcctatacaacagggtatgttgtatagcgttgaattaatattgtttaattattacttaactgttttattaaattctgaaatgtttattaaaggctgtttatgcaaatggaaccctattataccatcctttgttattctgtgcacttgcatatttgctgcgtgacttgctgagtatgtcatatactcaccttgcaatcattcatcagaggaagagttctacagtgaagctgatggtgtggaggattaggtgtagccctggtcaagctgcctgtggagtagagtcgtctgcgccgtttatcttatctttccgctgcttagatctttattgattgagaggaactatctacctctgtaatgacattttatacgcttattaattagagtaataattgtactctattatcaatttgtaattgtgtgcctcggctgattcctggacgagggttcacacacatgtaagcgtttggaattttggatagaaattccgggcgtgacagtaataccctccaaccgccatagggagtgaatctccaccgtttcctcaaaaccctgcatccatcggcttcacgggaggttcggccgaacctggggccggcccaaccagcccacattttggctggtggcctcctctgctgcttcacttcgtagacttgtgaattttggcctgatttgtcgtgtcaattctgagttcttggcccattcatacataagtctggtcttcgacatcgtccgattgatttatcgtttaagttgatgttgattctccttcattttattgtcattctctgcaaaaggttagtagacccaatactagtggaatattattattctaacatatttatgcattgcaagcatcactagttctctcctgttttagtaatattgacggtcgaaactgatcgataacgaccgtcaacagacacccattggaatgtccccatatcagatagtatacgggaagtcatgtcgactacccgtagaacttgagcacagagcatacttggccatcaggaattggaatatggattttgagggagcaggagaatggagaaaaatgaaattagctgaaattgaagaatggagagagaaggcttaccacaacgcgaagatatacaaagaaaggacgaagcgctggcacaacaaaagaattaaaatcaagaaattcaagccaggagacaaagtactgatgttcaactccagggttaagcttttcggccatgggaaactgcgcagtaaatgggaaggaccgttcgacgtcatcgacacctcttcgcacggggcaatcacactctgcagcgaatctggtaacatatttaaggtaaacggtcaacgcctaaagattttccttgagccaaatgaaactttagatcaagaagtggatgtcattgaactaatcgattatgaacctgttgacaaaaaaaatcgaacacaccagcctggtgttaacaaccaaatttggtaatatcggcatcgggaaagaagattagatcgaatccaagtcagaggcggagatcgagttcggaaacagacagaaatcggctggagtccagatcggctacgattaggatcggctgggtctgagtcgggctaggcaagccgatgcagccgattccgacaatgcgacttgatgtatgacatcgggttgaattgaagtgcttcaaggtgattggcgcacatggatagagtcctgagaaggcaattgtgtctattaattagggtgttttatgtaaagtctgccgcaaagacttgtggtatcttagagtttgttagagatagttgtcgtgtccgttacggtcatatcttgtaattttcgggtataaatagacccgagcgctatgtaactttaaaaaagcacacatgttcaatacaatctcggcgcatcgccacccttttttgctttagttttatttcgacgagttcttgctttcgggttgagctgcatcggtttcgatcttcaacaagaggtaaaacttgttatggcggcttgcattctcgggattagtgcttccatctttatgacactctaatcttgtttatgtaattcgtcgagttatcatatatcctacataatccttggcaatatcgatatccaacctacaatcggctaacatccgtcaatagaaggcagacgattaggttaaataccattgttgacttagattatataggatatctaccactctatgacacatccaacagcttgattgtctagatattgtccttcttttcatacttatagctgcatcagttaagtttgatcttatgagtcatgattagaatctcaatctctagcctacttcttggttgctgattagggtagtatcggagtttcagccgatcttacctgatttaactactttttatcctatatgcttgattaacatgttaaatctgccctttacgttaagatcttgctgcatttaagtatattaggcttttgtttagtatattctacttgctttaatatcttaatatagagtggtatcggagtattagccgatacatgctagatctatctgatcggctatgctatgaacgtatatagtctcattattaatatatatttcgatctaagtgatttatactgtctcggcatggcgaccgatctatcccaatcacttgatttaagtatatatcgatataaagattatatattggtaatacttgcagccgatcgagtagattcagtccttccttatttattaatgactgccgatcgatgcatatatgacatcagctcaaagataaatgatatgtcatcggcacctagccgatcggctatcatttatagatttaactatggtttctttgcttctatttcttgttgattacaggatcaaatcaactggcacgctcatacattcgaaggcgagcttcggacctacactggagttaagcagatctcctaggcctcgtgttttctgtcaacatgcttttggcacgcccagtgggacatttaagaagtcagccaacaattcttcctcatggccgagaaaccaccaccatccccagctagcccaggctctgttaaggaaaagatgctgaaattagggttgactgacgtcaatgaaggaaatgtcgtgctgatcgatccagaaaaattcacacctgagtagaggaaagagtttgaagcaatgttgcagcaagcacgggatcagttcttgaactcattcatgtagacccgcaaggggacacttgttcagaagtacaaaataaaagtggttgctgctgatccggggaccagttcttctaaggatggagatgggaaacaagctccagacggctcggctcagctgagtaaccaaagtgctaccgacagctctctaggaaatcaaggtgacaattctcaaggagtccatggagtgcaaggtgacggggtgcatggagttcatggagttcaaggtgatggtgcccaggggttgcaaggagaaaatcttaatcagaatagtgatacggcacaagattttttcagtaatttccaagatcgggttgactacgctgtgcatcatgctttcatcaatcaatctagggtgttagtcaataccttatcaaacatgatgaagtccatagccgatggttcaatagctgagcatcaggctgtaggcccggtttatttgcaaggtgtctttccaaattatcggtctttgattaccgatgttcagccatcaactcaagcggttccctctgttgcaccaacatctcagtcgacggcactggcgtcaactctcctacttgttccgcagcaatggcgtcaggccagccagtgaaccctcggttgttaatgagagagcagctacagcatggcgggcaggttgcaaatcagctgacctaagatcaggttgctgccacgtttctgccgcctcaatctattgttgatccaatacagcagcagtcgattcagcagacacccccaattcagcaggttgtgcaaccaattcagcaacaggtcatgcaaccagttcagcaaacaccaccaaggcaacagcctttgcagccgattcagcagacgctgttaagacagcaaatcattcagtcgatccagcaccaaggttcaataggtgcatcggccgggttggcaacgcctggtggtcagcctgtacaacattttttaaatcaagttgtcctagaacacttggttcaccacgtatagccggatggcacagtaatacctcaagttgttcctgagcatttggtacgtaatatccagccgaaccttcataattaccaagggggtaacttgaattaccaagatcagcctccttccccacaagctcaatatcagccaggtggattggctcaacctcagttggcgcctcaatatggtcagttcgagcccatgcagcaacagtcacaaggggtagctcagcaacgaccgtgggccgatgtgattgctgacgtaatgagggaacagtttgggcttaaaccaaaagagactggaagcttgtattggcagccttaccctgagtggtttgagagagttcctcttcccaatcggttcaaagttccagacttctccaaatttttgggacaagatggtgtgtcaacttatgagcacattagccgtttcttagctcagtgtggtgaagcatcggctgtagacgctctaaaggttaggttattccggttatctttgtttggatcggcttttacttggttttcctctttgccgtatgggtcgatcaatagctgggccgatttggagaagcaattccacagctatttctacagtggggttcatgagatgaaattatccgaattgacagcgattatgcggcggtatgatgaacctgtgcatgagtatattcagagattcagggagatgaggaacaaatgctttagcttgagtttaactgatgcccagttagtcgatctggcttttcagggtatgattgctccgattagggagaaattctcgtctgaggactttgatagcttgtcacatctgatacagaaagtaaccttgcatgagcataggtccgcggaagttaggaaaaactctaagaaggttaatcatgtttgtccgtacatgtatgggttggatgatgacgaggacgattctgaaatagctgtagccgagtgggtgaggagtaaaaaggtcataccatgccaatgggtaaaaagttctggaaaagaggagaagtatgactttgatattactaaagctgacaagatctttgatttgctactccgagagaagcaaattcaacttcctgctggtcatacaatcccatcggctaaggaattaggcaaaaagaggtattgcaaatggcataattctgggtcccattctactaacgattgcaaggtttttagacagcagattcaagtggccattgagggaggcaatattaggtttgatgattccaaaaagccgatgaatgtcgatggtaatccttttcctgtttatatggtgcatacagctggccaaacagccgatagggcccgtgcaaggggttttcgggtgaattcggctaagattatcaacaaatatcagaagaagtatgacaagcagcagaagaagcatcatgagaaatacgatgatggttttgatcctcattggggttgtgagttctttagattctgctggaatgaaggtatgaggttgccatctattgaaaactgccctgggtgcagtgatatcgtcaagaactcaagccgatcatataataggggcaatcggttaaggcagacaacagtttctgttcattaaagattgggcccagtaaatcaagatcatggccaagaggacgatgtaatcaggaagaatcaatggtgtccttatggtattttcacgaagaatcagaagagaagggttcagagattaaggaatagggagcaccttcaggaggttgaacaaaaaattaatcatcggctgaagaaagcaaagccaaggcaggagtggcatgttaagaatcaggttcctgtagccgatgatattgcagccgatgaggcaaagaggttggcaaaagggaagagtgttgtgacggcaccggttaacatggtctttaccctgccagccgaattcgggatcgaccaagccgatgtcgatgaggtggaagaggaatcggctaagttggttctgtcaccagaacaggcagtgatcgagaaacccgaggggacagagaatcggcatcttaaaccattgcatataaacggctacgtcaatgggaagccgatgtctaaaatgatggttgatggtggggccgcggtaaatttgatgccctatgctacgttcaggaagttgggtagaaatatcgaggatctcatcaagacaaacatggtgctcaaagattttggtggcaatccatcagaaaccaaaggtgttctaaatgtggagctgacagtcggcagtaagactgttcctaccacgttttttgtcatcgatgggaaaggttcttacagcttattgcttggaagggattggattcacgccaattgttgcattccttcaactatgtatcaatgtttgattcagtggcaaggcgacaaaatagagattgtgccagtcgacaggtcagttaatgttgccagtgctgatttagctctttgggagatggatggccttgattgtttatatggaaaagtctgggatggagattttctaaaagtgtccaattctgatatacagccaattgaagatggagaacccaatctattattttgagggcgtcgtggagggttcaagtgtctacactacggacatggtagatgatctcgatgacaagcaaggtcaaggtttcatgtcggccgatgatttggaagaagtggacataggtccaggcgatcggccaaggccgacatttattagtaggaacttatctccagagtttagaaccaagctgatagagctcttaaaagagtttagagattgcttcgcttgggagtattacgagatgcctggactcagccgattgattgttgaacatcggctacctatcaaaccaggggttaggccacatcaacaacctccgaggagatgcaaggccgacatgcttgaaccggtcaaggctgagattaaaagattatatgatgctggttttattcgtccttgccgatatgctgagtgtgtttctagtatagttcctgttatcaagaaaaacagcaaggtcagggtatgcattgatttccgaaatttgaataaggccaccctgaaagatgaatacccaataccagtagccgatcaactagttgatgcttcttcgggacttaagattttgagttttatggacggaaacgcaggatacaatcaaatttttatggccgaagaagacattcacaagacagcttttaggtgtcctggtgcaatcggtttatttgaatgggttgtcatgactttcggcttgaagagtgctggagctacatatcaaagagccatgaattatatatatcacgatctaatcggctggttggttgaagtctatattgatgatgtggttgttaagtctaaagagataaaggaccatatagttgatttgaggaaggttttcgagagaaccagaaaatatggcctgaagatgaatccgacaaagtgtgcttttggtgtatcggctggccagtttttgggatttcttgttcatgagagggggatcgaggtaactcaaaggagtgttaatgcgataaagaagattcagcctccggagaacaagacagaattacaagagatgatcggcaagataaattttgttagaaggattatttctaatttgtctggaaggttagaaccttttgcaccattgttgagattgaaagccgatcagcagtttacttgggaggcagagcagcaaaaggctttggataatattaaggaatatcttagttgtcctcctgttttgattcttccacagaaaggaataccgtttaggttatatttgtcggccggtgagaagtcaatcggctcggtcttgattcaggagttggaagggaaggaacgagttgtattctatctcagtcgtcggctcttggatgctaaaactagatattcccctgtggagaagttatgcttgtgtttgtatttttcatgtacaaggctgaggcattatctactgtccaacgagtgtattgttgtatgtaaggctgatgttgtcaagtacatgctatcggctccaatattgaaaggaagggttggaaagtggatattttccttaaccgagtttgatcttcggtatgagtcaccgaaggcgattaagggacaagctatagctgattttattgtggaacatcgtgatgattcaatcggctcggttgaaatagtgccatggactttattctttgatggatcggtgtgtactcatggttgtggtatctgcctagttataatttcccctaggggggcatgtttcgagtttgcttatactattaaaccgtatgtgactaataatcatgcctagttataatttcccctaggggggcatgtttcgagtttgcttatactattaaaccgtatgtgactaataatcaagctgagtatgaggcagtgctcaaagggttgcaattactcaaggaagttgaagccgataccattgaaatcatggggtaaaatagaggttgtgggaacaaattcttacacatatatgtgtgctgtgattttatttttattcctcaccaaaacaaatcttgtaatagatctaaagattcaaaattacatgaaacttatatacaagttatactatagttacgtgcaagttacagtgtaattacactatgattgtactataattatatctgtcaaatttttaggggaaaatttatcgataaatgtataggtggacatgtaaaacgttaccactggatgaatgatgcaagaacaatggtaaatgtcagattcaattcagggttctcgttcttgtggagtcactcacattcagatgatgcggctgcgacgagggcacatcacccagcttctgctgctgatacttgctcccgttcgcctcctgcaggagatcaccattgaagaggctgcgacaaccctagctcctcctcctcctcagaccatttcctccatgataggctccctccgtggccgcggccgccgcctcctcgccgccgcgtccgccctcgcgctcctcctcctcctcctcctgtcccgctcgccgcgtcgtcgtccccacgggtatggcgtcgtcatcgacgccggtagcacgaggagccgcgtccacgtcatcgcctaccgctcccccgccgcctccgcggccgcggccgcgctcccgtggatcgactgggcgcgcacggcgtcgatgaaggcggccccgggctgttgtccttcgcctccgatccgggcagcgtgggtcggtcgctggcgctgctcgtggagttcgctcatggtcggcggcggcgaggcccggcatggtcgggtgaggcaaggtgggaagtcacgcgggcggcgggtgaggctcatggtcggcggcggcggcgagggccggcatggtcgggtgaggcgaggtgggaagtcacgcgggcggcgggtgaggcgggcggcgtggctggtgtggcgggcggcggagataatcctctttggcgtgcgttctttttttcgttctttttggcgtgcagtttctttttccggagcgagacgcagtgttaatccggtgctaattgcaaccgcaggattaatccggcgctaattgcaatcgcggtgttaattacactaaacaactcgtgctttttatattagtctagatttggcgtgcagtttctttttccggagcgagacgcagtgttaatccggtgctaattgcaaccgcaggattaatccggcgctaattgcaatcgcggtgttaataacactaaacaacttcgtgctttttatattagtctagataacatagggatgagtagcaaattgttaaacgccatatctgtggagtgataaataatataaatgcccccggacgagatggggggaaaagcagcacaaatcagtaagcccagtgaatactcagagttgaagagctgacttttcccttgcaaaatgttactgctgggtgctggccatcccgtatacgctttccatatgctgatcaacatcctgatgctgcaaatcttttagtaccacagtgtttcatgtccataactgcacggagaagctattcacctgatgaatagatgataacaaatttggacctgcctaaattttacctggccatatagttaacgtttaaacttatcctcatggtaaccgttgagaatccaatgcggcaaatcccaatttgattggatatcaatttaccaacaaacatggaaatccatcacacagcgtgttctgacaaaaagatgtataaagtattacatagttcatctgacgtgacaattttcgcttctgttctttgagtcaccctccggcgcttgatacctgcagaggattcagaaaatatctttagagatgtatccaaatgaatggtcaagtctccggggatagtgctagcgagggtattggggcataattaaataatgagaagtacaaaattgcaaataattttctaggtgcagtttaataaaataaaattcacatcaactgctccacgttgatgggaagtgaacgttgacaaagatgcataagttacagttaaaaaattgtttattactggattccaccccaaaattgatacaggaaggagacatcttaatccaaaagcacaagaacacagttcaacttgacaattacaaaggtcaccaagaaaaattagcaggcatactgtacaagtgttaagatgaaaaaaacgaattgcattttgaagctccgtattgctttattatattcctaggtggcatctcttgttggctcatagcaacaatccagaacagagtaacatggtaccatgatgcaggacgtgagcaaagtaatggtagtttgtacatgttacaaacaacctctctttattatactatgttcagattatcaatgcatatcaaagatttcagcatagcatttcatttggaatagaactcaattccccaaatataacttcttaacctatcacacggtacacaaaaagggacatttaaggcctagactttcaagaattgagacagtacccccttagaacaatatactatcattagttctgtagatggttttgcaaccatgcaataaaagccataaaatttatgtaagccagcacctcattcaaaacaatacacaagctaattctccctagcagctgggcagagttgactagcagtagttatcggcacaacagtgcgtggtagtggaggaatggtgccttcttacaatactagcagagctattttctggtggtttcaccagttcctgaggtttgagacaaggaggcacacagcagggtctttctaactttgctgaatctgataatatctctgacccttcttgcttaccctgcaacctgcagttctcttctacttcctaagctgtataacaataacttcatctccattttagctgagccacaggtggctctagttcaacaatctctcagatccattagaaatattgacctaatttcttttttttatgagcactaaatttaactttgcgaacagaagtaaagtaatatcatcaatgtagtcttggtgagtttgtccacacacctcgaagtaattctacatttaatgagccgagctgaacatgcagctgtcaaacacacccaccatctaccatgcagtcgtgattagtgagtgctgctactcaactctgcatagctgctagggagaattagcttgtgcattgttttgaatgaggtgttggcttacataaattttatggctttatttattgcatggttgcaaaaccatctacagaactaatgatagtatattgttctaagggggtattgtcttcgtgagcggagacaaggaaaacactatgcagccactgaatatcaggagggtgaatgtgaaagatcaatgatcttgttctcttgcatgatagaacaagatcacaatgttacatgagataacaacggtgtcaattggtggatgctagtgacagtcgattgaggggtaaaactttaatatttgctcgctcactcatcatctggaaaaagaaaattaagaatagccacagcatctccacctaggctaacccttcttgtgaaataaccatggggttaaatttggttcaacaataataataattagggccttctttggaacacgtgattgtgagatgggttttatggtacttgaaatgccttgttcattctttgtacctgcatagttgcatacactcattctggtacataacatcgtaaggcaaagcacgtatcaaaacagtttaaaaatcaaactagtgtttatacatagcatctgttcttacccaagggagcatattccttcgagtaaatttcacaaaaccccaggttttggggcacccataacacaaccccaggtactacgatttgtttcaaagaaccctagattttggggcgaaatgtttcaggacaccttatgtttaagcttgtatcattggttttcctaatatagttatgcataataattgcaaaaaaaagagatattcctgagtatatatacatgttagcatcattttaacgagcatcagttattggtaatatgattgtttacatgtataactggttaatgtgtcattactagtcaggttgttgtgctttttcaatcgtgcaatgcaagagtaaggaggaagataaattgcatgtgagtgatgtattttgagcctactaatgtgaacacatactaacaatatgagtatttgacataaactttcttgaaacattttggcccaaaacctagggttccttgaaacaaattgtaatacctggttttttgcgttacaagtgtctcaaaaccagaacgattttatcagccattcatctgtcatgactcatcattcaaatcaattattgaaatgtttgttcgtatcaataattgaaatgatcatgtttatagtagtttcaaatttaccatgtccaagtaaacataaaatcagataatgcactcctagcttagctagctacataatttgcatggactgataaacatgattgaacaattcagttaagctcttgaattttaatgcagacaatcacggtcatcgacaaccatttttaacattcaactaaactctaggttacgctcccaccccaccaccagacaaagggaatctttcctcacctacatgatttcatgacaatgaaaatcttcacttctgcaacccataatgaacttaatcgtttcttaacattttatcggtaatttacgttaggctccccctcccaacaacagaccccagggatgcttcttagaacaggtataatgaaccttagttcacaataggataaatattgtgcagaagtctggatgataacttaaaaggggatggatcttaggagagatgaaaacatagagttggcgatgaacttttaggagagaaaacaaaaagactaattcattatacatgcttgcttggaaaatataacacctccttatttatctatttataaagaactgctaacagattagatctagagatacgtcaaattaaaccatccaaaaatatgttgcgctctaataaaaactacttatcttataacaaaacaattgatccactaagtatcaactaactaaagtgtttcaaaagccatgtgctacatgatgagccctgatgggcttcatgtcacataacagttgaagtcatttttcatatcattacctggagctgcttgcaaataacgtctactatgactgcacctagcaataaactgcagtttgaatagtaatagtgcacaaggactggatgttacaatactatgaatgatttatctgcatattaactagcctgcaacctactaacttacatcaataaagcccattcaacaaaaaatggatatggtatattggtgatgaattgaagtgagtgaccatgtgtctttaaggaaataaggggagtggactacatagtacatacttctatattcattcttcaattaatgaaaaggatggcaatacctccatgttaacaagggcatattaacagattatatatgtactatgatagaaatagctaaaggaagcccagaatacacgtaattgctatctataaaaccactagctagacatagtggatgctattggtggttatacaagtgaatgatagaccccaagttacaataccataccatgccacatgaatactcacatataaaataattttccaaatctgattggacagaacaacaaaaccttaattcaacatttcaggccgctaagctcacatagtttttttttttttacttccattaccaagcgattgaatcacaaaacatcacagatgatgtacagttagaattttaccacaggaaagttcagaacatttgaaaaagcaaacgattaaaatatgaaatataattcataaattttggaaagctagactgggtaagggaaaaaatcaccacaagaggacatggtgaagaaagcaattaaactcaccaatcactgtgaacaccgtcataaaaatgcatgccctaaacattaggcaaaagagattaccttaatttgcagcaggatacaatcatgcagaacaaagcaaaatacccccgacagaacaaaatacttctgctcttaagcattttcaggagatccatttctctgtactaattgaaaacgccaacagtcacaagtcaccaaacaagtcatcattatcatcagctgaatttgtatccatattcccactagacttcttttcatcagcagctttgactttttctgcctggtcatccgacctgtatgcccaagatgggcccaatagttgtggaacagtatccccataaagatcatcataaattccaccttttgctgtgcttttaactttggtaagaacctgttttagcttatctgttaccccactgggggatgcactttcctttggtgaaggttgctcctttccttttggaatgacagtaacctgtacaagggattcatatttcccaacaagactgccttccttcacccctactggacctggttcagtttcaacatctgcgccatctgaaatcccaaccacttgaataagttctcctccaacttgatctctaaatgatactcttagttttttacttctcttcaagggccttccagctggctcgttatcatcatttgcaccagaggcatctcccgaagaatcttttgatctggataagtctgatttactaataccatagcggttaagtattgtgttgtatgcgaccacagcatcttcatcattggggtctggtggagatggcagactgacatctgatggaagactatgagttgggaaaaaggcagcgctattctttcgtaggatataggttctggttgatgcagcaaagcgaagtgactgaccaacttcaagttcaacagggttgtctttagttagtctctcatttgcaacaaatgtgccatgaactgatcctaaatcaataacatatatgctgaaatacaaaaagaatggaaaaaatgtcagtgatgcaccaaagcagcagtgtcaataaaagtagaaatgttttccatttgaggcccagtggtttttctggccgacaaattctgagcaaggcatgccttaaggttcttcaaaaagaaaacacattgcaacatgacataggcaactgttctgaaactaaacttgaaatttaggtgcatccaagggattgatttttttattgataatatgaatggtgttgttgaaccacattgtttcatataggttgttgcttatgaattattaagctcaattccactgctagcatgcgtagcattcagtaacaaacagcggctaaaaaaactaccatcaaagacaaaatcaacaagtggaatcacaactgtgttaacattagcattatttttagtctaaccttccatttctgtgtggaacaacagcagcatgctgccgcgatacagactgatggtccaacacgaaatcacatgcaggtacctgcctcccaaatatatgcctcttcttctccagattgatccgatcaatgacatccccatccttcaacacctcaagatagtaaaccccagggcgcggctctatcgcccagtcaggtggctgccacgctgattgcccaccaccgacctgggtcccagcatgccccggcgccccggtctcttgcccggccaccctcaaactggcacctgcggactcaggtgactctggctggttccaacatgtgaaatctgtggcagtgtcaatggagccggcggtcctttagctgttctcgccgctgcaggtacattcttggccgccgaaccggattgaacggagaatggctccaaggcctgagccttcttgaagcggtcaagcccgccacggtacatatcccgaaagccacgctggtatcaccaccacttctggtctcttaataacacaacaaatcaagcaactgatggccctggcccctgcgcacctgcagcgtccaatgaaccctagtgaaatttcgctagattgccagcgcaagaatctccggcctaaaaaatcagtaacagcaacaaactcagcactggatttggatagcgaatggagtacactacagacaaaaaggattcgatcgatcgatcggtcggtcacgggctcagggcgcaaatcaggaaaaagcgaaatcgttaacagcttagggcttaccgagagccgagaagtgctagcccggattcatctaggctcggttggaagcttccgaggagatcgaggccgccggggtgcttcggttgcggcggcggcggaggggtggggatgatggggattggggtttgcctggtggcgtctgcggactgcggctgctcgggcgctggtccggatgtagcggtggtggtaacactccccgcctcggatccccgacttcctcgccccgccccgcccccgacttttctccccacggcgggcgacggaggagcgcggcgatgggagggagggagggagggatggcggcgcgggtgtgaggggagcacgcgagggaacacggggagcgggcggcgccgccggcgcggaggggagcgagcgatggggtcgatgcgatgcgactggcggcgtgcgtgcggggaaggatccggggatagggctggaggatttgagcgccgtgtttctttctgggctgggctgggcttggtcggtttctttggacatgggctgtcacctgaacttgagccgacccacgttgccatgcctccctgccaccctccgtccgactaggtctaatctgattcctatttctcaaccacaaaaccggagtaatttgattcactcagtggttttgagagcggttttcgctcacatgacacgtgaggcctacttgttagtcatctttctctttcttctccttcccttgccatgtctttctccccatatttcctcttgccggcgggataccgggcgacagcgggtggtagcaggatggtcctctaggtgctcgcccacgacgagcgagtccaccaccgaagcacacgtcgcccacccatagcagcatggccatctcgctacttgtcaatgtccatcttcctctgatcctcccgacaaccaatgagctagctcgagacaaagagaggagagaaagagaggggaaggggaaaggactgagggacggtggtgctcctctgcctagcgcgaccttccctgcaccgatctacgtggcagaagaaagaaggaggtggtcgataaaccccaccgagctgcaagaagcggccaaagggaacgagatctggaggtcaccacctctgcttgccctcttcaagttcccaggggtggataagccggcaccacccatctccctcgtcttgctgcagccccgcgcccaactggttctaccacctcccagctccctcgccttgttggctcccaccatcctactactgccaagccatcggatcaacatgtgccacaacagccaaatagtagcgatatagccggttttgcagagggatgccaatcagattcggccgaaaattgagggcctgaaatagacttccttttgacaaccgaacaaaatcattgacccatcataaaaaaaattgtgagtacatataaaattaagacaattctatatgtattcacaatttcttaatttctcctttggctttcctccaccgttgtggttgaggaattgtcgagtttgactatttatcagctggagcgtatacacatttttttcttaatttctcatttggctccactgttgtggtcgaggaatcgtcgtgtttgacaatttgtctgtcaaagcatatgcacaattaaaattgctttaacctgactggtgtaacgcactggcatttttactagtagagataaagatagcgatcatataccgccatatagaacgatcatcggatcaacatgcgccacattagccaaatagtggtgatatagccggttttgtggagggatgccaatcagattcggccgaaacttgagggaatgaaaatagacttcttttttgacaaacgaacaaggaataagtccactttgactcccttagaagtgacgcgaatctaatccataacactcaaccacaaaaccggataggacgactcatcgaactattgaaaccagtgcaatttgactcccttagcggttttggagggcggttttgctaatatggcgctgacgtgacaatgttgatatagtattcgtcctacgtggcacttacgtggcattagattttttaaaaaaaattctatgggacccatctgtgatttacacaaaaaatattgtgggccccactgacatgtggggccatatgtcatcctttctcttcttcctcctcctccctctctctctcccttctctctctttctctcccccttttctcttcaccttctctctcgtagagcaatcgacgggtaagggcagcgacagtgggcgggaaccggagaggcgacggcttgcgggagggttggcgagcatgtgctagagtgtgcggcgtggaagtggcctcctgtggcggtggggtgtgcgggaaaggcgtgcgacgaaggggaggaagccgcggtggcggagggcggggcggtgggctcgactaagcgagacttaagcttggtgagcgacaaccggcggtggagtagcgcagccgaggcatgaggcagcggcgggcgcgaggacaacacgtaggggcttgaggcggcgacggggttttgtggaggctttgcaacctccgacaacggcgttgtcagtgtcaacagcggcggcggcgcagttggagatcctccttgggccggcggtgctcccggacaacatcgccttcaacgccgacctcggcgtggtcggggaagtcggcggcgacagcggtgacgatgacaaatatgaggaggaggatgacaagaaggaggagatggagggggcatgcggcagccgaatggtccagcccaccgccgccgccacttcagcttccgctgccgctccagctcccgctggccgctgctccaacccgtgctctccgtggccggccgaaggggagaaaagagaaagagaaagaaagagagaagggaggaagaagaaagagagataggatgacatgtgaggcccacatgtcagtgggccccacaattttttatgtgtgtgaatgacaaacgggtcccacgcatacgtttttaattcaaatgccacctaagcaccatgtcaaccccacggactaggtcaacagcgccacaccagcgaaaccaccctccaaaaccaccaagggagtcaaattgcaccagtttcaatagttcgggggttgagatatccggttttgccgtttagggtgtggattagattcgggtcacgggagtgaaaatggacttattccaccgaacaaaatcatcgacccatcatagaatccatggcccaaaacccaatacccaaatcttttccttcccacaagtccacaacacaaatccctaaccctaaaatccattattccccccacccggctaccccgagcgtcagctagcccgcacgcgattcgctcgcctcgcctcgcctcgcctcgcgcgacggtgagagaggtgcgcgggcgggaggtatcggcggtggaggctggtcgtcggcggagcagcgctggtggctggctggtcaggggcggagcagggcggcgcttgaggtcgaccggcggcggagcagcggtgggagtcgaaggcgcgcccgacgaggttgcccaccgccggcgtcgggtcgtcgtatggttgtgaagaagcaggttcggctcagttcctttgttcttctcgctagctaaattgtgttggtttttcttagaattccaagtttcacaaaaactgagaaaaccgtagacctaatgcccaccccaccccacccctggatggctagatgggattgtcacatcaaattcggtttcgcctaagtaaattccacctcatgaaattcaattagtaattagctagccgtcgctgcctcttcactcagctgcatctcccacaaacggaacaaaactttgaaaacgctcgctggaaccggccagggaaccttaggggtaggggtggggcttggataggtactccaaaggcattggttatttcttgatcgcattcgctaattaatagtaatttttaactaattacatgtgcccattacataacttttgccta

SEQ ID NO: 675 - DNA, 1930 bp, Oryza sativa
tggacttgattactattaccttccttcagcgtaggaagagagatttcattatatgccactcctaattggtttgtagggtgagagggggagaggtggcaatggtggctccaaaggagggcactttgcaggcgttggcgtacttcatagttcccagtgagctcccttccgggtaaggccataaaaaaatcctcatctccattattgttcaacaggaggagcaagaaactaggtcagaagcgatttagcaagcaaactaatggtcttcctctcatttttgtttttcctatatgataggatcgatcctgatgcggcgtttattgtgtgtgttcggtttggtcagtacacagctaagcttgatgatggtagtagtgttcatgtgccaagcaaatacgctgaatgggttgtagactatcgacaatgcacattagagagcttggaaaaggattttgcagccagggtaaaatggggtaggtgccaacaggttgtggtgtatggatatgacaagagaactggcaaggaaacaaagtttttggataatatggatctagcgcatgcattatttgattggaagagggagaggaggctgattttatttgtggatgtggaggataaatctggtcaattagttactagctcttctatttcagaggtaaatgagttagtcatgggtgaggttgtgacagccaagcaaggtgatgctctagactcaagcaatcaacatctcattgattgggatagtttcaagatatctccaattctagaggagcaaataggttcttcagtgcccatgatgaaggaagatgaaatgtcaattccacaagagcaagttcctcagcatgtcattgattgggatggattggagatagctccaattccagaggagcaaattggttcttcactacctgtaatggaggaagatgaaatgtatgattttcttggactcagaactgaggatgagagagcggatcaagctaggcttgaagctgaaaagcagagggattctgctcctggtccagctccacgtcttgcacagcgggacttgaaccttgatgaggcagagatagatgctaggtttgaagctgaaattttctatgatagggatgaccctccaatgatagttggaagctcatatggaagtatggttgagtttagatcagctgtgaggcaacacgctataaaggggcaatttgagcttgggacagagaagtctgatccagaaaggttcaggggctattgcaaagctgagggatgtccatgggctattgtggcaaggttgatgcctgatggaaaatctgtgaaggtactaacaactagctaagaattgtctcatatttcaaatttatgtttgttagtaagaactgtcttatgttactaactaatggatttatgtgttgtaggttactttgaacagatttgcacatgcttgtacatctattgagggagttaagacaaagatggtatcatataagtgggttgcagagaaggcaattccttttctaaagaaggatccaaatatgggtgcaaagaagctaaaagaggagttagagaccaaatacaatgtcacagtaggatactcaaaagtgtggcaaggtaggcagaaggctgtggagcagatatttgggtcatgggaagagagctatttgtttaacttcaaggctgaggttgagctgaaaatgcctggaagtgtggtggagatagatgtacaggaggatgatgatgggatttatttttgtagattcttttgtgcattcaaaccttgcattgatggtttcatgaatggatgccgaccatacttgagtatagactccacagcctttaatgggaaatggaatggtcatctaccttttgttacatccatagatgggcacaactggatgtttccagttgcatttggattctttcagagtgagaccactgacaattggacttg

SEQ ID NO: 676 - DNA, 2186 bp, Oryza sativa
ctatcaggtcaaaaataatggatctattggcgaggagaaagaagataggtgagaagctagatggtgagatgctccctattatagttcgtcaactcaatgcaatgactagatccttgggccacttgagggtggttcaaggtgatagagaccaagcagaggtggctgagatcactcctgaacatgagattattaggcatagggtcaatcttgcaaaacatacatgcacctgtagagagtggcaagtttctggcaaaccatgcccacatgcattagctctcataatatcaactagaaaccccagaatggctgattatttggatccttgctattcagtgcaaaagtataagcttgcatatgcaggtgttattcatccactttcagataagtcccaatggccaaaagtcaatcttggtttcaatttgttgccacctctgactaagaaagacgtagagaagcaaaggaagaacatgatagttgggtgtcttgataaagaacaaggcaagcttaggaccaaaggcaagtggcaggttcagtgcaagagctgtcttggcatgggccatagggcaacatctccaaaatgtcctttaaattcccagaaaataatgtaagatcacacatttacttgttctagcatatttattgtccatttccttttgaaaatatatttacttgttttacattttcaggaagaatagtgacaaacaagggagaccactaggttcaactagttgtgcagcgggtgctagcacacccaaaagacaaaaagtttcaagaaatgattccagcaatgctagtcctggacctgtctctgaaaggtaagatctttctatttgaatggtattgttgatcctgccttatgttttaactaacactcaatttattcaaggcaattggcgttgaccaaggctgctggagaagacaatttttattgtgcttgatcagcatgctgctggaaattttttgtgtgtgatcagtatgctgctgaagctttttacttgtacatgatgctaaaagttctgtaagctccaagtccttgatcaatcctgcacaggtatggcacaaagcagtgaaaaacagagacgaaagacaccaaaatcatcttctttacattacatagtatttacattacatggcaaacgaaccaaaatgaaatcttccacatcaattgatctctcatagtctgatatgtccattttgcacgacatcaaataattcctgctactgctgcttgtaatttccatcaagtaattcctgctactgctactgctgctgctttgccaactccatcaaataatttgttctcttcatgctaacgctttgcctgcttctgctgtgccgtggggcctgccatcggggcggtagtggcgacccacggtggtggtggtggtggtggtggtggtggtggtggtgctgtgcagtggcagggtatggccatggttgtggcggcctgagtggtaatgggcccaacattttacactcgaaaattggagggctgggtttaaaaaggggctgggctcaatttttatacatttttggcttaaaaatatttgagggctagggttgtgaaagagcccatgggccttgacccattaccacccctacgtggcgatggtgaggcatggggacaggggtgctgggcctaccgatgcggtagtagtggcaatgaggcgatggagtgcgtcggcatcgagcgaatgagacgagccaccagggacttgctttgatcgattgattagattgatctatttggtcagcaggggcaaaagtgtccttaaccctaggagagaagaagaaaatggaaggaaaaagaaattggggaaaatgggagtctgttcagttcgtcggtttcaccgagtaaccgagaaaacccacctgtatgtgctacgatgccgagggctggagtcctgcgagcagcatggcaatatattgggctgcggtggtggtcagatgggtttgataggctacggcgataggggttgttaacagtgataggggttggtaacggcaataggggttggtaagaactgatggtattaatgggcttttccaccagtcggagggcctccacgatgtggtttcatgcaggaggatggggtcgtagagattgatcggttgtgtgggttcttcggttttccagagatgagaaaccgagagaaaagtcgaagatcgaagcaccgtagaaataa

SEQ ID NO: 677 - DNA, 591 bp, Oryza sativa
tgagcacgagtgaccttatttcaagttaagattcttcagaaggaaaaacggcacagacacaacctttaggaaattgaaaccgcttttattgaaatgctgaaataagaaaagtaagactgtgcatgtgtggtagcccccggctaaccctgcacacccgaggggggtgcggggttagcccgagcccgaaacctgacacccgacccccccttcccctcaggggtagaagcgacgaaggtgctcgatgttccacgggttcggcagttcagtgccgtcgcccgtggccagccgtacggagcccggccgggggacgccgatcactcgatacgggccctcccacattggtgagagcttgctcagtccagcacgcgtttggacgcggcgtaggacgaggtcgtcaacgcagagtgatcgggcccggacgtggcgctgatggtagcgccgcaggctctgctggtagcgcgcagctcggagggccgcgcgccgccttcgctcttccaagtagtcgaggtcatctctacgaagctgatcttgatcagcctcgcagtacatggtggcccgaggagacctcaggggtaccgagctcgaattcgc

SEQ ID NO: 678 - DNA, 1087 bp, Oryza sativa
ccctgaaaaagttgttgcggcaactccaacgagaaagaataagcacaaaaaagtagtaagagatcgtttggggacgagcctcctactcctagaatgtattttccgacgagtttagatatactcttggagagacaataacatgatcacttttggacacaattatgtgtacttctgctctccttggattagagagactgatcccaactggccttggccaggaaaaacgaagaactttttatgcgatctacaaacgaatgagatcagaaagataggcggacgacttgaccataaggtcggatgtttccgtgagcagtaagctgcggatctccccttttttgggggaaagctggtggcccttttggcgtgttaattctttcgacggggcggccttcttcgttcggtagatccggtcgaggtggttttcgtttaccagcgcgtaggtggtctaagttcctatgaccgagtctttctggcccctgtgaacatattttcttaatgtattaaagagggcctctctaaccggtgaaaagtggtaggtgtccactaacggctattcctggctcggctccgataacgcaattccgggaggagtcggtagttgggcactggatcccttcggacctggagaacgtgtgacactgggtcggggtttggtgaaccaacaggtcgctcctttagttgaagtatcgggcccctttttcgttgcctaggttacaccttcggaataccccagacggggattgagctctattccccccaatcttcactttacgccacgccgactctctgtcgtggaattagaccaagggtcgaagacccataccataggaccccgtcccccgtatcttatctttcgcgcgtaggagatcgagacacagccttagggctatgaggaaagtagatcgattgccctagaattacaactacatagagggtctctacaagtctataaagaagtttaaaaaaattgatcggtagtagtccggtcgcacctgaacaataattttccagagggaaatgcacctaagatcaaatattttgagccggcttccgtggaaaattcagactttctttttgatgctgcgat

SEQ ID NO: 679 - DNA, 661 bp, Oryza sativa
attgacgctgcgatactagatgtcgtagttgcaatggctattaacccatcagatcgcaccctagcaagaagtgccttgtaaaggaatgttttcccagtgccacctggaccatgaacgaagaaaacctagctcttcttcttaatacatgttgtgtgatgtcatcaaaccctgcacgttgctcatcattcagatatttgtatatatctagatgctctgggtctattggcacagactgctcctctttgacttcaatcggtgtgtcattggaaaaaacatctggttgacgaaagcataacatgcgtcacgaattcattgatgataaaaataaagacaattaaggtcaacattatagaacacactcctctaaaatattacctatatcagtcaacttaggaagaccatagtctgagatatcctttcccatgaaatgaagtatatcccgtatgtctctaagcaccatctgctctactaacatcgggttgcgattatctcgggcataatcttcagacattgactccttatgtttgtcgcacaaagcacatttatcagtaacctcacaaaaggcaagtataatcgcaaacaagcgacggagtgcaaatggcatttggaaagatgccgcttcgatcaagcagtcgtcatgtgacctgtctgtctcaacaag

SEQ ID NO: 680 - DNA, 548 bp, Oryza sativa
cggatatacaaggaataatatgtagtggtctctacatataagataggcttattggagacagaaaattccgaagaagataaattaattaaacaaaaagaagagagagcttacgtgaactggtaggggaccattaagacatctttgtcggcgtgcgccaacattgctattgccaagtatgttgctacttctagcttcttcctcttgtgcaatgtcttcacatattcttccttttcttccggggtcttgccaaccaattgctcgcagtcctgtctcagctctacggtgtgttgtgttttgcatattcttgttggatcgacgtatccaacctttgctccagttctatcagcttcgtggaattgcatactgtacaatgaataaagaagaaatgagatttggtttatttgtttcgaatgaaacgtgcaacatgtaataaagagtttagacttacagacagaaagccgcaacgagattaacgtccattttatctagcttgtagagggcgtaaaggtcttggaaagagataaaaaatatcccattaggaccactca

SEQ ID NO: 681 - DNA, 533 bp, Oryza sativa
aatttggatttgagcatgcattgatcctactcacttgtcttctctagatggccggtcacccacccaaccaccgcggagaaggcatgatcgactttgtggcagagttggcacgcatgacactggtggtgggctaccccaacgcgccggagtacacgactattccaccgctcagtggcgagcttcctcaccgtgtcagcttggaggtccatggctacgtggggacttgcctcgctaacatggcagttgaggcgtcaggaggcacagcagatcacgcctgtcaggaggcagcctacttgatgatggccagactgcgggagcgccacaactacatcttccatgacacggcgtaccgcttccacccccgtcgagccaacggtgatgatgtcagttccttccgtccgacagccggcgagaacgacaccacctttggtcacatgtgtgctgtgatgaggggactggataggatgcactcggacctgcacaaggcgaccaaggccttgaacgatgggaagctcatgaggatcgtcgctctg

SEQ ID NO: 682 - DNA, 615 bp, Oryza sativa
aggtatgggttaaggaaagaagagcttagcacaccaatgagagttcataccccgggaaatagttcaacctcagtcagttttagcccttcagtgctaatagaaatccaaagatcaccatttctagccaacctcattcttcttgaatccaaagacctagacgtcattcttgggatggattggctgaccaagttcaagggagtcatcgattgtgcgaatcgcacagtcaccctgaccaacgagaagggagaaaccgtggcgtacaaatcactagtctcaccaaagcaaggggtctctttgaatcagattgaagcagaaatcccagtggacaccgtggagaagaacttgaggaaaatggaatatatacccatagtctgcgagtatccggaagtgttccccgaagacctcactaccatgccacccaagagagagattgaattccggattgacttggcaccgggaaccgccccaatttacaagagaccgtacaggatggcagccaacgaactagcagaggtcaagaagcaagttgatgagcagctgcagaaagggtacattcgaccaagtacttcaccttggggtgctccggtcatttttgtggagaaaaaggataagacg

SEQ ID NO: 683 - DNA, 620 bp, Oryza sativa
tgggatcacacccgtaaggcccaaatgcgtcggcgaaggagcacgcccgtgcaacgcagtctcaccacgactttctaggatcagttcttggcagggtaataaactcactcacttagattggtgataatcgctattacagactgtgtttctatgattcttctttctgttcttgattgatggaaacaaaaataaaatgttggactaatgcacggacgcacgcagtaagcaaaaataaaatgttggactaatgcacggacgcacgcagtaagcaattggccaaggacgcgatactctactcctacaccaagaacatcaacggcttcgcggcgcatctggaggaggaggtagcaacccagatcgcgagtaagaagagaacatctaaattgatcaagaaccgatgagtagaatacataggacaaattcgatggcacatcaacgaaaatgtttggagttgcagggcaccctgacgtggtgacggtgatggcgagcacgatgctgaagctgcacacgacgaggtcatgggacttcatggacatggagagggacggccagatcctcccggactccatctggaagcacggcaggttcggccaggacgtcatcatcgccaacctcgacag

SEQ ID NO: 684 - DNA, 1196 bp, Oryza sativa
aaacaaaaaaactaccagaatatgttcaatgttggatataatgaaactaatttggtgctataagtgttgttatatttttctataaacttggtcaaacttttaaagcgtttgatttaaaaaatcaaaagctacttataatattaaatggaaggagtaattcataaagaaatccacattattttgacgaccaaacgtcggaacctctgggctaaactgtagagcacattcatcctccactaattggagctaaggaacaccatatgtaattgttacaagtatcgtttaaatgttcatcatacatatattatagcagacatcatttaaatcttcagtatatactctgcacaaactaaaagtttgcacaatttgaagggtaaaaaagaggcactgtaactgcaacgataaatacgtgtgtactttgtctgatctgtatttgcaatttacacagggagatggattctaatctctcgggtggacgtccacccgtttcttgcatgtcacctaaatgattatgaaaaaatttcaaaaaaaaaattgtaacataggttaatatgtaatatatcatttcacaaacatgcaagttcaaatttgactcctacaagctataacaaaaataacaaattaaactttaactagtatatgtatatttacagtcaaatttgttgtttttgttacaacttgtggaaatcgaatttgaactcgcatgtttgtgagatgatatattacatattaacctatcatgttattttttttaaaaaaaatatcataaccattcagatgacatgtaaaaaacgggtggacatccacatgtatattcacagcttggtaatcttggagtgcacacacagcacctagtttttttttacatttttgagctggtatcaaaggaagtatagcttcctgtgagcaccggtgcttccccacctgacttgtgatatacactaataagatccatcagagttagaaacagggttgtcgtcttgagtactctgagctcccatagttgttctagcatgatgtgttgtgctcaagctcccgattttggagtatcagttctttctttcatcccttgatcgcatcttggagctcagagaagtccactatgatgttgttctccatggctatctctttcgtcaccttcctctttagctccatgcttttcgcatcactggacaacttccacaccaactgcaaga

SEQ ID NO: 685 - DNA, 904 bp, Oryza sativa
ctcatcagattcttgggagatgaattatccctaaagtaccacaaactactcaagatcacgaacttagatctaacccttaagtgtaaaaagttgaacaattcttaggggaaatgaatagagcttggtacctctttgctactactatggtctcttacatcatactggtcaccttttgttaccacaagatccccactatcatttgaccgaacatcaagacatgcaatgacctggaaattttaaggcaataagaagggcgagaatggaagttgcattgacgctaaaacatttggcgatacaaagcttactctctttgcaaggttcgatgctttcctacgagatgggacctgtgttataaatgcaagtatgaacttttacatcgaagaagttaatgaaaaggaactagcaacaataagcatacatatagcagctacctttgatcctgaagtgtttggactgagaaaatttttcaaaattgaaagcccagtagctgcagtaaaacaataatgggtatgcttagaaaaatctgaagtatctatatattctgcattattaagtattaacagaccttggtgatcaagaccagtcaagttatcagaactcaagaatctacatgtttcaatcctgtcttaaaatacattgtacatacttggctatggcatatcataacacattcaatatcaaactgcattttacctccgctcttttctgggtgaaactgaactgcctgaatgttgcccattgagatggatgatatgaaactctcgccatagttgcacacagaagaaatccactctttgttttcatctgactaagcatgtgaaaagaaagaaataactcacattccataagtccactaacgaaagagcatctaaaaaagagctgttccttacaggcagagcatgat

SEQ ID NO: 686 - DNA, 1595 bp, Oryza sativa
acccctctcctctctccttttccccttcctcttcctctttctgcgtcctcctcgctcccctcgctctcctttctctcggcccaagcgccgccgcccacctgctgcgtcgcaccggtttatgcctgaccgccgagctccggagctgccgcctcacctcctatccgcgacgccgccgaaaaccacttcggtcttaacgccgccgcctgtcctggagcaccgccgcgcacagggttcgacttcccactgtcgtcgcatccgggaccccgccggtaacgacccctcccagatttcagcttgaggaagatgcttgtcacgcccagaaatttagcccaaatttccagactattttgtgtattaaatccctgtccaggaccagccagggtacacaaaacgacaagtaataaacagttccgaacgtaaataaagcgtaaaatacttacagaagaggcacttagtcctcacaccgaaacaaaagcagcagcagcggaaaaaggcgatcctagcggggcttcagctccactccacaggcaaaactcaactggggtctgagccttggtcctctaactccatcttcagctcagaagcactacacttctgaaaagggggaaataatagcaaggctgagtacaacctccgtactcagcaagccacaccaacgatgcagacgtgcaaggggaacacaaggacggtttgtggctatttgcataaaggcgggtgtaaaacattttattgagcaaaacagtaaaaccgttgagtaattaaagtaacattaaatctccactgatcaacgctacaccacgttgaacaggcccaaccaacccacctaaactacagtgtattaggtcgatttattgaggtgggactaatcacggtgaatctggtcgaccgcccataaccgtgggcacggctattcgaatagttttactctgatcagaggtgtacaactgtacccacaagacacagccccacgacacgtttccgtgcgccgacatgccaccacgacataccggaaagaggccgtgacaggacccttcgcataaccccctctaaccgatcgcaccacaccttagggttcgcccccgtccccagcaggcaacgggcagcccccctttcgtgccgcggtgaatccggaagccgatcaaccggacaccccggccgacccaactccatcacgcccaccctcgcctgggtacgtcggctagagaaaagctacactacaagcccagccgttgcccacgctggcttgtggtaagtacgataagttcttccagggcatcccgcgaaccggtccttaactgccatgggtgcgaccagcaaaaccatgcacccacagcccaccattcagtcgcattttagttggataattacgaccatgaagcatggccaggtgtctcgagcacgcagctcactctgatactaaaaaggtctaatattgtaattatcccatcaactgagctagtggtaattaagcatggctaagcatatagttctagctaggtcacataagtaacatgagctagtcgattcattacccaaggttgacaaaggatagatatcaagtaaacatgggtaccgagctcgaattcgccctatag

SEQ ID NO: 687 - DNA, 618 bp, Oryza sativa
ccatttggcttgtcctacggtcaaggtcggctctgataccaacttgtcacgcccagaaattcccgaatagaattccaagcagaatgtgcattaaaatccccgtccaggaccagccggggtacacaaacgacaatgttgacatacagatccacgtcttacaaacatcataaagtcttacataaatgcagcggaagaaaagaaagacaacaggagctaagccttgactaaactttgactaaactgcagcgggaacaccactccacaggcatcctcgacggcacggacgaagcctactcctcagagaaaccttcatctgacccgaactcgaactctggggttgggaaaagtagagcaagactgagtactacccactgtactcagcaagtcataccggaataggggtatgatgcagggaaatcatcaaagaagagctgaagtggttcatttgcataaagcgagcatttataaacagagattgaaagatttaaacagttgtaataattaattaatattaactatccactgtccaacgctaacccacgttgcgacaggcccaaccatccacctaaactatccaaattaaaggattacactaaggtgaaactaatcacggtgaat

SEQ ID NO: 688 - DNA, 555 bp, Oryza sativa
aattggtcggcaagttcgggcgtaagcctcccaaaacagtcaaacttatgtttaaaaaagccaacgagtacgccaaggctgaagatgccgtcatcgcatcaaagcagtcgggctccagttggaagccaaaaaaggatacgccggctacgggagggggtggaagtaacaatcataaggaccgcaagcgtaagcctgaggaacttgttgcaaccgctactcactcttctcgacagcattcgcgcgtcaatacattcgacaagatcatgaactcccaatgcccgcatcatcctaactccaaccacgcggccaaagattgtttcgtctacaaacagttcgcggaacaatacaccaagactacacggaagaactccgacgaagaacaaagcacgtcaaagaagaaggacgatggcgaccccccggcaggttttcaaaaccaccgcaaggagcttaaccacatctttggcggccccttggcttatgaatctaaaagaaagcaaaaggtgaccgaacgggagattaacgctgttcagcccgacacaccccaatatcttcgat

SEQ ID NO: 689 - DNA, 1301 bp, Oryza sativa
gatttttctttttataaaaccattttaactttgtttatttcttaataattattatttgtgctctgaaaattccactaaaatttgagggctccttttagaccaaggagaatttaacaaaaattctccgggccacattcgaatttttcttggacgtattttagtgtttgccaatttcttttcgaattttaattaattctattattccttttagaaaatgatttttatttcgggatgaatttatcaggacgtgacactggcataaccataaaaaagatcattaaaaaagcgtgagctgttattaaaacattataaagttgatgattcccaccaagaatttgatcgccgggtcgggctaattccatacgaatcagtacggagaagcatgtgcccatcactcctgcaatggcaccgaagatgaaatatagagtaccgatatccttgtggttagtggagaagagccatcggaccagatttgtcatttgattttcgttttgaaaactttcaagccttatcagagaggggctcagggctggaagagaagaaccttgatactaaaccaagtttcgataacttcttcagctttcatttcctccatcttcaaaatcgcagagttaattcaaaagtcctgttaggtcacatatgcttgcttttgaaaaaaaaagtggtatacggcatattattcccccccccctctttcgatcttctaattggaagatcagtagagtgtgttggaattcggttctttcgagccttgcttgggctcgttctatctttgaatatagcgaattccgttccacctcaatccacgttcttttcgcgctttgcgcttccaggaaatcatggttgtgggaaaccacatcacggaagaaaaatgatccttcctcatgatcccgcagatcctgataagctgcctggagaatagagaaatcatccgttgctcggatagagtcaagataggaacgaagcgccccctccaaaaggtagggttctaccggaagtacggctccgttcctcgcgtatagagctagaaattcttgaattagatccatcctaacattggatgtcctttcttccattaggaagagcctcagccgcccaggtatgtcctccagaggggtgttgtgattcagctcctgctgaatgaacgcaacccactccggatcctgctcgtaaaggctcagatagaagtttagcccttctaaatgagctagagcctgtgggtcttgaacttttgggggaagagtgataagaaaggagcaacaagttagaagggaaaacatctgtactatggggaggactat

SEQ ID NO: 690 - DNA, 653 bp, Oryza sativa
cagtatgaacgtcttgtaatgctgcgcctgaaggagatgaacgagattgtcctctatgtcttgcggatattggtcgagcattgcgacgtttactttccgagggtcgatgaatccagtatcgaaaaccctccgccgtcaggccctttgaatctccattctacaacgataaaagggagtattttattttatatagtctacttatatacaaggacctaattaattaaaggagacgtagtaattaagaaatctaactgaacgatatacttacaaaatccagcaactcataatagagacgtcgagggcgtccagctggtatagttcgtagattcccttgaaattgatccagagaatgtcatctccttgcaagaagtccgggtccctgatcctcgctccgatcatctctctaccggtggcgctcatctccatgtacagctgatggaacttgtacatttgtgtgggtagggactgcaccagctcgggcttgacaagcggtttgccgagtttgtacatgtatttcacttccgccttttctattggttcgactcctagcaattgatccgtagttagaccggtgtcagtaataaattcttctatcgtcatgtcttccccggtcaccaacggctcgatatcatggtttggttgctctccaagct

SEQ ID NO: 691 - DNA, 829 bp, Oryza sativa
accgtacttccacatgtctagtgggtaaggcttagtttgtggctcagtctggttataaacaaaagtacacggattggagatggatgaagtcgggggtcgatggacattctccagggcaaatgaaggctacacgagctgcggcccggtagtcgagatgtcatggcagagggttggtgccctgctgctagggggctcaatcctgcctacctgtcccggaggttccggccgtaggtgggattgggtcggtactcttgtctatggctaggatgggttggaaactatgtcacgtcttccgtctgtataccgtggtggtatgtggcacgtggttgcacgtgaggaagatgtgtcttgtgggtaaagatgtacacctctgatcagagtataatctattcgaatagccgcgccctcggttatgggcaagccgagcaatgtacccaggttagtgttttaattcttaaaatttgctcaacaactaaaatgtggaatggttggcctgggttggcttgggacgagctgggacccagggtcgggttgccagttcggtctgaatcatcgtaggccttgggttaaggcaggttcgtgagggttcacggccttgattaataattttgtgtagctctagggtcgtctttataaaatggctttgggcaactaagtgacttttaaatgctgttttctgcaaaacttaacccctatattattaccccttgtacccccttgcattaatcatgcatctgccggtgtggcttgctgagtactgtggttgtactcattcttgctctatctttctcccccccttcagtaagagaagctttggagaagaagtctt

SEQ ID NO: 692 - DNA, 1289 bp, Oryza sativa
ttcatttaattttttactccatgtgtcaggcatacagcgcttcttactaggtattagctatatgactaaatagtagttatgtatcaccctcacaatacttcttaccaggtagtaaggatgtattgaatgtctaatgcctggtttctagcaacattatggatgccctaagaggcagagaggagaggagaggataagataaggatggggaagtgaaaatataggagagaatgggagagagaagacgagatgaaaaaatttgaaggagggaggagggaaaaaaattaatttcaaaatattaaaacttcgaatcgaattttatcatattaaataaactcatgtgaaaaaactgtcaaaaacaaagttgtagaactcattgagatctaccaattttcttttggtcatttctccatctaagtttgattgtactatataaaatttgaattttaaaaatataagcaattcaaataattttttgggtagtaagtgacttcaaatgggaaagtcatcaacaacaaagttatataacttatcaaggtctacaactttagtattggtcatttttctatatgactttgtttgaacggtatgaatttgaatttcaaattatgacaacttcaaacagcatttacaagtactagatgatttgaactgaaaaggtcatcaataacaaagtggtataactcatcaatgtctataacttttatttggatcatttctttatccgacaatgtgatttgtaacattgttcacaaaatgtacatatctcttatatagtttataaactataagagagatatgtaaattttctgaataatgttactatcactttaccgatgaataaatgaccaaaataaaagttatagacattgatgagttatacaactttgttgttgataacattttcagttgaaatcatctagtatttgaaaatgctatttgaagttgtcaaaatttgaaatttaaattcaaattattgaaacaaagtcacatagcaaaatgaccaaaacaaaagttgcagatattgatgagttatacaactttgttgttgatgactctttcagttgaaatcatttagtatttaaaaatgttattagaagttgtcataaattgaaattcaaattttatataggtcaataaaactcatatggagaaatattcaaaataatattggtagatcttaataagttatacaactttatttttgacaactttttcacataagttcatttactatgaaaaattttgattcgaaggtttaatattttgaaattaattgaaaggagggatgc

SEQ ID NO: 693 - DNA, 10730 bp, Oryza sativa
tcagcaggtttctcgtcccagttcaaatgacatcgagaaaataatactctatatcccataacccgcacaacatgtagagctttgatgccaaataaattgaccatataaacaaggagaaaaaaaaatactgaacttgttaatcgagagaacacaagatccatccaaggagaaaagatcacgaagtatgtactattcagtcaaaagctaaaccacatggcggattcaaagaaagatcatttgtgtgcactactgaacaagaaaaattcagaaaacagtgagcctatcaacttctgaactgggaaatttagtctcacaagatactgacatatctacttaaatctcagaagctactagtaacgagaacatcgaaatttatctccccgagcaccaaaagccaaaaagtaaagagaactactacatgtgacttatcactaaatctgaaaatgcatgtaaaattcagagcgagaacctatacatatgaatcttgccggtaaaaaatgggaggaaaatagttcaagatccacagaaaagcagcggcaccagaaacttccggtgctgcccaacagcaaactgaaccagaaggggtataacccgcacgatactttaattttgtgctcttatttaaattttgtacacattccaaatgacatttcacaaatgttatctacttaaaatacataatattctatgcatgatattacctcatttcttttaatttgccaacaatataactctagacgacgataagagcatgacatatctataaatgacactctgggtttgatattacctgtaaaaatagggccacaaacgatatatcgtataatgaactagaaacccaaaacaaaaatttgcagagtatatgaaaaaaaaagatagatatatgccccaatcagaaatcaggtgacagagatcttaaaaaaatagatatatggaaaaaaagcacatatactgagatttttactcgtggagctgacaggtgagagagaccagaaattagttagtatgactaaccaccaatcataaatcaacaatcccagctcacttgatctgttcctctcaattgaatcaagaatccttactaatcccgaaattaccaatcataaatcataattcatgctcctttgcaagtagctcaatattttgaaaataagttcacgacagcatgcacttgcaagatggaagaaatataatatgcaatattgctttccaaaaataataaacaaaaaggttgagcagatgtctacctgctttccttagagacgaacatgcaacccaaatcagaaaacttaaaaaacccccccaaaaaaatcaaatcagacagtagcaacaacctccactgccgtcatctatactctagcacaaatcaccaaccaaaaatccaagaatccaatatcacaaatcacaaatcaccatccaaatccttgttaattatcttgcaggcatgcagcccctgctcacctccccacctcgccgcatcaaagtcgcacagacgtggccggccatcggtaggatttactgctacctacttttaagaagtataaggtgtattttgatctattaggatgtctcgatacagtagcattttctacattcgaaaaaaaaatctcatcttaagacacgatgtgatctattttgatacaacagaaagcctttctccagtccagaccttcggtcagtctagattctaggcctaggacaaaacctcaaaatgttgtctatgctacctatgaagacaactccgacgaaccttcaatctcagacttcgatatcaatgttatcgagcttgatgttggctttgttattgccatagaataagacgagtttgaaattgacaaagaattgcttatgagagaactaagactccccaaaaatagaactaaaactaaaagatatctagaagaggttgacaaatcattcagaatgaagataagagaagtttggcataacgaaatgagagaacagaggaggaatattttcttctttgactagtatgagaatagccagattatatattttgaagaattttttaagacccagaagaaaggaaaaggggtatgcaatgaagagagaaaacaagaacatgacaagtcagtaattaaggtcttttcagattatgggtcaaccagtaaaacttatattacttattctccttttaaacttattcaacaatctcaggatatcagaggaaaaaattgtcttccagaaagcacttatgagaaatccacagagaataatttcctagaatatttagtagaacaacagaaaactcaagatctatcccctgaacaacaagattccaaaacaattcctatggaacccattattctaagaagccatgaagatccttcttcccactctcaatttgaggtatctagacctcaatctgaaacctatcttttgccttattcttatcctattacaactatacttattccaactgccaacaacgaacagcaaaagggcaattttatcaccactcctaaagataaggtagccaaatcctttgatattcccaacaattttcctaatactaatgaccagatgtctaattccttgacaaaaatccaagcgtcatcttacgataaattgacgctccaaaaagaagtttctaccttttataacaaaatcgactcttcggtaaacagagacctcgagagttatattaccagagtcatcaatacctctttctacaacataatcgatgatcctaaaggtattaccagatcaaaatttagattgttccataatgttctcttctccaagatctatatccaacctaaccaaataaaacactttgttaccattctcgaaccaaaaactcctttgaaagaaaatctcagaatcaaatctcggctgaagccttctgcacaaataatgaaatcctagtccataagcaagatctttttggaagcatatttgttatttctgatacaaatcaatttggcacttttaatcctgaggaagaaaggaccaaaagaaaacttaagattaatgacctcttccaagaacaaaattatactaaaaaggaattaagagacctaaagggtaaatttcgaagtctagaattacaaaataatagttgcatgggccaagatgaagaggttgtcaactccatcaacagttatgttaagcagaaatggtatgcagaagtaaggtacaaattcaatgatggattccaattcagctataagactttaattgattcaggagctgatgtgaactgcattcgtgaaggtattgtcccattcaaatactttgaaaaatcctcccataaaatccatgctgcagatggaaatttactaaaagtcaattacaaaatcccttctattcatgtttgcataaatggagtctgcattaaaacttcctttttgcttataaaagatctaaagcaaggagatattttgggaacgccattcttatccttaataaaaccctttattgttactgaaaaaggtatccagttagaatcagagataaaaatgtgaagttaaaattttcttctaaacccgagcaaaccatgttaaactatttaaaggagattatcacacaaaaagagcaatttgtgagtgacatatcttctgaaataaaaaatgctaggatttcccaaaccttaattatccaaggtttcaagaaaaaattatactattagaaaaaaggtttataaaagatatatgttctgatttcccatcagctttttggcataggaaaaagcatgttgtaggtcttccttatatctctaattttaatgaagataagattcccactaaagcaaggcccattcagatgaatagttgacttttagaaatttgcaagcaagaaataaaaaacctgctagataaaggattaataaggaaaagttcctcttcttggagttgtgcagctttctttgtagaaaatgctgctgaaaaagaacgaggagttcctcggctagttatcaattagaaacctctcaataaagttctacaatggataaggtatccaataccttataagcatgacttaatacgaaggattcagggttcaaagatatattctaaatttgatatgaagtctgggttttggcaaatccaaataaaagaagaggatagatataaaactgcctttactactccttttggtcattatgagtggaaagtaatgccgtttggtttaaaaaaaatgctccttctgaattctcggttataaaattcaatatgatcaagttcaaccagtagcaagagtaatagaatttgcagaaaaatttccagatgagataaaagataaaacagagttgcaaagatttctagggtgtttaaactatgtctccaatttttataaagatcttgcaaaaagacagaaagattttaaccgagaggttaaagaaaaagcctccagcttggacagctaaacatactcaagctgttaagaagatcaaaagtaaggtcaaaaccttgccctatctttatatcctagatcaagttgccttcaaaattatcgaatcagatgcctcatattatggttatggaggaattcttaaacaaaaaaaggattccagagagcagttggtcaggttcacctctgggacctagaatgaggctcaaaaaaattattcaaccatcaaaaaagaaatattggccatagtaaaggtcatatcaaaattccaaggagaattattgaatcaaagattcttgctgcgtatagattgcaaggcagcaaaagatgtcctccaaaaggatgtggagaacttagtctccaaacaaatttttgccagatggcaagcaatattatcatgctttgactttgaaatagaacatatcaagggagaattaaactccctaccagatttcttatctcgtgaatttttacagggctatggcacctaaaagggacttatcagcccaagggagaactacagaaagttcaccaaataagcataaatataatgaactaggaaatatcattcctagaacccctacagttcgagaaaagtattggaataattcatcttatatcctcaatatagaggaagtaattctgccattagaatttggagactctgatctcaatattatcaagattatgggaaagtatttcccacaacactaatattttatccctgaatatccacggaaagatcaaaattattatgagactattatgcgagacaagaagtgcacagatattccatacaaggaatggtgatgaattgggattcacaaaattattgatccaaaaaattataagtatcgatgattgggataaatcatcaaattcttatgtagccaggaatatatattctacatcctgtgcaaataaaagatatactattgggattatcagaggcctgagaaagagtactcctcatacaaaattcccagatgaagcattcatggtttattcgcttcaaagaaggatgtgaggagataccactgtggtttttcagcaaatggtggctgaaagcaggggccattcctggaatcctaccacaagaaatcatcaaagttattacacaagaatcaaaaaaggatctcaaggaatatcctttttttcttatgcaattttgtgccgaaacacggatgccttggatactaaagtgggatctcaatattcaaagaatggagttcccagcaaccttaaagcgaaactattatgcaagatggtgggataagtttgcaatcacaccagtaattgaagaagaaagtttcgagccaaaaacaagaaatctcatgtggctcaattaaaagaagatataacaagagaattattaaaggcaagacccgagttgacaaagggagaattgcaacttcaagtatatgaaaccatgtttaaaagattggaagaatcaccaaaatctagttccacatgcagaagtctagacgaagatatggtacaatacagccaaattaagccatcttcgccaatacctccttattactcaattaagcaagataatgattcagatgaaggaacatcagatttcaatccaacgcacatttagtcaaggtatgacgacagatcttgtcaccaagataatgaataaagatcctgtcatccccgacaaagatcactattcaagataaggaatctacactattctagataagataagcctatagtcaaaaggcgatattatgacatctttattgaaggtcaaaagcgtcatcaccaaagattctctccatgaagtctaaagggatatcataaactctttgaagtcaagaagagatatcatgaagattctctaccgagtgctatataaggggctcaccatcgcattccacaagcatcgcattattcacaagaacaacaaccacaacacatctcactcaaccattcctctcgcctctccaccagccatcacactccactccactccatctaagtgtttgtactatagtataacctaaataaaagactcatgagagtctaagtgtgagagtctatgtaagagtccttgtgagagtcctgtacctgtataattacgaacgtgttgtaccaagtccttggtgtaatcttcagaaggatctaccttcaacttatcaaggtatatgaatgaacacctggaccgttctatataaacctactatgttctaagtatctaatttacattatatcttgtacataattcatatttacagcttgtctttatttcctgtactgcatttatgtttgcataataataataataataataataataataataataataataataataataataataataataataataataataataataataataataataaattcaacaacctggattaccatccaattgccacataccaatctcacatccaagattgcatatagatactgcattccttatatatatatatatatatatatatatatatatatatatatatatatatatatatatatatatatatatatatatatatatatatatggaatttatttttgaagtggttttggaaatgattggaatttacaggtgaatctacaggatactgctgttatttcatgtgaccggtcagaccgggctgtgtatgccggtcaaaccggcgcaacccgcggactgaccggctgaccctgtgtcagtttcggtttcggattgtttgtttggatatccgtgattgtttcatgattatggcttctagatggatactatatgtatgtaatactattgtttgctactaatgagtcaagttggagatagcttggtctcggaatatggtttctttgtttatttcatgtgtaggtgtctcgatgcctcgggagagtatttgcagtgatggaccgggagtcggcttggggataagacgacgtccgtggtggtcagagatcatgcgggatacctaggctagagttgatgcacgtggttgatggagattccatatggcatacgatggagttattgtgtgcgtatgggatgcggagtcgaatttggaaggagtccaaatttggtatgattggttatgtaaaggttgtgtcttgtactagagggtttcctaaggtgtttaggactcttagtatgagtttggtttgtggctttatactgccgacctcatgtataaatagagggggagcgtgaggcttccctgtatcgcttttgagagcaattgagttgagttttgagttagggtttcgagtttagtcgagatttttgtaaggagtgctgttggtgcactttgtaaacacagagagaatcaataaagtcgtcatctactttaagaattcttcgatttgtgtttcaccgggtttcggcggtctaaccggtaactcatcggcggtcagaccggcgacaagtcggcggtcagaccggcgggagcacggcggtcagactggcggcatccactcggtcagaccggcagttcaatctcggtcagactgacttccgtcgatttcgagggtaacttttatttctgctaaaagttttttggtttttgggtataccaaccattcaccccccctctgcttggcttagttcttgtgtttcgatcttacaagtggtattagagccttgtttttttctttggatttttatcgatctagagtttttgccatggctactcctattaggttttcaactaagcctcatgttttcgatggaacggatttttctcattggtgtagtaggatgcaatcttacattatggctgaagattatgatatttggagaaaagtttctcatccttatgtgattcctgaagctattaatactactgctgaaaaaactgcttttgaacaaaattgcaaagctcgcaacattcttttgagtggtatttctcgttcggattatgatcgtgttgcgcattttcgaactgctcatgaaatttggaatgctttgagtaactttcatcaaggaacaaataacattaaagaacttcatcgtgatattttcaaaaaggagtatattaaatttgagatgaaacctggagaagctttggatgactatctttctaggtttaataaaattttgagtgatcttagatctgttgattcttcttatgatgctaattatccacaatctgagatttctcgtcactttttgaatggtcttgatatgtctatttaggagatgaaagttacatctattcaggagtctgttaacatgtctactttgactttggattcactttacacaaaattgaaaacacatgagatgaacgttctttctcgtaaaggtgattctaagtcgagtgctttggtttcttcttcttcctctttggatgttgatgcttcttcatctaagtcttcttttcttgctgtttttaatgccacatccgatgatcaactcggacagattgaggaggaggatttggctttggttgctaacagaattgctcgagctatgaataatgctaggaacaggaaaagaggtgatctaaatcgttgctttgaatgtggttcaattgatcatcttcgtttgcattgtcctaagtttgggagaggcaaaagagaagacaaagatggtgagaagaccaacaacaacaagccgaagggtacatcccaagggaggaagttcaaggagaatcttaggagggtttttgatcaagtctacgccgcatttgagccatcaagcgatgtagatggtgagagtggagatgatgataagggaaagaacatctccggtgtttacgtcatggtgcgtggtgaatcggacatagagtatgaagatcatgaggtaagtacttttgaagaagctattaatattttgagtgcaaaaaatatgaagtgtgagaagatgtatagaaaacaggaatttatcattgaatctcttaattctgaaattgctaggttaaaatctcttattcctaatgatgatgattgcaaaaattgtgtggttttagtgaatgagatttcgaaaattagagatgttaatgttgcacatgatttgaaaaacaaatcttctcttgcttgtagttttgctttgcacacacgcactttggatgagttgtttttactaaaaagttgttgcaaaaatatcaaattgcttttcatgctagtttgatgtttaacatgatttctctaaaaagttaaaacaacctcatgatgttttggattgctcaacatgtaatttgaataagatgaaactaaaagatgctttaggtcgtgtggacatggaagatgttgtgaaaaacaatgaagtgcttttttgcctcaaaagttgtaaaaaccaaggggtcatggtagaatgggaaaaatgtgcttatttgggaaaaaaaggtttcttatttgaaaaattctttgctaatattttctgatggtaaaaagaacctcaacatgattttggatcaatcaaaggttagcacacataatcgtggtttaggttttaattcttatgcacataattctagatatcctcctgttgtgttaggtgttggtgcaaaaaggggtgagattttggttaaacctgatgctaataaaactgtgtttaaatctgctggtatcatgtctaccttgagtgcatcctcttcaaaatccaatgttgtccatgcaaaacctcctattgttgcttgtgttgctaaatcttctaatgctaccaatgtgtctaatcattgtgaaaaatatacttgttctttttgtggcaaagatggacatattgttggtttttgtttcagattagctcataaacagaaaaaggagagagagagagagattacttttgcaaaatcaaagtggcaaaaatctggttttccctcgaggaaaccggtcagaccgcagtgggtcccgcggtcagaccggcgatcggtcagaccggctaatgtgcctcggtcagaccggacaccggttagaccggcggtgaagcctcggtcagatcggcccccagtcagaccggctgcacaccctctgtcagaccggcctcgaagaaatttttctgaaaattctcgaattgattttgcacgtggatatatgcctattggatcttctggtcgtgtgtctcagtactggattcctaaatttttattatcagctaacccctgtactgaggcttcgacttctgcttgtgtgttggctttggtggcaaggaaggagaacgtgtggatcgtggattccggttgttcgcggcatatgaccggtgataaaaattggttctcctctctcaaaaaggcatccaagactggatcgattatctttggtgatgcttctacaagtgccggtctcgttacaggtttgggtaaggtaaataaaaatttgaattgaagaatgtagttttgtttgaggacctaaaggaccatttgccttcgggttccccaaatggt

SEQ ID NO: 694 - DNA, 664 bp, Oryza sativa
tagaagatccccggactttttagggtttttgtttttataaaaacctttttaactttgttaatttttaaccaattataattggtgctctgaaaattccactaaaatttatttacacattttaggcttttaagagatatacaaaaatcctctaagccttatttgacttttaactttgcacattttaatttttggaggctttcacacggattttaattattctaggcataatttagaggatgtattttagggtcgttttgggacgtgacagaaacagagaacaaaaccatttttaatggattctacacatttttcttgatttactgagacttgaacgggcttaaacggagctcggatgaattagttatgatttttagaagattctctgtgtttatttctataacaaaagtccttaaatcatttattgcgcaataaccccagggctaacgtcatcgggggggggtggcgccgacaggcggggcccgcatgtcagtggcgcacggggtggtcggtctaccgtggaccgggaccacgcggatggtccaccgccggtccacgggatcgacggcccggatcggccggggccgatcggacagtacggcggcgacctggctcggctcggctcggctcaaagccggccggccggccatggcaagggtgccggcgc

SEQ ID NO: 695 - DNA, 744 bp, Oryza sativa
  unsure (1)..(744): unsure at all n locations
ctgtcatgtcctactantggtacagtagttcatcaaagttcacccgctacgcgcggaagttggcggatccaccggaggtgaccggttcgtccatgtgacctaacgggcacatgtgccccggccatacaccgataattggcttggactgacggagcatcattcccggggccttgatggcgtcaaaagccgcaagggaaaggatgttgagggccgctcccccatcaatgaggacaccccccaacttcacgttgcaaaccgtgggagaaaccaccatctcaatctgccctccccgggcaacgcacggtgggtggtcggtctggtcgaaggtgagggcaatcttcgaccaccgtgcccgacacgtcgcctcatgagtagaggccgcggccagaagctctcgcttgatggccttgaagcttcggcgagaaacgtgagcacacgctcccccatagacggtggcaatggaggacccaggctcttggaaacctaggtcatcatcgtcgtcatcgatgtcctcggcgggggccttgtgcttggcctgacttcgacgattaccagaaggaaccgccggtgatttgccctctcggcgctcctgtctcgggttctgctaccacttgctcgtccgctcaggcaaacttttgactgcacgggacttcgcgaggtcgtgaaggggaattgtgtggactgtgcaccacttgnccggtttgcgctacctgttgggagcgcctgtctcgttctttgtgcctt

SEQ ID NO: 696 - DNA, 918 bp, Oryza sativa
aaaaatgcatatggggagcatagtgagatttgcataagttaccttggcaatcatgtgttcatgtggtacaaaaggtttgtggcaaccatttttaaccaggatttaactgattaaatgcttctgctgcaacttatgaaaaacaacattataaagacttacaaaagcatcaatttaaaaattatcaagtaaatattgtaccacctgcacattatctggtgtagaatgtacatgttcacatgattcttcaacattggattcatgttggatatcattaccaacttgttcagaaatatcaacctgcaaaaaaagcataatccatgcatatgtactgatcacatagtgtattcgttaattgatctttagacaggggaagatggtgtacagtgacacttacttctttattttgttctgcaaccacaatatttctccaatcctctccagggaatttttgttctatgaaggcacgcatcagagtcatatcaacactcatagcctctattttattttccattgcattcatttgtaacttaagcattgcatattcctcagattgtccaacaacatctagtccctgagaaacccttatttggctccaattcttatgatcgtagtaccctcgaagttttgtctcttttccaactacacgtcgaaaaacttcatcataatctttggatgaaagaccactgcaactagtagatttctttttagctaattcatggtaagccgattcctacataattaaacatgcatgaattagtttatcataaatgaaccaaactacatttgtgataacaactagcaaggaaagaaatttaccactaccgccttaatgcgctcatcctttttcttatgtgcttcatcccatacgtcaatgtcatggaccttccctttaacttttgcttcctaggcaacaaagaa

SEQ ID NO: 697 - DNA, 1420 bp, Oryza sativa
cgcaaagatatctttattattttgaagaaaggtgatgagcgcgctttcctatttacaatctaactcggcgcctattacagcagttttggtaggatcagaaggatctaagggaatctttttagtctcggcttcggtttccccactttttgaaatcttggcagcgggcacttctccttcgctcgccgtggttgcagccagtcggatttcctctcgggcagacgccatctcgcgggtttgggccatgtcgcaactctccttgtcgcatgtgacagcttgcttgatgtcgctccgtagggttaggactcctcggggaccaggcatcttcatcatcatgtatgtgtagtgcgggacggccatgaacttggctaacgctgggcgtccgagtatggcatggtatgctgtctcgaaatcggcaacttcaaagctgatattctctgtgcggaagttttcccgagtgccaaaagtgaccgggagagtgatctggccgagtggagttgcggataatcctggaattactccatgaaaaggcgcattgcttggttttaactcggagcgagggatctgcatatcatccaaagtcttggcgaagaggatattgagtgcactgccaccatcaatgagggttctgcgaagcttgacattacggaccactgggtctagtaccagggggtaccgccccgggtggaccactcggtcatgatgatcctagcggtcaaacctgattgcgatctctgaccatcgaaaatattggggcgtgtcgggctgaacagcattgatctcccgttcggtcagcttttgcttccttttagactcataagccatggggccgccgaaaatatggttgagctccttgcggtggtcttgaaatccagccggggtgtcgccgtcgtccttcttccttgacgtgctttgttcctcgtcggagttcttccgagtagacttggtgtactgctccgcgaactgcttgtagatgaagcactctttggccacgtggttggagtttggatgatgcgggcattgggagttcatgatcttgtcgaaggtgttgacgcgcgaacgctgtcgagaagagtgagcggcggttgcaacaagttcctcaggcttacgcttgcggtccttatgattgttacttccacctcctcccgtagccggcgtatttttcggcttccaactgggacccgactgcttcgatgcggtgacggcgtcttcggctttggcgtactcgttggctttttcaaacatgagcttgactgttctgggaggttgcgcccgaatttgccgaccaattcttcgtggcgaatccctttggtgaatgcggcgatgatgacgtcgtcggtgatgtcggagatcttgttacgttgttcagaaaatcgccggatgtaatctcgaagagattctccggacttctgaatgacgttgt

SEQ ID NO: 698 - DNA, 627 bp, Oryza sativa
gatggagaagcagaaccaaatcaaaaacaagtcttgcaaataacccttgagatttgcaaggaggatgtcctttccctctttgttcagaatctgccttcgcttggttggggagtaagtgttttatcacttaaaatctgtttgcattctccatttaaccagcctgttgaaatcgttagctctgaattgcaggtacgaaaagatctggttcactgctggtgcattttgctcaggcagaagtttgatgagagctactgctgtgtgaagtacattgaaaacccaatctggagcttttagatttcctagttggctggtaacacatcaatttcttgacttaatatcacagataatctttcgaacttctagtacaattctgtagtaataacatgatcgttcagatatttacaggatattgactactcacggcctttagtcagtcagctgtcacattttctcctttataaacttttgtaattgttggttattgctttagccatagcgtacattcaaagtgtcctgcactttggagcctaacttgtggtttcttggtcattttctgcctacagtgtatcttttgaaggataattataattgatcaactcttgtgacagctacaagaacttggacgtt

SEQ ID NO: 699 - DNA, 3672 bp, Oryza sativa
  unsure (1)..(3672): unsure at all n locations
actcatatattttggaaacactctattaaaggaattcgtttcatttgttgtttcacaaaaatgtttcacctagtatactcacaatgcttcactatatatagatctaatgttacagtgaattaaaatattcttttgcaataaatcacccacatattatagaaaccctctattaagagaattcgttttatttttttccaccaaaaatgtttcatctagtgtacttataatgtttcactatgtatggatatatcaaatatgcagtgaactgaaatattctttcgctatttactgaaacattgtttttatatgaggtgaaacagcgcacgatttaaatgattgaaacattttcgatctacttagttaaacaattccgatatacttggtggaacatcgtacaacatttaaaaataattcaatactaagctaattttttttcgtcggaatatatccatgtgtggtatgttttaaagatttaattgcaacgaatttaatggtgcgatcggatcatgatttggataaataatttaagagaaaaactagtttaaagtggtattgcacccatgtatcgtgctgacgtcatgccagcatgacgtgggcgcccaaattacccaccccgggatcaggcgccggacgggtagtcgcctccaagattttcctaattgacatgtagtggcttataagcatttgtgagaatatttaatggatattttatattgatatgaaaaatacaaaccgtgattaaagtatatttaataagaaaaatccactagtacagatccttctatctatgacggcctctaacatgcctggaaatagcgggccatcacaaggaagtcatctcaatcaagccgaaaaagtgtccgattgagatatgatcgcacagacatattagaagggcataaaacttaagcccgtcatggatgacacctatcagtgacgggctatagtttaggcccgattgagataacattccatatctcaaacgggccttaagttggggtccgtcacatatgaccatcatccgtaacgtgcaccaacttgaggcccgtcacatatgactcatcagtgacgggctatatactaatccccggttgacatgacttaatctctatcgggcattaattaaagcccgtcactgatgagtatttttccatttttcataagaaatgtttatatttgtaagttgaactatagcaaaataaataacttgcagtataataattcaatttataagtcaaaataattttacgcgtagtaaatgatatcaaatagaaaagtcatcaacaacaaagttgtataactcatcaagatctataacttttattttggtcatttttctatataacaatttttgaacagtttgaatttgaatttgaaaatatgacaacttcaaacaatattttcaaatactaaatgatttcaactaaaaacgttatcaacaacaaagttgactaactcatcaaaatctataacttttattttggtcatttttctatataacattttttcaaccgtttaaatttgaatttaaaaatatgacaacttcaaacaacattttcaaacactaaatgatttcaactgaaaaagtaatcaacaacaaagttgaataactcatcaagatctaaaacttttattttggtcatttcttcatctgataaaatgttagtaacattgttcacaaattttacatatatgtattatagtttataaaaaccagacaagagatatgtaaattttgtgaacaatgttacaatcactttatcagataaagaaatgaccaaaataaaagtcttagatcttgatgagttgnttcaactttgttggttgataactttttcatttgaaatcatttagtatttgaaaatattgtttgaaattgtcatattttaaaattcaaattcaaacggttcaaaaaatgttatatagaaaaatgaccaaaataaaagttataaaatcttgatgagttatacaaatttgttattgatgacattttcagttgaagtcgttcactaacaaaaaattctgtttgaatttctcaaactttgaacttcaaatttcaaattgtttaaatagagtcggatggagaaatgaccaaaataaaaattgttttaaattgtttgcacctcgataagctctacaactttggttttggtgacttttccatttgaaattatttattaaccctaatttttgttcgaagttgtcaaattttgaaaattcaaaatttgaattgttcaaatgaacttatttgtacaaaggaccgatacaatagttgtggatctcggtgagttatacaattttattgtttaggatttttgatggttgtgtatgtgaatgaatgtatatgaatgagagatgttaggattaatagaatactcataccaacaagttacaactactctttcgtaagccgatgcttggcctatagcaatttcgggatgggtgactgattgggaagttcttctcaggtgcacatgagtaaagacaaaaaagactagcctgagagatgctagacggcatgcctaaaaataaaatttattttttttgggattatactcatctgtgacagacattaacttagacccgattgagatgactcatctgtgacgggcattaacttatgcccaattgagatgactcatctgtgatgggctatatttaatgcccgtcacagataagggtcatctgtgatgggctatagtttaaacccgattgagataggtcatccgtgacgggctatagtttgactgatcgtctgggtcaaagctatcggtgacgggctttaattatggccagattgagataggttcatctattacggccgtttgcccgattgagataacttttcatatcagtggcttctagcctgtgacggacgccatgcccgattgagatgggggttaccgcccgattgagatgatggtatccgttctagtgatcgtaacaaaacaaatacatatacaatatttttataagtcagttgcttcgtatatgtaaaatagatggtacacatatagaatttgcactgataaatggactatatgtacgaggaagacgaaaaatgcaagtaataatacagctaattatccaaccagttgcctcatgcaaaacaaaaaccgtggcagctcatgcaccagtaatcctacctactacgaccatgcaatcgttctcagccaattacatcctcagctatggcccgaaaaaagttgttggtctatcaattcataatgttgttagtcacagataaaatcagcaaacgtacgaatatattgctgtagcacttcaccggaagtattccaaggtatcgaattttcacaagaaacgtgtgtgcttaactcttctccagattcacccaagggacacaaggcataaattgggaaaaaaatagagatgattttctagtaaggaacagggtcttaagaaagcttaaatttaacattatcacactacttcatgcactagctttctcgttgctacccaaacgcgctctaatccgtacccaaacaggatggactcaagtgatctcgagagctgtcaccacctctacatcagcctcaaacgaactgttgaatacgcagcaaatataggtattcaacagtatagacatcacgtaggctcaaccgcacaaagtaaatctcaattactcgataaagatattatcaatttaagtag

SEQ ID NO: 700 - DNA, 2204 bp, Oryza sativa
accccccctcggggaaatcaggaggagggcggacacctcaccctcgggcccgacgtccccgaaggtgccaggccacgtgggcgattccatctgcctcaagcctccgggcgcaatactcccggtcccatatcaccgacagcattgttcctaattgatttatttttttaatcgaactctatccttaagtctcagtggctgacatgtgaggccatccctatttcctttttctgtctttatttctctaaggaaaaatttgtcgtgtcactgactggtgggcctggcctcttttgaccgaggtcaaaccggtattattaatcccggtgggacccacatgccataggggtaccatataaattgtttttttaattagattcctgattgctcgggcccacatgtcattgtttcaactaaccatcattagcatggtaattactatgcgctaatagaaagtagggcttacatctctccaactctccctctctatctctttcatacccttcttcttcctcacgctcacagcggagcagaggagcggcatgcggccagtgcggccgacccgagccgggacggctcggcgcgcggtcggtgaacggcggcgcgcaccgctggggacccacggctggcgacggcgaagcgcggcggcctcccagcacacggcgcaacggcgcgcggtggcagccggttatgcgtgtacggcgatggcacaaatggcgacgagttgaactcggccgagcacgatttcaccatctaggatcagtagggttgccatttaatcaaaaatgtagcctaggttgcatttgaattcgccctctccacggggagctcgacggcggcgcggtggcggccggaggtggtacggctacggcggcacatagcccaaattgggagggccgccggcttctaggtcactaggaggtgctcggtgcgtgagggcttaccaaatgatggagtaaggcgaaggtcaacgacgcgcggtccgggccgggtaaagcagaggcgaacggcgtcagcggcgctcgaaggtgttcgacgcccgttcctcggcttccgatagcctccggctcgttctaacaacagcagcagcagcgcctcgaggccaactccacaccccgccagtccgccaccagctctagccaagtggcaaggtagcggcagcgcagtccccgcccaccaggtgttcgacactcgtcaccttgggttggagagagaggtttgagtgagaaactgtttgagaggttgtggaaggatgggagaacgctttatatcgcacgtccgacgaatcggaaatatcggacgcctcatctaccccactggaaatgctgcaaatcggcagatcggatgaaccctatcactgtaacatgtatgcctagctatttcttttcattctttcctcatctctttaaatatttggtcttctaaattacttatccaatctacaaactgattacgctgttgtattcgttccaatgaaatatttacatcaagatatcatatgattatattatgtcgaaagaaaaatatgtgtttcaaaccgttaaaactaaatatttcatacgtgatagtgatatgtttcaatgtgcgtcttcagtgtgtttcattacattcctgaaactgcccgctacttctctctctcctctctctccatctcatccatgcacacgtgcatgtattttagtaagcttcaaaataatttttctcttaaattatttatccaatatatgatccaatcacaccattgtattcgttttaattaaatatttacaacaagatatcacatgattatattttgataaaagaaaacacatgtttcaatccgttaatacttgttgtttatacgtggcagcgacatgtttcaacgtgtatcttcatcatgtttcataaaataattaaatgtttcacttgctaatttttttgtttcacaatatataacttaatgtttcatttgttggtcaactgcaatatttgaccgtccgatttttttttagcatcagacatccgatgggtagcttcctccggaaggatgaggccgactagagggaagcttaagaagctcaaacaacactcgaataagggcaatgaggtggccgacgcagataagagtggatttccttctccattaaggttttgtaggtaatcatcacatctaggacctatggaatgggtgttctagtactagctgagggagagggctctgttttatccat

SEQ ID NO: 701 - DNA, 1907 bp, Oryza sativa
caacgcgggcctccccaggaccgcgttgtagggcagactgaggtccgccacataaaagttcacccgctccgtgcggaaagttggctgatccaccaaaggtgaccggtaggtcgatgtgacctaacggccatgtgtgccccggcgtcacaccaatgatcggttgagacggctggagcaccatccccgggcctttgatagcatcaaaggccgcgggggaaaggatgttgagagccgctcctccatctatgaggacacgccccaacttcacattgcagatggtgggggaaaccaccatcgcaatctgccctccccgggcaacgcacggtgggtggtcggtctggtcaaaggtgagggccacctccgaccaccgcgaccgacgcgtcgcctcatgagtaggggccgcggcgagaagctctcgcctcatggccttgaaactccggcgagaaacgtgagcacacgctcccccgtcgacagtggcaatggtggccccaggttcttggaaacctaggtcatcatcaccgtcatcgatgtcaacggcgggggccttctgtctggcctcacttcgccgtttaccggagggaactgccgcggacttgccctcacggcgttcctgcctcctgtcctcctcccacttcctcgttcgctcagccaagtttttgactgcgcgacagtccgcgagatcgtggagggaggtgttgtggacggagcaccacttgctggctgggcgctccctgctgggagtaccagcctctttctttttgtcgctcgcaggcctcccctttcgggtggcccgcggagcgccctcgacggcgaggacgtgaccctcgtcgccggaatggaccgaccttttcttcctcctcctgtcacgccgccctgtctgagcggcggatccgggggcggccgaagctgccacaccggaaccggaggggttccaggtccaggcctcctccttacgagccactcggtccgcgagctgaaaaagctctgcggtagtctggggctctttggaggcaatcttttcgagcatgcggttgtgccgcacaccccccctgaacgcgtagatcaccgcgtgtgcagggatgcaaggtatagtattgcggacttggcagaaacgctgaatgtacgagcgaagggattcatcatcccctcgctgtactgcgtgcaagtccgcttcttcacctgggcgtggataggtgccttgaaagttcatggtgaactgctggcacagatcctcccaggagtggaccgacgcgggtggcaggttcattagccaaccccgcgcctgtcccttcagggccatgggaaagaaattcgccatgaccctgtcgtctcccccagcggcatcgatcccggtcgtatagacctggagaaactcggtggggttgacgctctcatcatacttctcggtgatggtgggccggaaccttgggggccaacggacattccgaagactcgccacaaaggctctacagccaacaccaccaaccgggggcacggagggctgatcctcacgtccatgtcgaggtgacaccctggacgaagaggcaccctccgttgcgcggggagcacgccgatcactacgtcggcgctcgatgtcgaggcgggcatccggctcttcatgctgatcctcccgagtcggaggcgccgacgagggagtggtagccgaatggcgtgcagcagccgccgctcgccgcgccctccgccttgatgacacagagccggtggtggcggcgccggaggtcctggtagtggcggaccgtccaccagcacccaggcgctgctgtgccgtcatgaccaagttggccacgtcgtccagccatcgctgggctggagactccgggtcagggacgacgggcgggtgacgtatgagcgcgccagcagcctgaagcactccctggggcatgctg

SEQ ID NO: 702 - DNA, 897 bp, Oryza sativa
cttcttgaatgcctccgtgaactccgcccaagtgattggttgtccttctgctctgttcatccggaaatgatcccaccattctgatgcaggtccttgcaactgatgtgaagcgaaaacaactttctcctgatccgtacactagagcaattccaacttcttctcgatagcgtgcagccaatcacctgcttctactgggttggtagtgctagaaaaggtaggtggcctcacacgaagaaaatcagctaacttgttctgcggcggtggagcattgttgttcccttggttgagctggttctgcatctgctgtatcatcatgttcattaactgagtctgttgagccagaacttgagcaagagttgggttcccttcattgttattgtttccacttccactggcgcgagtgttcaccatctattgcatattagagaagatagaaggagaggggttacactaaagacaagaccttaaccaggttaacactgatctgatgtgtgtagaccattatattgttcaagttgattaagcaagcaacctagtatagttacacactcatcaatgaactactccaatgatgggaatgcaactatacctacacacaaagcaagcaacaaacgttctaccctactaactattcttcaaagatagtttggcggcataggttctaaggtaggatccaaacttcattccatcttgaacacttggcacttcagatcgatcatcaccttcatattcctcgatccactttacttaacctccgtaagtagacctcattggcgtcttcaagtttcaatgtctcagaactactgaagttgaaagagagaggggagtagacaatgaaacaatttgcaaagaattctagataaggaagaaaggagaaattttcacaaatcatatttt

SEQ ID NO: 703 - DNA, 2069 bp, Oryza sativa
agttcactagtgaattgggtgccattatccgtaataatacggttaggcactccaaaacgggccgtgatgcttttaatgaatttaagagcagagtgcttatcgatcttgacaaccggataagcctcgggccacttagtgaacttgtcgatcgcaacatacagatactcaaacccgcccggggcccgtttgaacggtcccaggatatcaagcccccagacagcaaatggccatgacagtggtatgatctgcagggcctgggccggctgatggatttgcttggcgtggaactgacacgctctgcatcgccggaccagatcgactgcatcattgagagctgtcggccaataaaatccttgacgaaaggccttgccaaccagggtgcgcgaggcggaatgggctccgcactcgccctcatggatgtcagcaagaagctcaacgccttgttcctgaggaatgcacttcaggaggattccgttagccgcgcgccgatagagggtcccttctaccagcacatagcgtttggaaatgcgttgtacgcgttcactcccttcgcggtcctcaggtagagtcttatctgtgaggtatgtttggatctcagagatccaagcgatcaatctaagggagcttggagcgctcccttcgggtcccgaggcctggactccgacgggcctcgggggtcggtcaggcgcatccgtctcccctaaggggtcgggtcgcgccgacggctgggtaagcctttcttcaaaggcgcccggtggggtctgggctcgcgaggacgcgagccgtgagagttcgtcggctatcatgttatcccgtctgggcacatgccgaagctctattccgtcaaaatggcgctccatacgccgcacttggcgtacataggcgtccatttgcgggtcggagcaccggtactccttacagacctggttaacgaccagctgggaatcgcctaacaccaggagacggcggatccccagtccggctgccaccctgagtccggcaaggagtccctcatactctgccatattattggtcgctcgaaagtcaaggcggaccagatatctaaggacgtctcctgtcggggaggtcaacgtgacccccgcaccggcaccctgaagggacagagaaccatcgaactgcatcacccagtgggtggtgtgaggcagctgcgaggggttcgtgctggcctcggggattgagacggtctctggagccggggtccactctgccacaaaatcggcgagggcctggctcttgatagcgtggcgtggttcaaagtgcagatcgaactcagaaagctcgattgcccattttaccacccgtcctgtaccctctcgattatgcaagatttgaccgaggggtaagacgtaaccacagtgaccctatgtgcctgaaaataatggcgcagtttcctcgaggccatcagaatagcgtaaagcatcttctgggcctgagggtatcgggtcttagcgtcccggagggcctcactaacaaagtagacaggccactgcacctttcggtggggccgatcctctctgctaggggccgtatccccggggcgttcttcgttcaagtggcctttcggggcgcacttgtcttctgtgccgatgacctcggggtcggaggatgaaaggggcggccttccctcagtggcctcggggccgtcctgggggtcgggggctcctggcatcgtcggacaagcgggcaaagggccaactccggtcgtcaggggcctctggcctccgttcgactcgggggcctcttctccctgctctttcccgggtcgagtcagcacagggttagcctcggggtcagagggcgttaagtgcggccttcccgcagtggccttggggccctcctgagggtcgggggcacctagcaccgtctgacaagcgggcagagggccgactccggtcgtcaggggccgtaagccaccgtccgactcgggggcttctcctccccgctcgctcccgggccaagttagcacagaatgggggtgcacgaaatgaggattgttttcatcgcgctccacaccaacgctgcactaactacttggggggtcgccgcta

SEQ ID NO: 704 - DNA, 610 bp, Oryza sativa
cctgcagccccagacaaacaaagccaaaccccccgcctcgcctacatctcgcgctctccgccccccgcccgcctccactctgcatggacgcctccgccggctcgtcggcgccgcactcgcacgggaacccggggaagcagggtggcggcggcggcggcggcggcggacgggggaaggccccggcggcggagatcaggggtgaggcggcgagggatgacgtctttttcgctgacgataccttcccgttgctcccggacttcccgtgcctttcttccccgtcaagctcaaccttctcgtcgtcgtcgtcgtcgaactcgtccagcgctttcaccaccgcggcgggagggggttgcggcggtgagccgtccgagccggcctcggcggcggacgggtttggtgagctcgccgacatagaccagctcctcgacctcgcgtcgctgtccgtcccgtgggaggccgagcagccgctgttcccggacgacgttggcatgatgatagaggacgccatgtccgggcaaccgcatcaggcggacgactgtaccggcgacggcgatacgaaggcggtgatggaggcggccgggggaggagacgacgccggcgacgcatgcat

SEQ ID NO: 705 - DNA, 2637 bp, Oryza sativa
ccactatacaatcgtgcaagttaaaagaaaaaccaaaatgtatcttcgttgtacaggtgatatccaccgcttgatttaattatttttgtttgtcgagttgtaaatcaaatttaatcttacatgtttgtctatagacatatagcatcccaaatgtttagcaccgaagaacattaacctatgccacatcgtgtcaagagcattcttagaaatgttgatgtagatataggcaccttatgggcctcactatttaattaaaaaaaatatgttgcactcaacttgtcatgttgttccatcagataaacgtggtatcgtttatgtttggacaattacttgacagttatttatttgactttattatgtacttagctataaacactcatgtattattttttgttaacttcgttaaaaatatcaaaccagtgctccataaaccagttcaacgccagctggcagctgcattactactattgcatgtgttagctagctgtttcgcttcggaaaaatattttctacacttggtatcatgtcacccagatgtatgcatgtagattatatagtataaagcactatacaattgtgcaagttaaaagaaaaaccaaattttatctacgttgtacaagtaaatatccactgcctgattttattatgtttgtttctcgagttgtagatcaaatttaatcttacatgtttgtctatagactcatagcatcccaatagatgttacttttttttaactttttataactatttaagtcgtatagaaataatggttgccatgatatctagataaaaaacctatccgccctctacttctactttgctgctcgctagctctttcatatttttttccctcaataattcagaggcgttatggtgctcttgctctatataaaccctccaagcctctggccgacgatcaagaaccactttgcccacgtacatacaccgacagccatggacaccccggcgttgctcccgttggcgcttgcccttgttgccatcccgatcaccatccttcttgatcttcaatcggatccgcctcggcaggctgtcccccgggccccgggcgtggccggtggtaacctgttcgacatcacgctggtgcggtgccggtgcttcatggagtgggcaggcaagtacggacccatcatgacggtctggctgggcacgtcgccgacgatcgtggtgtcgacgtcggagctagccagagaggtgttcaagaacgtacaatgatcagcagctcgccgaccgcccgcggaaccactcggcggagcggttaagccgcggcggcacggacctcatctgggcggactatggcccgcactacgtcaaggtgcggaagctgtgcaacctggagctctttgcgccgcgtcggatggaggctctcaggcccatcagcgaggacgaggtcaatgccatggtagagtccatctacagagccgtcactgctcctggtaggttgtacagcacgatgaatgaatttaatgtgttttgcacgcaacatcatgtgtcttaacaaacgctattattagattgattcataattacatagttgagtgtggcccgtgtaattgcgcggcaagcatccgtataaaatattttgtttacatatatttttctttaaaatttgttaagtagccatatagttatattaggatttcaaaagatcaaattttatcattgtcaagttttttattttataatttttaaatgtcacgttagccgccaatccttttctcctgcccgacctgccacagcttttattatactttaaaaattggatagtttgtctagttcattgtcttgtcgaattttgatttgtagttttggaagtccctttaaacgtcaacattgtactcctctacggtgtactaactttcaacctctttattatcattaggatttatgaaatggaacatgattatagttggattttcgttttctttttacttccaagaagtcctgtcaaccatcaccaccgttctcttttaatttacagcctacccaaaatctttccttctaatcatcctttggtttctaaatattgaatctagtaatcattaggagttttggtttttatttttaatatcccatcaacctctaccaaccctatctttatggtttgtctgatgtcccttttgcatttatggtcacttaccaccgttatgttatagatgtaatatgttctattaaaatatcttatctgttatttataatttatattcctactcaaccctcattttagtttttctaatcacataatttaatttatttttatttctaactttagttaattccgtattgtagtctatatgaattgttatttcatctatttcctatttaagttatttgtaaataatattcattctcaaactctcatttttatttgtcaactttcagaatttataaaatttttatcccggtttttcattaatcttgtgttgttttaatagtttttatttttatgatgaatttagttgttgataaattgtatacatgaactcatattttgatttttctaatttcgaaatttatttatttattattctaattttaattaatctcgtattttgtactacgattgactattcttttcatattacactttttaattttcaaatttcagttatttctaaa

SEQ ID NO: 706 - DNA, 2182 bp, Oryza sativa
accattgctggacggctaatcgccttgccaagcgtggactgccacatcctgctacttgtatgctttctgaccaggctgaggaatccattaatcacatcctagttacttgtgtcttttcccaacaagtgtggtcactaattctccaaaggttggggctgatttccatttctccaagtcaaaattctacttgcttatgctgttggtggcctaaggcagtgtaagaggcattgatcaaaactccaaaaaaaaagggctcaatacagttatcattttggtggcttgggaaatctggaagcataggaacgactgtttgtttaacggcgtcaatcctaatgtaatgtctgtcatccaaacggtggcaaatgagtatgacctatggtgtatggccggagcttctaagctcacatatttccctagtaggtcgctaaccccgtttgggtaaggttgtttttgttccttttcatatgtaacctcaggtcctgtttgtttgtagggtgagggagggtttttcttccctcctcgtttttttttcctgtcttaatgaaatgatacgtatttctcttgcatattcaagaaaaaaaaggtcaatgaaccttaaaagaatccaaaggataagcttgaagattttgcaggatgctagtagaatcattaccaatgggcacagtgttagcaatattctaaaatacggtgcaaatgtcatcacggaaaaatcaaaatgtaacatcagcttttgctaatttctcccaccacatccttcttaagaaatcaggacaaggaaataaaagcaaacatactatattgtacatctagaaaatatttttaaactgaagcacatgaatatcgtattctaggtacgctatggacttctgcttgcttcttggacctgttcattgaactgagaatcttccatttgacagtctatttaaaactagaaactataatttacaaattaagtaagaatctattgtgtgacatgttccgatatagctttcatgcatttggttcatttcgcttggatttgtatgatagctattttctcaggaaggaatatgctaactaggagtgtgtggtattataaattgagtttcttaaatggaaaatcacatcgttacaattttgtcacacgtgacttctcatgaaaaaatattaaccacaaattgagcatcaaaaatttttagctgcactacaaatatcggccattcaacatggcttttgtcacaaggaagagaccattcaacatttgttttttcaatgtcgtgtttctcgcttggtatggtctgttgttcatatggcttcgaacatacaacctcctcaaaatattactcacttgtttgggcgttggcttacttgtgttcctaaagacatgagaaatctgcttttgatgggtgcagcatctctttgttggtccatatggctaagcagaaacgaggtaatttttgataacaaggtggtgtcttctcctttgcaggttactactttagtcacccggtggctacgctcctgggccatcctccacaaacagggacttcgggatactattgcggtggtatcgcaacgtttggattaggtggcacaggagttttttacccaggagcatgggtggcgatctagtctacggattgatagccactagtttctatgttttgtgatggggaagtgttcttaggtccagttttttggttgtgtgcattctatgcagaggccgggggtggactcagttggaatgtatcatcttggtgtatttaactgagtcttaataaagcttccattatctaaaaaacaaatatcggccaaatgaaacacattgcatttagaaaattttaacttcaattccatctttctacatcacaagtgtaatccactgatctaataagtaataaccaaatatacaattaggttccataataaggaaagcggtataaatcatgtgaagatgttgaggacaagctatagaagcttgcagattatataagaaaggataaaaaagatcaggaatttcatgcacaagcaaaccacggaattatgtaaggagctaggcaacaaacctgtctccaaagtggaagtgacttaaactgatctcctagatcatgcagcctctgtgaactacaacatataaggggcagagataaatgcttaaccaacttaaaacgaaagaagaggaagataacaaaaaaaaaagaaa

SEQ ID NO: 707 - DNA, 1051 bp, Oryza sativa
cgagttattgcatggcagaacttttagtcccgtcaatttgaaaattgcatgccccaagtaggatccaacacaatcacggccagtgatcacaagaaagtacgaccgaactgcaagtttgagcactccaatcacaccaaaaactattctaactttaggatttgtagagggaccacgaggtggcaactcttccactagactcattgatccatttgtccgatcaactgacaggaacaaatcagcaagaccgtcaactggttcaaatacgtaacggtctgcaaactcccacagccttagtcttgtgtgtagctttggtgaagggcatgcttcagttgcaacactcatcgtgtgatgccctgatagaggaatacatgagtaaatgttaaatcatcagaatgataaatatgggccacagatataaccagtcaagacatgtgatgcccataatatactggaacaatagtaacagatgaatacctgaataatgttatcgtgctcttaaaataaccaataacagtacaagtgtcaggattttcctagtaaggataagcctattgtaatcatagaatacaaacacatgcacattaaactaacatccttaaaaaactaattgggatttgtgggccatggaaccaacatccttcagcatctagaactgttagatagccatggtccgatgatcatatcatatcgcatatagcaagacaaaaagagcatatgagacaagaagccaaacaagtatgacgaaaagggccagggaaggtaccctgccatgtatcctttttatcacaatagatagatagggaaatcaaaccggataactataaatgtcaaataaacaagaaagctattacataagaatgcacagataatataatgtgaaaagaaaatccataacctgattttaatactcatcacatgatcctgaccttgcatcataaagaatgtacacagttttctatcaatcatgccaacagtgcctaggactcacattttctttttttctacaaaatgctattccatgatttcatataattatgcactgacaagtcaa

SEQ ID NO: 708 - DNA, 1095 bp, Oryza sativa
gtggtttgaagccgactcggttgagatggtcttgaagtggctttcagccgcgttcgggaatccaaacgggaccgaaagccggttctctcccgactggtctgattccgagtcgaggagagaaatcttgccgaagttgttggtgatgaagtcgaggctgccgaaccgaaacgtctgcccgggtgggaagacgaggtcgtcgatgccggagacggaacccattgcactgatcggcgagaagcttgacgctacccctacctggcgcgccaactgtcgaaactagatttcggcaataataaaagggggtggctatcaagctaggaaagtgtatgggtttggagacaaaggatttatacaggttctggccttcttataaaagaagtaataccctactcctgtccggggatgaatccgccgagtgtattattgattgtatgattcgggaaaaatcatcatctgcccctagaggcgcccggaccccccttatatatgggaaggagtccggattacaaaagataatctatattcctaacggaatatgaagatacaggtaaaatacagtcgtaaccgactaagtctctgggtgtttccttgatacacaagttaagaaacaaacccgagatacagataagatattctatctacattaggtatcctgtacccagttcgaataccatcgccgtgtagatatgggatacccataatctccacagtagcccccgagtcctttgcagtcgaccatcatagccttctcaaagataataatccgagtacttcaaactcttcaagccaaaatctgccgagtggactgtaaagggcgaaaagataaagaatatggtgcatcgaatagatgcacctaattaggtgtagcccccaactatgtgattagttaacaaactaaacatatagttgaaagacaaaataataacacaattgtgcattatatgacaaaagcatacgcggcgcctaaataggcatgctagccgactgctttttagccacaataaaagaaatccgagtggtttacactctaaaaagttcacgaatgaacacacttgacaggcatccgaatataaaaactctaaagattacccatca

SEQ ID NO: 709 - DNA, 725 bp, Oryza sativa
ccattgcgaaggggagaaagaagacggaccgccccgggtagtctggcgccgggcgtccctcacccagcattactatctcacggccggtggcagattccggcatgaagcggcgcggcaacccagcctgcttctcgctcacaatgcgagaaggcggcagcacgctaccatcaagcagtgcggagccccgtgccatggcgccggacgaagagaaatgaagagcgagcgcgtgtggcgaaagaagggcgcagggaagaaggagttaggacgcaagcggcgaaggcaagggaaatgatggcgaaaggaaggagacaaatcccatcctcagtgcctttatacccttgccaacgctgtgcccggctcctcgtttctcgcgcccattatttcgccccctcgtttctcgcacccacgcttccactaatcccattcgcccgcttgcggcgcgtgagatggatatgcggttgcggcagtcgagatagatcgtatcgtgcgcgcgttaattacgctcgccgaccgaagcgacattaccgtatctccaggcgaggcaaatcggctcgcccagattcgtgcgccgctcaggtgatgtggcagtcttgaagagaccgcccattattgacagccaattaccattaccggtgtgcatggtttgagaccgttgggtttttgcccaaccatggagaccggtcccacctgtcaccaggctttaggagtggcgtcacgcccggccg

SEQ ID NO: 710 - DNA, 943 bp, Oryza sativa
atttcaaattcgagttcaaaatttggcttgaaagtcttaaaatttgggtttgaaagttttgacatttcagacgaaaattttgaattttcagttgaaagttttcaaaaatttgagttgaaagcttcaaattttaggttgaaagcttcaatgttttgagttgaaattttcaaatttgagctgaatgtttaaaaaaaggggttgaaagttttcatatatgagtgcatatgttaatcacgttacctaattaaaaaaatagaactaataatgaagaattataacagtagtcacattgtagattgatttgcctcacatgccgtactgcctctttgcctcgattcctatactagcacatatgcacgtgcatgcgccggcgctgccggatgaaaagaagatagaagtatgcttgggccttgggccttgctaatgatggccgaaactgaaacactcgctagatatttatccagcgcgtctgcaccaattagcaatttcgctagaaaacagccacaatgctaacatgtactacctcagtgtcaaaataagtacagctataggtatttaggtccaacgtttgaccattcatcttatttgaaaaatttatgaaaaattttaaaaaatagtcacacatactccctccagtttcattttaattgacgttttgggcaatgacatggtctacaaaatatatctttaaccttatttttctattataatatatacaatcaataaatacatgtttatttttattatagtgttttgaaagataaatctatatatgttgatctagtttctttaaattaaatatttttaaagttattgttggtcaaagttgtaaaagtttgacctcaacctagtctaaaacatcaattattatagaaccggaggggagtaaggtactatttatgttttatctgtaggatcgaacaacaagaaactatctacatta

SEQ ID NO: 711 - DNA, 1537 bp, Oryza sativa
catagcaaccaaatctaacaagtgaagagaactaccccactcccgagaattaacatagtcaaaccagctaacttttccatccacataactgcgattgactcccattccacagaaaaatccaccatgatgaatctcaattgtgaaatgcttcgaattagggcctacccatggcaaataaaacaaaacgatcaacaaccaactaaaaccctagctgcaaccctaactacccaaatagcatttcataaaaaaccctacttcccagctacaaaccatgcagatgagtgctacaccacaaggaagtgcggtacttacggtacacgggcgccgcctcagcttctcccctcaagctgaggtccatcgtcgcctgtgcgccgacgccagcgagggagccggagcacgccgctgcctatcgcccgccgacacttgcgcaggtggatgcgccgcccgaatcgcagccgccgccgatgatccccggagtcacctactcgccgcttcccctccctcctgagctgaggattggggaaaaataggagagaggcatcggatttgggattttagggtggtgtctaggctttactgtagcaataaggggtatattgcaattattccaagcctattggttgcggaggagggtatctgcaaaacgggtgcttgcgtggcatgccacgtcggcagtctgagccagaagtggggtttgaacctgccatgtatcattaaactaagatggtggatttgactctgcaatttacaagattgtggacctaagtaacacccgcgctcaagtttaaggaccggccatgtattttactcaaactaaaaatatacactggacggcacagttgatccatcatcctctaaaaaatatagcaaaaatgttggagaaacatatcgtcacgttcaaaactaaatttcaccacgaagaaattgagaattcactgcttcaagagttgaaaataggtagaaaactaccaagctttagtgacaaaggaaaataagcagtgaaatcttaagagcgtcagccataggtttactcagaattttacatttcagtgcaattgaagtacttttgaaagaaaatagaatagatcacatgttaacttgatcaaagtccaatttccatttattctgcattctgaactttttttatgttgtatatctacagtaatgaacattggaatcataaaaaaaaactgaaacaagctggaatgctgtaaaccagtaactgagccatcacagtagtatcaaatacacaagacctcaaacataagagagtacttcaatatttgatcacaaagttagttcaacaacctcatggttcccatcaaaacttaaacatgtttaataggacggtactccgaacaaaagctaaaccacataaatgtagtattatactaaaagatccatttctctggttcaggcggagttctcaggctcaacggcgaggcaaaatggccttcagcggtactgcaaggagaagacaagaaatttagagcattttcatttaaaaaaatttctagactatatgtaagttgattga

SEQ ID NO: 712 - DNA, 38404 bp, Oryza sativa
  unsure (1)..(38404): unsure at all n locations
aagggttgtttgggatctgtgtgacttgccttgctggccttggaactcttcaaactcttcttctgcgaaaacggactctccggaaacgacggaatctaagcagaaaagagcaaaatcaccaaaacagcacctaaacaagcatgaacagtatatgtggatatttttaatgtgtagatctcaattttagaaaaatttagagacttgaaccaactaaatcggagctaagatgaattagttatgaatttttaaagattaaatcggattaaaacacttatatcggtttaaattgaattatgacgcaataatgaattatttttgaaaaggaaaagagggtttattgcgtcagcgggctagggtttggtggaccgggcgcacgggcggcggttcacacgaacggacggccgagatcgaaccaatccaaaacggacggccgagatcgattgggtccacggcggctcacggcggacgaccccgataacgtcagcggtgacgtcaccgacagcggcggcggctcggcggaggagacggctcgaacggcgcacgctcgccggcgaacggcggcgcgaggacgcaaacggagggcaccaagacgaagcgggcggcacggcgaactgaccggcgaccaaaacgacggcggaaggtcaacggacggcgacggcgacgaggaggaagcggcgaagctcttcggcttgacgacggcgacgaagctccgacgatctccggcgacggcgaaggggcggacgaggacggcgacgacttggcgagcacgacggtggtcttcccgagcgacggcgacggctgaaacgacggcggcgcacggctggagcggcggcggcgacggcaaagctagggcacacggcgctagggcttttccgacgacgagaggcgaaggcgaaggtggcgacgggtagaggagacaccgggggtccttttaaaggggctcagaggcggcggcgaaggcccaaggcggcggcaacggcgaaggaaagctcggcttggagagagggaaaccgatccgtaacgaactcgattccacgaacttccaaaacgatttagccaaagattccaaaggagaaaaggtagaggagatcccggagattgtttcccctcaaacaattcggccggagaaggaaaggaacggccggatttggaaaggaacggcggcggcggcgcgctagggtttcgggcagcggcggcgcgacgaagacgatgggtccgacaggtgggacccacctgtcagcgaccgaacgcgcgcgcgcggcggctgcggactgggccgaactgggccgaggagagagagagcggttttgggccgactttcggcccaaagccaaaagagactttttaaaacctttttcaatttaaattattccttaaatgcaattccatttattaaaaatacttccttagctcaaataaatcccagaaaaatctaggaattatagaattaagcaaagtatttaatgaaattttatctggccccattttatattggaatttattaattaaaattagattttcttttcaagacttttaaaattatttctaaaaattccaattaaacaacaatttatatattttgaattttcagggtgtgacaatccgctagagccataggcaagtagtttgccatggctttgctgtctcctcctgctgcatgaattgcgagaccgtagacggtgagccaagactcgggattagtggtgccatgatacttctcgattccagtcggcttgaagccggctggccaatcgactcgacgcaggtcgctagtaaaggtagcgactccatccacatcgtcgtcatagcggtctggtgaatggtggtgggggtagcctcgtgctgcacggcactggttgattgtatcacgaagatcgacggggcgcctacgaggtggggagcgaggccgttcaactccgcgctccctgtgtcgttcgggaggcgagtggacagatcgctcatcgtaacccctgctcctgcgattggatcccgcgccggcgatgctgaggcttggctggtgataatcttgagatcgaagatggggaactcggctgccagtcgatgtgcggacgcttgcggagttaaccgggaccgaggcggcaatcatggtcttggtctggttcaagatgttgacgacgtgatcagcttggttgagtgcgtcttccttgaggagggtgtcgaggagagtgattgctgcaaccgcgttctgttgaggggtgcgaaagaccgccgttccctcaacgtcttgctgtccgataagttctcgcgctcgtcgcccggcttccaaggctcgttgtcgtcggtcctcagcctcctttgcagcccgttcacgttcctgttgctcgcgctgcagccgttctcgctcttgtgcctggcgctctgcttccagtcggcgtcgttcggcctcctgttgtacgcgtcgtccttctgcttctcgagcttggcgctgttctttagtctcgttgtcgaccatgaagacgccgaagtagagaggggtgtaattatcttcgaagctttcgtcgaagtcatcgaggctgcggttgtcgtagcgatagccgaattcatcgtactctacgacctcagttggtcgtgagtcgatgccaggggagctgaggtagccttccaattagtccgtcgaaatcgtgcctagtggtggagtatgatgccgacttccctggagctaggccggatcggggctaaagccagatcccgcctaggcctacggggagaagacgcccttgtagtaaagacggcagccagatcgtcagggagtttcatcaggattggcggataggccccatcgtcttgatctggtcgtgttggagtagattgcatctcgtccgagtggtttgaagccaactcggcggagatgaccttggggtagacctcggccgagttcggaataccaaacggggcggagatccggtctcttcctgagtggttcgaatacgagtcgaggagagaaatcttgccgaagtcgttggtgatgaagtctaggctgccgaaccggaacgcctgcctaggagggaagacgaagtcgtcaatgtcggagacggaacccatcgcacttagtcggcgaagaacttgacgctacccctacctagcacgccaactatcgaaacaagatttcggcaatactaaaagggggtggctatcaagctggaaaagtggatgggtttagaggcaaggaattttatacaggttcaggccttcttaatcaagaagtaatacgctactcctgtccggggattaatccgccgagtgtattattgatcgtatgatctgggagaaaaatcgtgttcctagagggacccggacccctccttatataggggaaggggtgtccgtattacaaaatacagtccatatccctaacggaatatgtaattacagataaaatataatcgtaaccgactaggatctcaggtatttccttgacatacaagtttaaaacctaacccgagtcctcttaaagatattctatctatacatggtaccctgtacccagtcggactatacatgccgtgtagatctagggtatctataatctccacacctctctagcgcaacggtcaagcataggcattgcatgcatatatgtcattaccactcatactctctcccgttccataatatattctagatggttcagataaggttgaggtcaaacatagaactttaactatcaattacttttagttgaagacactagaacacgagtatagatttctcttacaaatgactttaataaaattaaatatttaattatttgataatagaaaaccctagtttaggatatgttttggagaccgtatcgaatgtttaccaaaacgttaagagttatgtaatgaagggagtaactcataacactggcgccaaccatctatacttaacatacaccaatagcgcaacaagaaaataaaaacaagaagaatgtcaatggatatgttatctgtactacagtgaaagggactttcgtccatccacaccccctcccatcgtgtcacgcatagcggataattagtccacctggcataaaactcgcccctagagaaaaactaaccaaaccacatgaaaccgacctgcaacattctcgcctatcaaactcaggtggtggttggagtaaaaactacttttacatatgtcaacacagatgtttctattattttgcataactaagttgagtataaaatttgggtttctgttgtgacacaggggcagttaactaagtatgtattaggagagtatcggggcctaaaattgttttcgttatgatctagtagatcaggagtgagatagcaaaatacatgcccttaattagctaggcaaacatgtccctggatatgaatgttggcctttgagaaagggggcggagtaagctgggcaagtagttgcaaggctcatcttaagaataaaagataagatgggccaagtagtgtaaatggctaggaaaaatgtaacctatttggaattggataagattcattcctagcacctaaatttttatcaaagtccattcttttcacattaaactcaaaaactgatctcctctaaattttaaaatccgacatataacaccctaatctatgcttattggtagctttcatcgatattgttggtgtattttctagtcaacacggactcgccttaagatttacagtgttaacgagtcaccaattcgtgttggtgcattttttggccaacacaatactcacctaataatttgcagttttaatggagtcaccaaccactttgatttagaaaacctcttgacccttgtgctaaatttaggtgtcaacacacacacgtatgctcttttgacaaactggagagccaaaaagcatagaacttgtggtattacaacgataatctctatcggccacacgggtttagaagcacctagaaaattgttctctttgcagtagtgtcttgacaaagaaatagttttctaaaaacaattcccacaactcaatatagatcttcccaactaagggattatccactgagttcctagcacatggatcataatccaaaaatagttttttaagccatgtctctaaacttgaaacaattttactcaaattctaatcattgaacgcttattagtcaaatcatcgtcactaatgctcattgacaaataaattagcttgctcaacctaggagagccaagcggcaaaattaattatcttccaagcccattgataaattccaccaatgctgtatatcactttatccatagcaactccaaatcgatcagcataaaaattccacaaatctctatgtttcagcaatataactctttattaaacaaagtttatttagatgcttaccattgaactcttcaatagatcttctccgatcaaccctcttttttgcatcctttaaatatttaactagtgaaatcctccaattggtaacttgaaatcttgaagcatcactaaatttggaacaatcaagaatgggttgtttaatcaccttttgagcctatgcccctagctatatactgtgggcagcatttttcagtcaagccagcattagagctatagccaaattgtccatgtgcccagtaaaaccattaatgaagtcgcggtcagactagcatttgaagcatcagtgggaccagcagtgaggcaccggtcggatcagcatgtgtttcggtttgaccggccatgtagttgtggctagttcggtctagtccacaattacctctcacactttctaatgaagtatcacctttgcaatacacaaatattgcctttcctatcgttgtaaccagatgcttattgtgtcaaatgtttagataacatatattttctagacatacgaaaaattgtaatatccaaagatactaatatgactagatatttattcaagtgactattcaaaaataattatgaaggcaacaaaaactcctagccacttgatctatgaatcacccaaaagcaagtctctcacacctatgagttataacaactatatatgaacataacaatttgacttaagcatggatacaaaatattctaatagggccaatgttaaactaacatctctaggtaatatcataataaaaccaatacattggcctttcatacacgtcaaattactataaagcaaaacttccatggtgcaatataaaattgatctcattgcaagactaaatatgatgcgccatcaagacagatatgatttggcccttcaaggttttctcaaactcatgaaactgttgatgcaaaaaaaaaacacacacactggcctgagagatttgctttactctagtgcgggtccaaagatttgctttcggttcagagcatgctagttggtttgatcctgcaaccaacaacaaacaaagaatccaaagttaaatccataaacgatagccgatcggctagattgccgatgacgtatcgtttaaatcgagctgatgcaatatgatttggatcggcaatgaagtatataatgaataaaagattcaatttagtttaccggctgtagataccaacgatgtatatctatacttccaattatatttaaaccaagtgattgggatagatcggacagttgccgacacagtataaatcacttaagtctaaatgtacttaagagtaaagattacataagatcatatcatagccgattggtaaatctagcgtgtatcggatattgctccaatactcctttatactaagatatcactatagattaaatatgttaaacatgaatcaatctattgttagtttaatctaagcatattgatatcaagcttaatatattttatcttaatgagatcttgatataaagggcagatttaacatatcaagtagatagattaagaacaagacagctaaaccaggtaagatcggctgaaactccggtactatctctattaattatcatgaagcaagctagagattatggttctaaatattacttaatagatcaaacttaactgatgtagcattaagcattaaggagaaacataatatctaatgaataagccaatgaaaaccttttagacatggtagatatgctatataatctaaaccgacaaagttacctaaccctatcgggtgatttcgataatagagataccgacaaaactagataagagtatcaatctagattatatagcatatatgataactcgacgatttacataaacaagattagagtgtcataaatatgtaagcactaatcccgagaacgcaagctgccataacaagttttaccttttcgtcgaagatcacaaccgatgcagcccaactcgaaagcaagaactcgtcgaaacaatgaaaatagaaaagggtggcgatgcaccgaaagtgttattgaactgatgttaattgtttacaaggtattgggtcatatttatacccaaaatacataatatgtccttgtcggacgcgactctatttttattacaactctaaaacacgaacaagtccctttggtggactcttaccgaacatatctataaagaaactactagaatatcctaattaatagatacaattaccttcttcggactcaatccacacttgacaatacttgtacaggacctcagtcgatcccgacaatgattctataattatcctgccgaaatcggctacatcggcttctccctatccgatttggtatcagccgatgcagacagtagccgatgcaatctgtagccgacgtgcactctgtttcaaagaataacgaactccttccaaatccgcttaggctttgactccaaatccaatctatgatttaccaaatttggtcgttaacagaaacaaaacatatttaattgacgtatatgctctcttgccaattccaccatacagaattggcttcgtgacatcaatttgaaattattgatttgacaagtaaaaatacaggttctagatagcaagcaatgccttaactttgtataaacatgtcataatgtaagatataataaactcacaccttgtcttcacatgtagcaaacgacagctcagagatgtgttcatgtactctttgccattcacttctcttaacctcttcatcaaaatattgataccttgtcccttcatgcaaaattggctttcctatttatttcacgattttgaaggtaatgcaaacactatattgacatccttctcgctatgtgaattagaaccatctcttatgtccagtgatgactcttcattcaataaatcgtatttatcatggcttggggaaatcaccagtctttcaatgtttactaccttgggtctccactctttcctatgtttttattagaggcttaaatttatcaagcaatccgccccacaagtctttgtacttttttcctcgttttgttgatgcttggcttgaagacattgtaacatactcttctgagagtgggataagcgggaaagtacctacttcggctatgggtgcctctcggtcagaccaaccatgtagacaggacaggtgccatactacacagtctcaggccattctagacaccccgagtcggaccgacgtgatctcgaaccagataatgtcattctggtcatgcctggtggctggtcggaccagcctcagggcccagttggcacagagtcatgctaaaccgtcctagatggttatggtcttccctggttagatcagccttagagcctagttggaccggcaataccggaaattgaatcatcgacttcggtcttctttgcttgtgggatttctgttgtatttccagtaggtactgggacctcgtttggcttcaccttagcaacaatgacctctaaagctttggttcgtttcatcacccatacgttcttcatatttttcacctttgattgactggaccaatcctttttctgggaaatgcacttgactagagttagatggacaacttggtgatgagtacgaaaacgacatcagtaattgaggcatccactgcatttggaatataaaagtatacaaattagggttaattggatcaatgccatacaaatatgctatnttagataaatgccactactattcacgaaatcggttacgtgccactggaatttagggaaattggaactgtgccactgtaacatactagatttttcagggtaaaatttttgcaaaaatatttaaagtcgatgttctttgttctttcgaattggagcctcccaatccttatatttcttttgttccctctaagtttccgactcccacataaccttgtttagtttccctctccaaaccaaattcgagatatcccagagaaaattcccaaaaccatcagaagagcttgtgtttattttaagttataccggagtcatcgtgcaaatattctaaaatccccaatctcatcgatttcctattcaaaaatatcctaccaaagatctattcaaaaatttcttgaaaaattcaaatggatcactatctctccctgggctgaaatcaaccttaacccagcccatcaccttttcttttcaactcctttgcccatctccctctgtttgggccgtgcgaggccacgactattgttggcccagccgaggcagccgccccaactaaaccgctgctcgcttcactcggtccatcccgaaataactaatacgcgaacgttcgggttaattcctactcgcgaacggctcgacaggttggcatacacgaccgtgccacgcgtgtgaatgcaaccgatttccttttgtagctaaactgtgcatgcatatatatgacttccttaatcaccgagctaatctcaatagctcggtgattaaggaagtcatatgtatatggtttcctttagtcaccgaacttttgagactaatcacattggtgaattatgttttataatttgttacacgggacatgtacaaagacgagggataatttttgggaattctcactcaatgcatgtccacatttgctactttgtttttgcccaattgaaacttatttttttttggaatttattttaattttgttttgaaattcatctatatataaaaagtttgtataacgaaagtttttatatataaagtctgtgtatcaaaagtttatctacataaagtttgcatatataaagttcaattttgtgttaaagtttgtgaatagagatattagtaatttgaataggatttatttaaatgaaaagtttaaaaatttgggtaaaaaaattgttgagtagaagatgttgctataaaataaaaaattatgtataccttagttacacattaattatgtggtaatcaatgctttaattataaacatcacactgattttttcggtagcaaaatatgtacataccatcgacatatgcagataactataccctaagtacatgctagctaattaaagtgtcggcatgtatgcctacatgctagtactctagttcttatctagttgcaagatgtgtgtatgcgatgcgcttacaaatcgtgctgctaattaagagcatataagcacgaactgaatgatactaaaggtctgagcatgttcgtgatccgcgaacgttcgcgtattagcctcacccggtccagccaccgctcgcactacgcgcgcgtcgcctcgcgccaccctgcgccttgcttgcgcccgcacgcgcttggcccgcactagccgcgtgccgccttgtacctgcctgctctgcgccgcatgtcgccacgcgcgcggcacacgctcgctcgaagccgcaccgaggaactcgatcagatggtgtagacgttgtcgcacaaatcttaaaaaccgagcaagcaccactgctaccgtcaatctcaatctcccactacccaactatttaagcaggcaaggtagccatgctcatcctttttcccctctctttctcctttactcagaaaggaatcgagttcccaaaatttcttcaaactgccgtggtcgtcggccgatctgtcgctgcaggccaccggtcgtcgtctcctcgcgccaccagactcttccagagccggtgaggccatctccttgtttttcccctcctctccatgcttgtactgaggtcccatcgtgctcctgtccgtcaccatggctaccaccgtggtcagtttttttttccaacgtttcatctctatcaactaaccaaaaaatggaaccttctcatccgggaacacgttttgacgcgctcacccgcccgcgttcgtcaccggagctgccacttccatgcccggtgtcaccatagctccagatctggaattcgcgttccggccagcatgaacatcctctcagagaaccagcaacagcttcgagttcgcagcacctggggacgaaattacctcaagacgttcttactgttccgccacgataaccgtcatccaacttttctctttttatctctctgtctgtgttcgtggttcacagtggaagaagaacagtactagattcaatactgttccaccatggtccagcctgaccacaccacctgagccaacccaggtagttgttaaccaaaacaaaaccgattcatatcaattcttccatcagttcacctccagattcaaaccaaatcaattctagtatctgtaacaacaataatcccaaagtgcaaccactaaaacacatgctatcgatcataaccctaggataaatcgtttgacatccaagtcaattaactcttgatttaccattttcttttgttctcgctccgattcataatatttattttatcgtttatttgtagtatttttattataggcttatttggtcgtttcttcgtgtgcgtacgttagatagcgttgaagatcccaccggactcacaggaactgaagtgggcctagaaggatacgctgaagcttccgaaggccatgttccacaaggcaagccacaatttccaatctttgatcatattgaaacctagtagagaaccacttagttattttatgcattgagtatttataaaactattttgcttaagaattattttcgaataaacttgttagtttagttattacccattgttacattgttattattggccaaatccatggattgctatatcacgccctttgataacctaggtgtagatttatatacttcacaacaatattctagtggataagaccaccaaatatctatactcacatacatggtttacccgtcgtcacgtggtggcgtgtcgggtgatataaaatgtgttatttgatatgagtcactcgcctggagtgatatgaaagattaattctgggtgaagatggatgttgtggtgtgtgaggccgtgcatattgttataattattttgtggaatgtgtatattacacttgaagtatgcacgggcctgtgctagttttggtggctttccccggatataaggactaccctcttatgccatggaaaatgatgtaatttgcgcccatccacagaactgagtaatcagacatagcctagtacattgtcccactatatgaaagactgtagggcggctttatgagcaggtttggggtggacatgtggaaggggcttcggccaggttaacatgatccacgacggtggaacccgtgaaagcagcgaccgtctagccttgcttaggcctagcaagtgcccgactgctaggacggatcaatatcccactgggcagtaactagtagtaagtgggactctcgaatggctatgttgtcctcagcctagctagctgttgacatcaggtgggtaaagctgagcagtctctgcagagatgagtcttaaatcattcgaatgtgccatgcttccggttaagaagctatgtcattgggtgattcctatttatcatggtatgagtagattttaaattaaaatatggaatatgatgaagatgaggatgaatggtgattaatattgctaccattttaaaatgatgatttacagttgtttgtgaataaaatgtttgataaagtagggaaaaactatttataataggcttgttatgaaacctccttgatgaactatattctttgtacgccttgcatatattctatttgtattattatgggtgtggcttgctaggtacctcggtactcacctcttgcataaaatgtggttcaggcaatcaatccttccccgaggaggtgcatgaaggggaggaattctacggtgctaacgagttcatgttctaggtcgatctgctctcaagcattgcctgtggtgtttttatcctattttgtgtttgggtcttttgtttgtagggagtgtgtttggcctgttggcccctaaaacctgtcttagttatcttttatgtaataatttctgtaaaaacttgggtatatatatcgaaagctgttctgtttatcaatttgtgcgcgatcgaaatcctgaacggtcgcgggtggtttcgggataccgtactcaaaccgggtacccccacagccactccgtcttgttttccatcagaccaatagacgtgggacccacatgtcagttccatcttccaccatcctccctcttagggatggcaatcgggcgcgacgggtacgggtagtgcctacccatacccgtgcccatgagattatttttgcccgtgggtatacccattactacatgacgggtaaggatggttgcccatgcccatcgcccgcgggcgtcttgtgcccgcgggcgtgcccgtttacccgccacaacaaaagtagtggaacaaaaagtctacaaccttctaagttcgatatcgaacttaaaacatcaaatattctctgcctcggtgtggtgtctctcctttgacggcgacagagtaagagggagagataataagggaaataaaagggaaaccgtagaaaacaaagaacgtggcttatgtattctagtggattttgcttctagcctacatgtaagttagatttcgcgggtaaacgggcaaagcgggcatgggtagtgattacccatacccatgcccatttacccatcgggcatagcttttaacccaataaaatacccatgggtataaaatggagaacaaacccaatcctaatagggtttttacccacgggtaaacggacaaacgggcacaattgccatccctactccctcttctttcttcctcacgtgcaattgaggctaacggagatttttaacggaaaacgcaacgggacggtacggttctagtttccccaaattctagtggcacgtagctgatatcgtgaatagcagtggtatttatctaaactggcatatttgtagtagcatggatccaattaacggctcactgagaagccacttttctgcggggccatttgttagtgagaatccatatttgtacaaacaacccctctagatgctatattgcaggacacaagatatataacatatatcaatttgcataaatgatttaaattccacatatattaatttcatcagtagacttaatatataatttaatttgcacaatgttaattggatccactcgttatactctgaggtaatacttcttggtaatatattaaaaaatgtattttcccttaacaaaattctactcgggctcacttgtcgaacactagtctagaaaaactataaactacatctaattagttgcggtggggctaattctcttttggcttccaccaccgtcgtcaagcaggcgctcagggtcggccccgtgctagagcacacactaggggcctgtaccggggttctgttggctggccctgttccggggtcgaagatgggggctggtgtggtgccttctcctccagctccgatttggtcggagcctcctcccagctagacgacggcttggcctccagcgttgccacggtcacgtaggcactcacctcctgcaacaccggccgccacgtagggcctgcctcttgctcctcgggagcgttggggttgactctggcatttcacctccgcaacctgccgccgctgcgtccacagggatcgaggcattctccttgaccctggccttcacatggtcctcgggcgatctatggcccccgtcattgtcattagctttgttgctactcttgtcgtcattacgggagtactcctctgctagcgggtcatcgtcgaagtttttattttgaggggacctgctgtataccagtgctcaaaatcattgtccacttcatcattaggtgttttgcctagcaatgatgcaagcgatgacggggttatgtcgctgtgagagctgctcctactgttgttttcctactcctcgttggtgggataaatggccatggctagagagagtggataaatggccgtggctagagagagtggataaaggtaggatggaaaagtagggagagcatagcgagataaaacccattgtttattggaaaattgacatggcatgggagttgaggagtcaaaatgtggtagtggagaatgtgatgtcacgccctgaagttcccctccttgctttaaaattcataaaataaatcgtccaaagaaatgatttattttaacctagagtgaatccttaattaataaatgcaaataataatcggaaccggtatatggaatttttcttggattctacatgtcaaaatatgctaacaggatttttagtggaattttcagagccttggaaataattttaaccaattaaaataagcaaagtgcaatatttaatcccagggaaattccttttcttttttttctttttcttttcctcctttttctctcttgttgggccgtcggcccatctcctcccacgccaccctcctccttgcagggccggcccacgtctccctccctcctctctccgggtcaccaacaggtagggcccacctgtcggccccttcttcctcctccggccgttggagtcggagctccaactgcccacgccactggcgcctcacctcctccactccgcatcccgcgcccactccgccgtccgccttacccgtgcccacgtcgtcgcgacgccgccctcgccttcccgcccacgccgcgtgcccacaaggggcggatttgaattttgaatcccccccaactctctctccccactctcccacgtcgccagcgaaatcaggagcaccctagccacgtccgccactcccgagccccaataaagctcccccgcactcccctccacctttttcctctttccgccgctctctcccgcgccgctacacccatcgccgccgccctccggccgtgctccggctgccgctagccaccgcgccgagcctcaccatcgacgccgccgcgttcgccatccggcgagccgccgcgtccgctgtccgcctggccaaacccgtcgccggagcccgcatctcctcgcattccggtgagcttccaccattgccgccgccttcggctttgttttccgctcaccgtggaccacctttctccctctaatccctcccattgtgttccctaggtggttccagagctcgtccgcccctcgccgccatctctcggtcgctcatcgtcgccgttcgtcgtcgcctccctccggccggccgaacccctcggtgagaactccctctcctccctctttctctccctcccgtgtccgctgccatccaccgcacacgcgtccttgccttcggccgccgccaccgccttccgcgccattcactgccgttggttgctgttgccggcgaccgtgcaccgccgccgctcgccgtagccggccggccggcttggagccgagccgagcccggcagatgccaaccccccttttggagccgttgccggtggcgcccgcctgccagtaccccctccctctcccttgtgcctatgacccgtgggtcctgcctgtcggcaccgccccccccttgggtgacgttagccctgggacatattgcgcaataaatacattaaggctttttctttattagtaaaaacacagataatattctaaaaatcatatctaattcatccgagctccgattaagttcattcaagtctcagtaaattcataaaaatacatagaatccattaaaaatggttttgtttcctatttcagtagtcttatagcctgttttgcttgtgtgctttgtttgtcgcgtagatttcggctgtttcgtcgatctgcagtttctcgaaggcattgttatggtctcatcagtgcgagagtaaggcaagtcatgcattacgattgatcatattgtacccaatttacaaatgtcctgcatttctattaaatgttgcattgttttataatattatgtgggatggttcctactactcagccatatattgtttaccttatgccattgataacttgggtattaaaatgactagatattggtttaggaaatgcttagccatgcttagttcaactagtacacaaagggggatcacattaaagcatagacttcgattattggcatagctttggattagtgccaccgccagggtgttagttaattaaaatacactacatggtgggctgtgggtgcatggttttgctagtcgcacccatggcaattaaggaccggttcgcgggatgccctggaagaagttatcgtacttaccacaagccagcgtggacaatggctgggcttgtagtgtagcttcctctagccgacgtacccaggcgagggtgggcgtgatggagttgggtcggccggggtgtccggttgatcggcttccggattcaccgcgacacgaaaggggggctgcccgttgcctactggggacgggggcgaaccctaaggtgtggtgcgatcggttagagggggttatgcgaagggtcctgtcacggcctctttccggtatgtcgtggtgatatgtcggcgcacgaaaatgtgtcgtggggctgtgtcttgtgggtacagttgtacacctctgatcagagtaaaactattcgaatagccgtgcccgtggttatgggcggtcgaccagattcaccgtgattagtctcacccctagttaggtaatgaactggtgtagttcaggtggttggttgggcctgttgcaacgtagtgtagcgttggacagtgattggttaatactgattacttactacaactattttactgctttcaactactgcttttaaatgctagctttatgcaaaagaacctttagcctcccttggatatatcctgcatcataccttccctttcggtatgacttgctgagtacagtgggtagtactcagtcttgctatcttttccccacaccagagttgaagtccctctcagttgaagatgtctcgaagaagttggtttcgtcgctgccgtcaaggatgcctgtggaatggagtcgcctcgttgtaggagtcaagtcttcaggcttagctcgcttttatcttttctgctacatttgtaatcttttatatttttataagacgtgaatctgtatgtcaacaattgtcgtttgtgtaccctggctggtcctggacaggggtttaatacacattcagcttagaaattctggttcgtgaatttctggacgtgacatgtgaccagcgcgcttcgtcttttgaagaggaagtaaccgaagtctatctgaaaattgatggtagtgggtgtggttgatgatttgaagtaatgacacaagatgaaagggcaataccacaattgggcctgaaaaattaatgtagtctaccatgtcccaaaattagcgtcagatagctgtcggaaaagaattgatattagcttcagaccatctgtggcgagaaggttagtgtcagatggtccgttggtagttcattttaaaaagacagactgtctgtcggcaatgatactaatttatgggaacagatggtctgttggtagttctataactaccgtcaaatcgtctgtgggcatttctcggggcccgccaaaaaattgggtcaatgagtttgcttgcgcgcgagcgaaaatttgccgcgcgcgggttgggctaaaatttgccgcgcgggctgggctggccgagtcagagagccaaataaaccctaaaaatcacacaactatcgatctacccatccccagcctcccccacgcacgcctccaatcgcgccgccgctgctcccctcctcccgtcgcgccgctagtcccctcctcccgtcgcgccgccagccctccccatctcaccgctgctcccctcccatcgcgccgcgctccctgcctcccgtagcacctccgccattccccatcgcgccgccgcatcgctccacccatcgcatcaaccctgcagctctccaggtcaggaggaatagatgtccccttcggccctgtcaattccaccaccactccgtgactcctagggctcgtagctccaggaaccagcgcccacgcaccctcccacgctcgcgtgtccactccgctgtcactcttcttggtatcgattctttacccatgcctcattgatgcaatttgctttcttgcgttttctgttcttgcgtgtacgttcttggatttctgttacatttgtatggtggtttgatgtgtcacgattgggagtaattgctgaggttggtgataatatgggataaatctggtattgcttggttcaattcggggtggtgctaatgttctgttcctaaattacaaattacagtggtttgatggcatgtagatttagaaacaactgtatttttgaaattttaggctgtatccaccacagccactaatatgttgccgcagtctatgagctgctgccatcactgatttccactttgccaaggaaccagtagggtggataggtggacagctgctcacctcttggtcgacagctcctccattgcgtgtgtcttgcaaaaaggggatttttatagccgtattgtgaatctgtgtgtatgtttgtgggtttctgtccattgagatatattaggtgatatttttgtgtaaataacaattgatttcccttttgctactggtgatatatatatatatatatttttacgttttggagatgagaaatttcgctctttgttctggatgcagctatcccttgggcttgagtgctgttcgaatgaaccagttggtgtcgcggaagtacatgggctgaatttattaaccaaggtatttggatcattttgatattgatatttagaattttccagggtgtacaagtggcagtgaatatagcactctctgaatattaaattttgaggcagtttacaatgaaatattgtaggtcatcaacaaggcaagcatcagaggaccaaggggatctccatggtagaagtttgaactttacttgaggaaaacagccatatagctggcaacaagcaaacaccaggttagtaatgagatgctttctatatatattatgttctactattgaatattatctgcatgcttggtactgaatgcttgggaaaaaaattatagttgtttgaataggcttcatattttgtgtgatgaaaataattgattgcagcagtagtggttattttggcaagattgccataattttaattgggaactatgtttactgaattgcctgaatgtgaatgttgtatatttgcaattgtttaaacacttaaaacatgcattatgggtctgtatagctgatctgtgaaaattaacagaggtgcaccatggataaacagtggatggataagcctaggtacaacaaatactttcaactattttaggtctctatggtccataccctttttttatctaacctggccactcatggatgtattgcacgtaggcactctagagaatattcagaagggctggacatattcctacaacatgaatttagttcagcagtaggcaacaaaatacaatgcccctgtaaaaaatgtgctggttcattctggagagatgaaagcgaagttcatgagcatttgatatgtgagggctttctacgagggtacaaaccattgatgtttcatggagaaggtagctcctttgtgaattctgctgagtatgatgaggttggggatgtggagtcaagtgaacatgatgacatctctgatttgcttcgagacttggcatgtggcttagatgataggggggaatttgaggatgagggtaattcagatgtaacaaatgaagatctgaatgctcttaaaatgctgtcagatgattatgggcaagaactgtacncagggtgtgataaattctcaaagctgcatttcatagttaaactactacacatcaaattgcttgggggatggtctgataagagttttgatctattactaaatctacttattgaagctttccctaaagggtcagcactaccaaagaactacaatgaagctaagaaaacagtgaaatgcttacggcttggatatgttagtattcatgcatgtaaaaatgattgcatcctttattggaaggatgatgctaatgccaactcttgtccaaaatgtgaaacctcaagatggaagtcagaaaacaagagtctaaatggcaaacgcatacacaaggttcctaataaagttcttcgctattttccaataaagagaaggtttcagaggttgtttgcatgctctagaacagcagctctaacaagatggcatgatgaagagcgcacacaagatggtttggttagacatccagcagattctcctctttggaaggattttgaccataagcacccagaatttgcctctgatcctcgcaatattagatgtgcattagctaccgatgggtttaatccattcagatccatgaatatttcttatagcatttggcctgttattataattccatacaactttccaccatggatctgtatgaagcaaccaaacttcataatttctttgttaattcctggtcgatatgctcctggtagtgacatggatgtctttatggagccactagtcgatgatatgtacgatatgtttgtccatggtgttagaacttttgatgcctccaagggtgagtatttccagttgcgtgctgctatattatgcaccatttcagattatcctggtcttgggtatgtggctggttgtactacctcaggtgagggagcatgcattgagtgccatcaatttacacgctctcttcgattgaaaaatggcagcaagacttcttacatgggacaccgtaggtttctacatgcaaaccacccatttagatttgatgctgattcttttgatggtgttgttgagcttgagtcagcacctgttccactttctggaaaggaaattttgaagcagacagaagggatgcaaacatcttttgggaaggatccatctggaaagaaggtaacgaaaaagagaaagcgtaaggagggggagccaattaatatttggaaaagaaggtctatttggttcaaacttccatattggaaggacttgcttttgcgtcataatcttgatgtaatgcacattgagaaaaatgtatgtgataacataatcaatacactcttgggtactgacaagaagtcaaaagacaacttaaattcttggttagaccttcaagctctaggcataagaagtgatcttcatcctattgaagtagaagataaattttatttacctccagccccatactcaatgaattctgaagagaagaaattgttttgcaaagtgttaaatggagttaagttccctgatggttatgcctctgatatacggcgcaatgtccaggttaatgagaaaaagataatcggacttagagccatgataatcatgttatccttcaacaattgcttccacttgctgttagaaggatattaccagaaaatgttagtgcagcactgattcgtgtgagcaatttttttaagcaaatatattcgcctgttatccgtgtaagtgatatgcaaaaactagaggcagaaatagctgagaccatatgtcttcttgagaaaatattcctaccctcattttttactattatgatacacttgatggtccatctacctgctcaagcaagaatagctggtccggtacattttcgcaacatgtaccctggagagaggtaattttctaaaaaaaccagtaaaataactgcagccatgccttagcacaaataaactcactttcactccctatttatatatgtataggtttttgatgagatgtaaggggtatgttcgcactagaagtcatcccgaaggatcaattgcggagagctatttatttgatgagagtcttacattctgttctcgttatttacatggtgttactcgttttactcggcgagttaggaatgacgaaggcctgcccatggaagttcagagtaccactcctttctttcgcaacattgggcgagggttagctggcaaatgttgcgtggctttagaccacaaaaattggttgcaggcacacagatatgtcttattcaactatgacaatatcgatccttatttgaagtgagctattttctttattttaacattgagaaattttcgtttttttattattgaattggcttttgaacacttgcagcaaacacattgactatctttcctcaactggccttcaaaacaaacgtgaaattgaccgtgtgcaccatgaaacctttcatgagtggtttagattgcatgtaagtaggcaaatggcccaagtaatgtgtgatttttactaaattgtagctttatcttgacaaatattatctcaataacaggtcactgagatgggtgatgatgaaccagaagagataaaaattttagctaaagagcccatcatggctgccaataaatataacagctacaccataaatggttttaactttcatacacagtcttatgatgagggaaggcctgttcaaagtagtggagtgtctctaatggctgagaccacatgttttgaaagaggcaataatgattgccgcgtagtaggaaacaagatctattatggtattataaaagaaattattgagttgaattatagcaacagaggtaatatagtgctcttcaagtgtgattgggttgataatcgcatacaggacaagtgggtaaagactgatcagtttgggataactactgtgaatttcaagcatttattcaataccggtgacaatatatcagatgagcctttcattttagcatctcaagctattcaggtttactatgttcaagatcctgttgatactgaatggtttgctgttaggcaatcaaaaccacgtgacttatataatatgagtgaaactgaaaaagatgatttggggaatgacactgaagtatccatcattttgcctgatgtgcatcccaattcaactatgaatatctctgttgaagaaactgtttttgttaggacagacatagatggaataattgttgaagcaaacaaacctaagacgtaagcatttttgtatatatattattgttgctgctcatttctgcttgtacaccaagtaatcttagtacttttcctgttccttctactgtactgatgttcgttgaagcactctttactggttggtaatttttttttatcatggcgcaggaaaaacaatggaaaaggcaagaggaaggtctaaagaaaaggttatcaatggaatggcagttggaaagaataaggaaaacactcttactgattatgaaatacgtcgcaaaggtgtcatagcagcaaacaatgaaatgttacaatctctaaacctcccgcccatgggcagcaatacgcatgttcaacaacgacccaagaaaatacctaaggttatgtgtcttgaacttctggttctaattttttagtatccaatatgtaccttttatttgacatcaaacttctgttaggtaactgatggtagaaacatggtgccatgtggagatcataacttgcggtctaggtcaagaaataacctagaggaaaatgtagatgaaaatgttggcgatgatcctgaataccaaccagaagaagatgccatggatgacaatgaaggtattaaagaaactgagctgtgctatttatggcaattcagatcgtgctagtgttatacatgcttatgcttgtttctgttttgttcagtagatgtagaagaaattcttgaacttgaaaaagttcagcagaaaaagaaggaaggaaggggtatcactcaaaagctcaacataatttcaagggtgggtgaagctaaaatcaaaattactctcaacgaatttggtcagccggtggggcttgattctgaggaatttgccactactgttgggacatttgtgagaaagaaaatacctgttgcatgtggtgattggagagatgttgacgtcaaagacaagctgaaagtatgggaagatgtacaggtagattgactgttatttgtcttgttccattaattttgtatatcctactaattcaatattttttatattaaaacagaaacattatgagatcaatgaatatggtttacattttgtgttggagacatcacatatgatatggaaggattataaggctgatttgaagaagaaacattttgatgcaaatctgactgatgaggaacttatggacagacgtgacttaagagtcaacgaggcacaatggaagtggcttattaaccattggagatctccagaagctgtggtaaggcatccagtgttatttgctgtactttacattaaaatagcctacatattgtgttcataactgttgtgtaggcccgctccataagaggcaaggcaaatcgcggaatgttgcgcatgttacatacagctggtagcaagagccacgctcgtgttggccatgacatggtaacataagtatatcatgttagttcattagatgtatgacttacaaagctttgtgtactctaacttcttgttttagggtgtgaaaactgggcgtcctcctagaagggatgaagtctttgttgaaacgcacaaacgaaaaaatggagaaattattccagaggctgcagaaacagttgtatgctttcattttctaaaacagatttcatgtgaagaatactacttgctaatatgtttttccaacattataggaaatgctaaaagaggctgcagaagttaacccagagttgaagaacaaaacaatccaggagggcgatttgtattcacgtgtttgtggaactaaggaaccaagaggccgtgttcgtgttttaggaaagggaccaactcctcaggatgtgggcacaccaggaacacgtagcagaatgccaacaagacttcagctagaaatagaatctcatcgacagaccaaacaagaagttgtatgtctgaataaacgcatggacgacatgcaacaacgttttaacataatggagcatatggttatgtctcaaggtgtgcagaatatagaaacaagttcccatcatgcttctaattctcgacatgctgaggtaaagtgccttgcctatctagatttatctatttgatttcatgttatttggaaatatgtgttgtatttattgcctacaaaagcttatgtcattatgttgatttggttgtagagcccaaggagtccagtacttgaagagctgcatcctaatgagcctaccaataggcacttgctggaggagcctcatgctgagcctaccagtaggcacttggataatatcctatcgggtgatgactttattatccgcaaaaaagctataacgccaagggtgccctcaagaaacacagccacaggaagccatgaagccaccattgctgaaggagaaaatcttgtaatttttctcatccttctaaacctagcttttatttaagtcatttaaatgctattggtattaattggtcaacatactgaactgaattgtgtcctttaggttggtaaagatgttatcttatatgctgtcttgagatctgacacccctgtggctaaagcaacaattgtatcaattgatccaagttccttggtgggaggtcaacctctaggtgttgaattctatgaagttgttgtcaatgtcgtgcttaaaagagatgcattgcttcctcgtccatatgatgatatgcaaactatggctgatgctcagtacacatccattgcatggccaaacaatagggtaaaaatctgctgtcaaatccttactacgtgcttattgtttctatttttgttgtaatggcttgccatcaaatactaactgtatgctattttcacctttcattttggcagttgaatgttagcaagaggtctgctatgtccaaaagtgctaactccaaaagtgcaggtatttacttccagtgtttacttcccaatagatgaactgagttgttagtaataacctatgcatttcagaatacttggactgcttgttagtaataaccctcacttgttaaacatttctgcatggttcaaatcctctagtgcaaggttcaaatcctcgagtaaagcaatgtgtttgtgtacaactaactagtacagactattgcaagaatagttaaacttcttttttagttttgaatataatgttagagtacctgagaaatatggattatgattgacctaaaatagatttggaagattgtcctgatttgcacctattatgactcctttcagtcatgggagctttttccaccttattaacttcgtaaggattattttgcaggggttgtttagtctggataacaaaatgctggctgcaaagggagtattttggtcaaatggtggctgatgaaaattaccaacttagggtagtgcacttttagaaaccatgtaacttgtatgccttttgtagtaaacactgcttgtcccttgatcgtttcaacaactgatgttagaagcatgtaagcttttggagtaatgacttgtagttgacatgaacctgtgacaacaaactgatgttagaagcatgtgaacttttggagtaatgactcgtagttgacatgaacctatgacagggcagcaatatacatgttgatgtaatcttcggggctaatgtctggaatttggtgtctacttccactcttttgctagttgcaattatcagtaatttgctattgaattggaatgtgaaaagttggttgtattcttgcatgtcggcagaagcatattaaccacagattatatgtgggcatgtgatgtgtgcggcgtctgtggacaaaactttgtctgtcggtagaactaaaataataacgtcaaactgtctgtcggtagaagttctatttgtcggtaatgccttatcccgacaggctttccaccgacacaccctctctgtcgccaaaggcctttgccgacagactatttgatgataaaggtggtcttcgccgacagattaattgttgccaattttgggacatggtgtagtgtacatgggtaatagtgtacataacatcgtcatgtaaatatatatatttttaaggggatatcccaaggcaaccgcctatgcgcatcgtgttattatgagcggccacttaagccagccacctgggtagattgaaatgattttcatgggtggctgctgttagctgtcccccacagtatttgtttacatgggcagctacttaaagcaacatttttttttattcttgtctgcccatgaaattaagggggaggggcctttgaaaatcgtttttctactattggttgcaagggtttcaaaaaaatacccatgtaaatgggttacatactgcttgtacacatgttttctgtaccggtgcaaacaaaaattaaacttgagaaaaaagtctaattcaatattgggcctttataggtacaaataaagatcctcaattgtgagattgtgggtttaaaactagttcctttaaaaattaaacatgaacaaaagtcaattctatgctatgctgattatcgatccatgcaaacaaataggaaatacaatgtcctaaaacctttataaaatatataaagtcatgggcttgatcttgagacatgtaaattctatatatttttttccagctcgtctgtttgccaatttccatatatttgggagttcagtggtcatctgtacaattatgtgttctcaatcattggccgttgtttctcctaactcactgatccttttttccgccaatattgcctgcaataatcttccttcattaatccatatgaagctaatttccatgtaaacaaataaactttcatttattaagtatggtacctgtgcctcccactttgttctcatgataatgaaaaatagtatggccatctggagtaatgttcctgtcaacatgcccatccatatcccctggaaagttgaagaaacatatagtcgtacttaatagaagtgctgatcaatggggctaagacaggagtacagcgagaaacatcgtaccaatgcaccaagctttagcttgaagccaaagagaaccccaaatgggatccctaccaagtagtagcaaccgatgttcacaaatgccaccagaatttgccaacctgctcctactgccacacctgcaaatttagttgcatagttgctcaaatttgttggtgttcatgcatgttcaggagcagcaacacaagagttcagttcttgagcttttttttttcttcttcttaataagttaaatacctgaaagcacaggcccgatattgccaaaaaagacggtgacagcaagtagataccccaatcttgcagctccgtctaccacctccttgtcgtcgctgaagaggcttggcaagcttgttctccaaatgaagaagattgacatgaaaatggcaccaatcatggccgatgttaatgatgccactgccactgagaactttgcctcctttggtcttctcgcaccgagctcatttgatactctgacgctgatgatgtagaaaaaaattggttcaaatatttttcatcgtgctctttgaaattcaaaactattgcataaaaagaaataaaattgacacaccaagccaagtaaaagtatttattaattactagcaaaaatgcatatgcgttacaacatgtgaagataattttcacgatcgataaaaactctaccaatttaaacgacaaaccgaaataagacaaacaaaacaatagcaaaaaaaagtcagaaatcacgtatagcattgaacccggttgcactcgattcatgtattctcacacaaagaatctcttatatagactattccatagcctcataaatcgattaggtgtctatactataaggttatgcatgggtatttttctatacctcgtcaaccaaatattgaaattttgattatttaattagtgaacgttgttttactgcagaaagaaagcatttgcaaaataacaaacttgccgcatacacaacttaaacaataattcaaaaggaaaatatttatgaggatcctcaaagactgggccggcaaattctgtagagattgacgaagtcttagtgaacgttgttttactgtagaaggaaagcatttgcgaaataacaaacttgccgcatacacaacttaaacaataattcaaaaggaaaatatttatgaggatcctcgaagactgggccgacaaattctatagagattgacgaagtcaccacagacgcctcggtgtcgacgggtacgtcgcttaccactgaaagcacaatgccgtaaaatcctagaaaattcgctcccatggggagtcaaacccaagacctcaagtgctactgaggctcttgtaaccactaagctataggccctttcgctatgaggagagaaattggaagagaaaaggaggagaaaaaagaggtgattagaaggagagggagaggatgaggatgattgggagaaaaggaaatgagaaagaaaacgggaaaaaagggagaggaaaaaaaagacgttgatcaagggagcgtccagcgtcgagtgaaggagcgtgggacagggtggcagaatgttgtaggctagttggattgggccaggagcaggaaggattgggctagaacagtagtgtataatagttattttagactcacgttaaattggattcaggtgacgtacaagcaactcaaatacggatgacataccaaaattccgacgaaactatattcaatttttataatagttaagatataatttattccgtcaagaacaaactatacttattattcacacaatatgcaacttttaattagcgttctaaaactattaaattaaggggaaaataaaataatgaaaaaactttcagaatgattttataggtaattttgaagccataaactaattgtctttttttgcggggaagccataaagtaattcgaaagtatgcaactgttaatagacttaaaatgacttattgtgaaaataaaaaatattatttaagcaattaagagtatcaccattcatctgtgcatgaatagttcgattaagtaatatcttaaaaaaggagaactatgatatccttatatatataataatctgctaaacttttgtatgtaatatcgatagcatgtgcaaatatataatacgagttaatggccattattgtgtatgtacctgattgcttcgctgaagcccatcgcaaccatcatggtccagaactggtaattgatgctgtaaattaaaatatcactcttgtttttatagaaataaaaaaaatcagttatagccaaagcttgcatttgtgtttgcaggagggctttgtaaattaacaacacttaccaaattgacatgatatcaagctggagtctggcattcttaaggagacccacaagaatgagtagtgcagcgtagtaccaaaactccaagcttaataaattaaaaaaacagtatcattaaattatttgtatcataatttccttataataataattaataacaataaaaatagtaaaaaaattacaataataataatgacatatggcaaattattaattactagtagagtaataaaattttgagcgaaaaactttcagaaataactataggataattgaactataattacaatacaactaaactgtactttcactgaactacatgtaactataatataatttatatataaattatatttaattatatagtttggttggttagcactgggatattacgcgtgatatgtgtgaaaatttctttgtagcaatttttctcttcatgcacaaatctttagatgattcgctaccaattagaaagttttaggggaaagaaacttgccaaggttttttttagcaattccgtaaacaaatccgaggcgaagggttgaattaattgttaccgaccagatcatgatggccgacacaagtgacagcttgacgaacgcggcgaggttgctgaacgccgtcatggtgaaccccttccacgcgtccgggaagcggccggagacaaggtagacgaactgcgcggcgtcgatgagccagtaggacaggttgccggcgacggccgcaccgcgcaggccgtaccggagcctgaccacggcggcgtaggtgagcgcggcgtgcacggcgagcaccgcggcggagatggcggcgagcgcccagaccctgctctgcgtctggaagaacttctggagcgggaagttggcggcgtgcgcgaacagccgcggcagcgaccacagcgcgtacggccccgccacggcggcgacgtcggccggctgccggaggagcgaccgcaggatcggctcggcgaaggcgtacgtcggcgtgagcgccaccgcggtggcgccgcacacgatccacgactgctgcacgtagaggccgagcacgtccagccgcccggcgcccaccgcctgcccgcacagcgtgtccagcgcgcaccccatgccaaactgccatggacgcgcatctcacgtcatcggtaccgtccgcgacggctagcggcggcggccggccggaatgaacaatgccgaaagaaagctcgaggctacgtaccaggacgccgtaggcgaagccctccaggatgctctcgacggcggtgaccgcggcgagctcgaccacgccgaggtggccgacgaagctggccgtgacgaagccgatggagaactggagcaactcgacgagcacggccgggaaggcgacgcgccacagcagcttcgactcctgccagctccggctcacaagaccttgcccctccatgctcaccgtaccacgtataccaccactattatttacagctttaccaccatctgcatcttgcaacaaacaaggagagcatgtgatgagtttgttgggaaatggccgtggtcctagctagcttccgcagacaaattattgtcagataatggataaaatatcataggaagattatcagaaacagtaagaggtttgcagctcatcttccagcagagcatattgaatgaccattttatagcatgggccaccgaaaactggacagcaccggatgataatgctaaatgcaacgccctttcattttataactaatttactagattaccccgcgttgctccggaattgtactatgatcgatggatcgatggtttaagtaccaactgaaaaggagttacataatcacgacgaaattaaagcaaattggtatcaatcaaattggtgcaaaccatgaatctccaagaacagaaagatgaaaggcagatttagtcgacaaataattatagcatacagtaactatgattgtgatactcgatgacgaaagaataaacataaaactacaaatgtaagtgcaaagagtaggaaaagtgatagacaaattatttaattaccttaatattgaatgccatattcttcgcgtggtcccttcatcaccttttgatagataagtctacgctcaaaaggatgaagtaaataagcctccttttacacataacatttagaaccatgctatatgtccgacttgtttgttcgaccggtgtacgactaaacgggaaatcagctgggcacgtaacgccgtgaggcaaagtcctgtagagatcgacgccatgcattcgctagtgttacggtcgtacaagagtcggacataatggtcagacgtatagcatttttgtaacatttagtggagccttaacaaacgattagcagtagcgctaaataagatactccctatgtaattataaaggaagtcgttttagacaacgatacggtctccaaaacacaattttgatttcttgtttctataaaaatatttattgaaaagtgatatatgtatacctttatgaaagtatttttcaagacaagtctattcatataatttttatattttcaaactcaatatttattgaaaagtgatatatgtatacttttatgaaagtatttttcaagagaaatctattcatataatttttacattttcaaactgaacaacttgagagttattcatgatttatattcccaaggtttgacttaaacatgatcctaaacgacttcctttacgagtacggaaggagtatggtcattgagttcttagttaaatctatataaataaatatagctttgtttgcctttgagctgccatataagattataagtgtgcacgggcagatatagcgtgagtgctgggtgttcaagcccccatcacgctggatcactattgatatagaaggagaagggaggaggaagaagtgtgtgtataatatttatcacagtagtacatgacctcaacaagtcatgaatggccaaatatcccaaaggttcaggataagttagtagttatatgaggaaatcccatgtatacctctaaaactttgcctaatctcttgtatgtccctgattttactaattcctttgcatacctcaatatttagtttggatcacttccatacctttttattagttggccatatttttttcctgtgtacggagaatcatatacatttataaagtatattatgggaatattgatattcattgtatgcgactcttatatttatgggatatattatttacgaaaaaatttatctttacatatggcataaaaggaataatatttacttttaattattaaaaatgtatatgtagcattttttctatgatagcagtgtataggtcaaatctatttatatgctacataaacatttttttaataactaataaataaatattatttatgtcatatctagagataatcttttcataaaaaatatctcccataacaaactcataatataatagtcttatacaataaatttctaccctctaacaatatactttacaaatttatatgtttctttatactaaagggcaaggtacacttttttataggaatttaacgattaaatcacggtcaactaatgaaaaggatatgaaagggatccaaactaaaattcggggttacatatggggaatgagcaaaatttaagagcatataattgattaggattaggtaaaatttcaagggtatatagggatgcatagacaaaattgcaacaatctgtatatatcaatcattctttttagaaaagagaccaacaaaatttatctagcttgtgtatgagagagagtgtgagaaatcacctgccaagagacatatgggaatgttttatcccgtagcaataaaatatgacagaccaagactctttccttcaatcatatatatgaggggcaatttctctcccaaatatgattgctgagcatacaataaaattgtaaattgaacaggtgatgtcgatcaagcggtaggtgtctcacaatctttgaggtgatgttgatcaatattaggtggcctaacagaagctcccctgatctctcgcaaaaaaggaaaaaaggaagctcctgtgatcgttgtgtggatgaccaaaaagcattaaaacatatatagtggagtcggcagtttcattgcacattatttggccagaattacttgatattaattgaaagcaaaacggcaatgctattgtgcgtttgggtgtcatttacttgatattaataggaagtagcaatgccaatgtgcaattaaaggaagtgtttcattttccaagtgaccaaaggtaggcagcggccaggaatcctaattcgcgagctatacaacctagtcatctcgcatgcggcttcccgaccatgtgacgacaagcatcggggtagggttagggtttcgggagtagggtgggggagggtgtcgctgggaaggggaagtgcgggatcgggttagagcgatgatggtttgagaagcggtggaccgatggtagatggcaaacaagagcgggctgcgcagcggcgatggtgccactagagctgtggggatggcaacgtgcagtgggccagccaagggcaaagcgaggtgaaggggagggagaggaggctgaccagacaaggccacatcggcacgttgatgcctttcggtgctggcgaggctcagtgcctgcgtggttggtgtcggcgacgaagaaaaggagctgacctaattgctggagggaggatgagggggctcgccggagaggtcttcgttgtcgtcgtcggcggaggaaggccactcgtctacatctcctcttctccatcggaagaagctcgccggaggaaggaggaggtgcgacttgcacccctggtgcgaatgcccgaattaggaagctccgatagtggcaaagcttagttgtcattccatagattccatagattggccaatgcaatagtgggctattgttggataggatctggtggcctcctcgtatgcacatgcgtatgaagaaacatgtgagccaattttgtggcccgatcttcacgatggaccaaaacacttgatataattgttatcaccacgtgacatgacaaaaaggcaatgcaccacgagattttgcacacgggacgaactacaaaggcagtcgcccttccaagtaccgatgaaactagcccacacaatcatgtcgtatagacgtgagatgaacagatgaaccgcagttcaacattctacaactccctcaagaatcaaaagaacaaagcttgtaaatccctctagactcactataattcaatttttataagtgttcagttctgaaatcagaatgcaaacttctctgtacttagctatttaagtgatggtccataggcgttatccaagaaactgacatgcatgttctggacatgtccacgcatgcaagtggtgatgagaaagataattaagacataacgtttattctgatttattaactccatgtaacagccacagtgctaaatggacttcattagatgttggcttctctccttcacatgttgaatgcctttgaataatccatcatttatgagaattataaaacacacgaatgaaagcacaatattttctaaaacatcggtattaagtaaactagaggatgccccgcgcgttgctgcgggacttggttaacatcaatttgttagataggaggtataatcttaagaagaaacagaagaaacaaatagctttcttggagaaattatttttagcagccctatccaaaatttgtagataatttaggtagcacatgtcaactgaaggggcgttcagtcataaagctcttttatacggattaacgggcttgatacatgtagatgtgtacggagatgggccaatgtgttcatgtgggctacatgtcactgaggaggcgaagagactcacccggtgactaatgggttgggctctatgctgcatagcatccaacgtctgagaagcgatctaatgcattcatccaacggttcacaatttgatgatgacgtggaagcacgagttttaaacttttggccttaactttatagaaagaaggaataaatattaggtcactgtgtttgcattttcttctctagtttctatacatgcttctaataattggaccaacaatgtcaacaacacttgtattagatttagatattgtatatgcattagacatttcctcattacctcccatataggtgttcagatatggaccacgctcaagaagcggtttgagaagtcaaagtacaccatcctaccccaagaaaatcagcagagagctcgcttgaggctcgccgactacaactctaccttgcacctgatctgtacctacctctccctttgtggaaaagtagtcacaaaattggacaagattgagaagatgctctccaccttccaccctaacgtaacgcagagctctcgtaactataggcatgtagcatacaagaagtttgatgggatgatcgacatcatataggtgtccaagtctcatcacaaggttctccacgagaactttgtctcctaggcacttggcaagagcattggccttgatgtcaatgctagcagttacaaggtctgcaagcccatccaaaagaagaggggcaagcaaggtgggagaaaggcagccgagaaggcataggaaagagctccagatgcctagagacgcaacgacaagcaggaaaccaagccgcccgcaatgacaagtcatacgacccgcaggaccagacatgctacaagtgtggcacagggctactggaaccgtatctgtgaggagccctattgatagtcgttatcgatcagtttcgcccgtcaatatcaccaaaataaaagagaactagttatgcttgcaatgcatatttgtgttagaataagttgttttccactagcactaggattctaacctcttgcagagaatacaatacaaaatggaggagaatcgacagcaaagcagacgataaatcaatcggacattgtcgagaataagacttatcgaaagatgggccaagaactcagaaatgacacaaccaaactggaccaaaattcaaaagtctgcggagagaagaagtcaaataggctgccagcagataatggataggattgggccagcccatggttcggccgaacccccaccagcgtcgttggatgcagggcttagcgtggacgtctaggattacatcccaatgacggttggagagcatttccgaccattccaatcgtcataaccgtcattgggaggctatttaaggagctctcatccttcactcttccacacactcaggcaat

SEQ ID NO: 713 - DNA, 661 bp, Oryza sativa
attactgactatgagactagctctgaacttgtcaatcctagctgttcctccgggagcagcgtcggagaggatcaattgctgcaactgatggatctgtagtgctgaaacaaagtgacaattcaagaggccataagcagtgctccaaggatacacaaagcctctatgctaaggttaggacctaattgtgttattaatttgtctaatgtttgaatctgaagtattttttctgacggcgtttctgaccatcttaacagaggagaagggaaaggattaatgagagactgagaatacttcagcagcttgttcccaatggcactaaagtaagcttttgctgattagtatttagtaattatcttactagtttggtgaacagaacaatcaatgtagtaagtttgagtgcatcaatgaataatgtaatctgtctcccattttcaggttgacatcagcacaatgctggaggaagcagttcagtatgtcaagtttttgcagttgcaaataaaggtactagttatgttacagtaaaatcaaatcaacagaaggatacaaaatcatagattttgtagaaaaagggtacttcatggctgcaagtacattaataaaggcaatttcactacacattttagaatgttccctggtttcacagcactttcagaatacatgt

SEQ ID NO: 714 - DNA, 687 bp, Oryza sativa
tgtcacagttaccatcagtactttggtctttgcgtactacgcccagtcgggccacgggccagtcaccttttttccttgtctacggggcagaagcaatgttgccgagtgaagtcgagttcgaatctttgcgcttccgtaatttccgtgaagaacgctatgaagaagaccgagtggacgatttgcaccgactggaagaggtccgcgaagcagctttgattcagtcagctcggtacttacaagggttgcgacgttatcataatcgcaatgttcgatctcgtgcctttctagtcggcgacctggttttacggcaaattcaaaccacacgagatcggcacaagttatctcctctatgggaagggccatttattatctctgaagttacccggccaggttcatatcgactcaagcgcgaagacggcactctcgtcgacaactcttggaacattgaacatcttcgtcgcttctacgcttaactttatcattgtatttccctattttgactgtcaaacatcaagtttctccttgaagttgtcagtcgggggctatcatcataataatggagtgtgattttttatcaattcagtttgcttactcggtttatcattgccttgtttggtttttctacttagtttgcgaggactgaaagtttttaatagcttctttgggttttaggctcaacaaagctta

SEQ ID NO: 715 - DNA, 1528 bp, Oryza sativa
tcattaatcctttcccttctcctctgttaagatggtcagaaacgccgtcagaaaaaatacttcagattcaaacattagacaaattaataacacaattaggtcctaaccttagcatagaggctttgtgtatccttggagcactgcttatggcctcttgaattgtcactttgtttcagcactacagatccatcagttgcagcaattgaatcctctccgacgctgctcccggaggaacagctaggattgacaagttcagagctagtctcatagtcagtaatggttgaactacttgatacctaaaataaaatgaattttagtcattacaacagtttaagcatgaaccaaaattctcatgccaaattgacctaccgagcgagaagttcgggttttcttcttcggcttcttctgctgctgctcaaagtgctcatccatggggaacatcctcttgttcccagtgatgacctgatgctgatgatcagaacacatatccatgccagtgctaaccatcaattgcactgtgccaaatccctcatcatccatcagaggaagaaacagctgctaggcattgtgctagttgtgacacaagaatttacactactgtcaggagaataaaagttgatttcagcatcagtgctgctccagaacatggactttagttgatcaatcatctcagattcctcactccttgcatcagcagagctccagatgtttgcacaccttgcatccatcctattgatctgaaacttccaagctctaatttgtgatcttttgaaaagagttgtaatgtgtgatctcttggaattgtttctgtgagcactgtgcaggtaggggcacaaatttatactatgtttccagagaatcatctgcagatataaatttgactaaggttccatcataatcttatctttatgtacaaatgacaactaagagctagtactttatatcgcaagttccatgacccataccctcaggatcttcaaatgatagaaagattatatggggaatcgattgcccattgagaaatctaaagaggcatgctatatagacttttggttgaggtgagagggaggaaaaagaaaaacaactaacaaggttaattatatgataacattaaatgattcatatgatcggcaattaagtcgcaagatcaatagccgataatacgacacaaaaaaacatcaacaccacttataagaaaataataagagctggccacaaataagaaatttggagggaggtgatcatggagaagaagtgctggcaatgttataaataaaataggacacaactgatatcaaactcagtttggcagcttcacattttctttcttggtgacttaaagaggatagtgaagaacagtatggcatgccataccctttgctataataatgtacataagtaactaatcctagttgtgcaattcagtaattcacattgtgcaagtctatctacatactgaattgaaatgctatgtgaacaaataaggtgaagccatgaatatgatgtcacttaatggttctttattctg

SEQ ID NO: 716 - DNA, 708 bp, Oryza sativa
tatagggcgaattcgagctcggtaccctgagcatctgttgcattataaggagagaagctcagattgttagctggcgttaccttcgacttccttcaaggctgagtccctttgcgcagccagttctgtcttgtctctctccagggcttcaatttgcttcaccatctgttccatcctggcggcttgcgctgtttgaaatccagatggttgaggatgcaattatgacagcacaaatcaatggaacagatctggatgattaccttttgatgaaccacttagttcgaagtttgcatcctggagctgggcgattcggtcccttaactctttctctgtctttttggcgcactccttggcctcatgcagctggtccctaactgcttctagagttcccaaatgaggaaccagcttttccaaagttgtagtcttggcctcattgcgaagatggattctctgcatgatggatcatggttcagttctgctaaaaagaaaacaaagttaccgaaggccgtcactcggaagacttacatttacaatacgagtggcttctccgagcgctttcttcagctggcacacttcttcatcttctttttgacggtttatgactatgccggcagcttgtgagttctcgtcccaccatttgatcaagataggaggacgagagtcgtcggtcgcctttatgcgagggatttcttctccgtcatcacctgatgg

SEQ ID NO: 717 - DNA, 525 bp, Oryza sativa
caagccatccctcggatcaaatcagcacatttgagtgaaaccgatggcggaagagagagaaagcttcgaaggccaatgggcgtcatctgacgtaacggaggagaatcttaaggagatggtggcgcacggcgttctccctgccaaggagatcatcgggtggcgaccagcgcacggtgaggctttcccgtctccggatactcatgagattgtggtcttctcgcatttcttctacggcggctttgctcttccgacctcaaaatttttccgcgggatcttgaatttctatggaatcagcttgcatcacctaaacccgaattccatagtgcatatcgccaatttcatccatgcttgtgaagcctttttggggatcaaacctcactttgccctattccgccggatcttcttcctcaagccccaaccaaacaagaacaaaccgtgtgtagtcgggggggcaggattccaactaaggggaactctgagccaaaaatatttctcgatgcccttcaagacttcgaacaaaggctg

SEQ ID NO: 718 - DNA, 621 bp, Oryza sativa
cgaattcgagctcggtacccataagaatacttgtgtttagacataatgggttaattaaatactagagttgttgaccattgattagccactttttcaagcctatccctacatgtcagtcaattgttgtatcataaccttaatctatatgttgatgcttccgcgatgttttcttgtctaagatagttgttgccgaaatttgcttgttttggcacttatgtgtggttgtttagtggcatcccaggcttatgtggttttctggggtgttacattctctctggtcagcaacaaatttaaggtattttttattaatatttctccattaaaatgaatctgcagggttcttaagcataccattaacccttcgatccgtggcatgctgttcatgtgaaaacacggcggcctaggggattttcttaactccagtgcaagtccaaggctagcctcaagtgtatcaagggcgtgccaactgatttgatcctgcaatcagcaagaaagagaaaagcagagttagtcagccgatagccgatcggccgatagcgtatcgttggtggtctctaccgatggagttagaccaaatcggctatagactggatatattaaagaatattaaaccctaaatat

SEQ ID NO: 719 - DNA, 1248 bp, Oryza sativa
ttgaagacttcattcatcacgccctttggggcatactgctacgtcaccatgccgtttggattaaaaaacgcaggagcaacttatcaacgtatgatccaaagatgcttctcaacgcagatcggccgcaacgttgaagcctatgtggatgatgtagtcgtcaagaccaagcaaaaggatgatttgatctcggatctagaagaaacctttgcaagcatccgtgctttcaggatgaaattgaatcctgaaaagtgcaccttcggagtaccgtcagggaagctgcttggttttatggtgtctcataggggcatccaagccaacccggagaaagttactgctatcctcaacatgaaaccgccaagcacccagaaagatgttcagaagctgactggatgcatggcggcgctcagccgattcgtttcaagacttggcgagcgggggatgcccttcttcaagctactgaagaaaacagataatttccaatggggacccgaagcacagaaggctttcgaagatttcaagcaactcctcaccaagccaccggtcttagcttcaccacacccgcaggagccgttgctgctgtatctatcagccacctcccaggtcgtgagcacagtcttggttgtcgagcgtgaggaagaaggccatgtccagaaagttcagcgaccaatctacttcgtcagcgaggtcctgaccgactccaaaacgaggtaccctcaggttcagaagctgttatatggcattttaattactaccaggaagctgtctcattactttcaaggtcactcggtaacggtggtcacatcatttccactcggcgatgtactgcacaaccgcgaagcaaatgggcggattgctaagtgggctttggagttgatgtctttggacatatcattcaagccccgcacttcaatcaagtctcaagcgttagctgattttgtcgccgagtggaccgagtgccaagaggatacccccgtggagaaaatagagcactggaccatgcattttgacgggtcaaaaagactttcaggcactggagctggagtggttttaatttccccgactggagaaagactaagttatgtgctttggatacatttttcggcgtctcacaacgtcgccgagtatgaggcgctccttcatgggctacggattgcaatttccctagggataaagcgtctaattgtccgaggtgattcacagctggttgttaaccaagttatgaaagagtggtcctgcattgacgacaac

SEQ ID NO: 720 - DNA, 719 bp, Oryza sativa
ccccgaggagtcctaaccctacggagcgacatcaagcaagctgtcacatgcgacaaggagagttgcgacatggcccaaacccgcgagatggcgtctgcccgagaggaaatccgactggctgcaaccacggcgagcgaaggagaagtgcccgctgccaagatttcaaaaagtggggaaaccgaagccgagactaaaaagattcccttagatccttctgatcctaccaaaactgctgtaataggcgccgagttagattgtaaataggaaagcgcgctcatcacctttcttcaaaataataaagatatctttgcgtggaaaccttcggatatgcccggtattcccagagaggtgattgagcactccttacatgtcaaagaagacgccaagcctattaaacaacgactccgccgatttgcacaagacaggaaggacgcgatcaaggaggaattgaccaagctgttagcagcaggcttcatcaaagaagtccttcatcccgactggctggctaacccagtcctagttcggaagaaaacagggcaatggcgcatgtgtgttgattacactgatcttaacaaatcttgccctaaagatcctttcgggttgcctcgcattgaccaggtagttgactcaaccgccggctgcgagcttctcagttttttggattgctactcggggtatcatcagatccgactgaaggaatccgactgcttgaagacttc

SEQ ID NO: 721 - DNA, 710 bp, Oryza sativa
gatgaagccgagcggatttcaaggcggagcaaactttatgttatgcatgaagccgagttatacaagaaaagcccttcaggaattctgcaacgctgcgtatctttagaggaagggagacaattgttgaaggacatacattctgggatatgcggaaaccatgctgcagcgcgcaccattgttggcaaagcttaccggcagggttttttctggcctactgcagtgtccgacgccgacaaaattgtgcgcacatgtgaaggttgccaattttttgccagacaaattcatctaccagctcaagagttgcagactatcccgctgtcttggccgtttgcagtttgggggctcgacatggtcggcccgtttaaaaaggcagtcggcggttacacgcacctctttgtggccattgacaaattttccaagtggatcgaagctaagcctgttgtcacgatttcagcagataatgctcgcgatttcttcatcaacattgtgcacagattcggagtacccaatcggatcatcaccgataatggcacacaattcaccggcggagttttcaaagacttttgtgaagattttggaatcaagatttgctatgcctcagtagcacacccaatgagcaatggacaggtggagagggccaacggcatgatacttcaagggattaaagctcgagtttttgaccggcttaaaccatatgccggcaaatgggt

SEQ ID NO: 722 - DNA, 1043 bp, Oryza sativa
aaattcttgcttcaccttatctgcctttgtgactcctgagtcgtcttccttttcatagtaatcaaaccatgaggttgctggacggctgctgatgattacaccattctcatccttctcttcaataatgccagggtattctcgtttaagaataattcccatatgtgtaccatatttggggtctgatttcaatagagggtatgttacgtactcaaattgcctaaagaaaacacccatgtgagaattgttccattaagaggagaaaaacatagacaacacatgtacagagcttttgtatacatacacatattagatttgaagaacttgtatgctactcaatttatcacgtcacaaacatatcggctttgaacaatataaattctacagaacagaaataaagacagcctctaatttattggagcagttaacaaagtaataagcattagtagaaaatctgtagggttctagaaatgcagatacttactcatcaccccgaggtttcagcgcgatctttcgaccccgcggaggtacttttagtgcagttcttgagcccttcttcctccctcttttatttggtggcgcactgctcatgccacttccagcaatattggtggcttgggaggcattatcagtattgctactattaccagcacaaagtctttgggaggagttagcaccggagttactactgccacctccattaatcatttccgggactctgttttttgcattagtagcactagcattgctccttgtagagatgttcctgcattgttgctgtcttgcaagccgcttccgatcaatgccgttcatttcttgcaatgttatatccatttattagttttagaagagcaccatcggtccataaaaaaagaagaataatagcatatattttcatagcatggaatcattcaaacaaataataatccatcagtgcttaatataaaacctttataaagtacaaaatgaccttaggtacttaaagcttaaaaagtcatatgaaagttggcagctgcattaatataatttacagaccccaaaatcca

SEQ ID NO: 723 - DNA, 1123 bp, Oryza sativa
aaagcgtcttaaactatgtcctcaactaataaagcgtctcaaacatcgtccctatttcaatttcacttataaaaaagagacgacttatagaatgacttaagtgaaacgtcttaaaacaatggttttgttgtagtggatctagggatgaaaaatttaaattttattgtgtcacatcggatatacggatatacatttaaagtattaaacgtagtctaataactaaattaataaccaaataaattacagaatccgcctgtaaactgcaagacgaatttattaagcctaattaatccgtcattagcaaatgtttgctatagcaccacattgtcaaatcttggagcaattgggtttaaaagattcatctcgcaatttagacgcaatctgtgtaattattttttttttatatctaatactttatgtatgtgtccaaacattcgatgggatagggtaaaaaaacttatcagggatcaaaacatgcccttcatttgtgatcacatatgtaaagatttccctcctgacccctaaaaggtactaaagatatatgcagttaagctggaagcgacttggtaaaaatctaggcaaaataaatgcagaaaagataaatgatttatgagatcagcgatgcgaccagtgatccatttggtgttacgttgctattctaaatacactatagccgatttataattccaaacagtaagggcatgtacaacccgtctcctcgccccgtctgtgtgttgatgattttgcaaaaaaaacccgtgcacgcgcagagacgggcagcccggcgcctcccgacgtgaccagttcatcccgttctcccaggtggagtcgacgcgagcccacgcgctgtagagcgccgtcgtccccaggcgacgggcgaacggatcccgcgtgcggccgcgctcgcccacaaatttcccaggcaaccacgcgtgctgttctcccgcgctctgctcgcgagttgccccaaatttcttcgcccgcccatctgcgcggccgccatctgctcgccccccatctggtattctcgccggagttggtgcggcgggatgtccacgcccggcgcagcttggagtaggaatggatcgaggacattggatgcggcggcgacggccccaggccg

SEQ ID NO: 724 - DNA, 2758 bp, Oryza sativa
gggagattgcaggcgccggcgggatttggagatcatggccggatcccagccccaaccaccggatctggcggagccgcatccatccccatcctcctcccccttctttgtcctctcctccccattctctaatttgtagatccggtgattcttgcagcgacagtggcacggtgcggcggcgaggtgaagaggggcagcggtgcgcggcggcaaggcggatgtggaggagacacccctctcccccttcttccctcctccccttagaaaaatttgctcatgtgtgtgatggattttgtgaatgtgtgatggatttgtgcatgtgtgtgatggatttgtcccttactgtcatgggtgatagatttggaatttgggaatatatgtgatatatttggaaatgcagggaaattttgttatgcaaattaggttgatggatatattgttgatgagaaatttaggttatattttggctaatttgtgatggatatattttgtgctgctgctgatatataatttctaaatattggctagcaaatcctagggctagccaatatttagaaattattttttttctggatgtacctcctcactaacggttcatattgaaaaagccgtcacaggtaaccataccagtgacggctttgcacatacatgccgtcacaagtgacacacctgtgacggtttttactctccgagccgtcacaggtgagtcatctgtgacgggttgcaaaatggcatggattagcgcatacacttacctctgacgggccgtagagttctagcccgtcagaggtgactgtcattagtgacggtcctccacccgtcaaaggtgactggacccaccagtgaccactgatcactgaccaaatccaaagccgtcaatggtgagggtttgggtccgtcacaggtgaccctgtccagtgtagtgttaaagaaacacataaatgtgtgagttgttgatacatattgatctagtactaaaagagtgtctcataaacaagacaaaaatctcaactgcttgacaaatagagatagtctcaaatattagtgaatagcatctttggttttcttgatgacaatatatatatatgataaagttatgcatgtacaatcgtgtatgatctgtcaggatcattttcatgaattcagtacgatttttctgttgacgttgtgattcctaagatgaataattaatttagcgcgtgcgatgattgataagccatgcatatgcatccggcagtctcaattattggtctaatcgatctacatcacataaagaatactatctccatattttaatatatgacgccgttgatttttttatctaacgtttgaccattaacgtttgaccattcgtcttatgtaattatcatttattttattatgacttgattcgccatcaaatattctttaagcatgacataaatattttcatatttgcacacaaattttaaataaaatgaatggtcaaatgttgatcgaaaagtcaacggtgtcatacattaaaattaaaatacagaggatacagagggagtatattatactatcaacaaaacttgaaatgaacgaaccacattgaccgtagagggcataaaaatatctattttgtcttatcattacatattacgaagatagctcaaaataaaactggcactatattcaaagtggatgttcaagggcatggagaatagtgtgatgactgagatgtactgtttaggacagctatctgaaagcccgtgcttagctatgggtaaaagataatatattaatgtgttatccatcttttagctgtgattttttttatgaaaaagttgaagttttaactgtcattaatactatctttaaattttaaaggagtatgtatatgcatcatatcatgattatgacactatcacagcacacaggtggtaggtaacatgtttgtgcaagcatctttttttgaaccgcttacaaggtcctatacagcagcagggtctcgcatgtcaatttcacacccactcgtaaaaatcaattttaagactcgactcttttaagtaactgcccgagacaatgaatttttgggtttttttaattttgtaggtgcaaaaaaaacttaaatcaaccgttttcacccatgtttttttgggccacctgtgaaaaagaaagctaaggtctgtaaaaattatttttgtagtagtgtcatggaaagagaaagagtagagaggtgattggtgtttgttgattaattaattactatatggtctaatatatagcttaaatccacctatgctattgtagaatcaattcattactctaagaattaccacattaatcaatgaaaatgagatcaatcttatcatgatgtggaggttctatttaggcgtatacaaaagttttggacctgtaatgtggaggatctagctttttacgcaatgttttttaaaaaacatggtataaatgcagacgctcacaacacgtgcacacactcactcctataaatgtacgcactcacatccagtgacgaattcaggataaaaatagatggtgggcttaatagaactgaaatcagagggtgtcggttaaattgttgttaaacaattaataaatattgctttcttatgctttgcaatttgcaaatctaccaaacaaatgaaaactacgagacataaagatctttttctaataaatcccaatggccccatcatgtcattcattaaatagacaaatagattaggagtagaaaataaagaataatcgcttagaggcacaaaatcacagtagctag

SEQ ID NO: 725 - DNA, 1955 bp, Oryza sativa
tctagtaagtgtgcatttatttaaacagaacaaatcaataattggatattttgtgattggcataaaattgttatggcctaggtatacaaacctgttggatatacttcttttcaaagttagttactccctccgtctccgtttcagactataagtcgttttaattttggtaaaatcaaattgcttttaatttaaccaattttatagaaaaaattagtaatatttttaactcaagataaatattttatgaaaatatatttaattatagatgtagtgaaactaatttgatattgtaaataatattatatttgtatataaatttagttaaatttgaaatagtttgtttttcttcaaataatattatttagttaaataatattacatgtgtgaggtactagggctgagtttagattccaactattttcttcaaactttcaacttttccgtcacatcaaatatttggatatatgtatagagcatcaaatgtgaaaaaaaaaaaccaattacacagtccaactgtaaattgcgagactaatcttttgaacctaattatgtcatgattagctataagtgctacagtaactcatgtgctaatgacggattaattaggctcaaaagattcatctcgcagtttagagttagaatctataatttgttttgttattagtctatatttaatactttaaatgtgtgtccgtatatataataaaaatttgaccaaatttttacagcatctaaacacggcctagtaaacattggaagaataagactctaattgtggcgtggcgccctgcagtcgacgcatgaaaattagtaaggctgtgtttagattcagtggtgtaaagttttagcgtgtagacacacatttgaagtattaaatgtagcctaataacaaaacaaattacagaatctgcctgtaactgccagatgaatttattaagcataaatattccgtcattaacaaatgtttactgtagcaccgcattgtcaaatcatgacgcaatttggcttaaaagctttgtctcgcaattaacacgcaatatgtctaattaataatttttccgtttataataaatactccatacatgtgtccaaacattcgatatgatatggtgtaaaattttgacaagggatctagacaagccttaagttaggaccaagtataaagtgagatgctatctgaacgtgggcccacttaacgtattatcttttatgtaaaagtagtagcgtttctgaccgttttcaatactatgtaaatttgacttatctaattttggttatgtcctcatctatatctgttccaaagctataacggaatataatcgagttgaaaccatcatctataacagctaagccaaacgttacttaggttgcgtttagatcactacaacaaaacaaaccaaagagacatcttatttgtaagatagagacgttttattttgtctcgcacagataactgagacgcttttataaagcgtcgtaggatcgtctctgtttgcaccgtctcagaattatggagacgctttttaaagcgtacctatattatttaagacgttgctagagacgtgtaaattgcatctctataaaatatagagactcttttatataggcacgcacatcttaatatatttgatattaatgctttcatctgggctcgaacacagcacctgcaggttgcaaagttcatgcactaaccaagtcattaacgtgacaatcttgaaggtaaatagatagttttttttatattgcaactctgcaaacatgcgtcctgtagcggtactcttcttttttaatctaagactgaatattaaatatttatttttttttccaaataattataatattattataatggtatttgatgatgacgattaggaacagtgtgtttattttcttctttttctatataaataattatatattatctaataacgatgacacggatataataaaaacgt

SEQ ID NO: 726 - DNA, 2134 bp, Oryza sativa
attggactcgttttgttgtacatttcaaatagaaaataatggttcgaatagaattcaaatttgatgcaaaattgaagagatatctaaagtaatgaaaaaactaaagttgttcatcacctagatgtgccacgtcatgggaaaattagaaccgttggatgcagccagatattaaacaacagccgatggttctcaaaataaccaaagtaaaaagcttggtcaagggacttcggaagtcaactggaagactcgtgaatccaccacggtaatatccgaagacccaccaatattaaaagcccacgtgtccagcataatatatagggcatcacggatatagcccaaaataaaagaataagtcgaatttcatggatacctcttttaatgaacgaagaatgtttatttcttccatcattgagccaggtatacttatatagcataaacctttggatttggtgtgaacggttggattaataatgaagatcgatcgtaggaagagtcaggagacttccatcggagagatgaaacagaaagacaaaagtaataaaaatccattcatggggtaccgtcacgtaagagaaataaaaaaacaacacagttaaacttaattaaaataaaagctactactactaaatactcccttcattccaaaatataaggcacaaccacccttaacccaaagaccaagaaataattattatcatcttgtagtttgaatcatcctaataaatataatgcatgcatccaataggattagataacatgagagtggaggatttaaaaaagtaataatttaatggagaagatgtcatagttaattgcatgcttggaacatctaagacaagtggttgtgccttatattatggaatggagggagtatgaaatacaaattttctggcgaacttgttcaaggaaagtgtgtgtggcagcaattgtgcataggatatattccctaatttaaattcatttatacaagatggatgtaaggtgattgcactgggaacagattttgttttgggtacaatcttgatatgcatttgtgaaacaataacaaaaatccaaaaacaaaaaaaaaataattaggaagagatactaactttcagaatatgagaaaaattgaagcattaaaagaatttctaagaccagtcctcttcagtgctcatggctgcatcaccttcctgacttcctctgagctcggaatggcagatcacaattctgcctctctggtgcttcgtacgccagattgattattatttcaatagaagattacataacatggcaaggaaaaacgtaatcaccacaaaattgacactatcaagtgtgaccaaaagaaatttccctgttgccattcattctcaaggttagttgagtccacatcaggagcagaacgattatattatcacaatggctatggatgaaaggagaagatatatatagacaggaaagaagctatgaagaaatgatgcatagaaaaattcagtgtattgaattgatacccgttttttttctggtatgtgtctgtcaaaagcaattgtagctgttttttttttgtttttttaaaaaagaatttatgcagtgaacaatgaattcatacagactagttttattcctcttgtacaggttcaataacaattctttgtgggtacaaacatttcagttcagcattgtaaatacagatgtgctgatagaaaatgtttattccaaaataatagcggggaaagtaactcgcaaacacaggaagcaagtgctatttttcaaaagggcctgactttgctacagcatctggaggtacatggacaaattcacaatcattcaactctctagttctgaaagaatccattggcttcaagatatgacactacttgatcagccattgatttaggtgaagggcagtccccaactttgcactgtatcacaatctgcaaagagtaattcaaggtcacaatcagagaagttacaaatcatcctcataattttttttattttggaatcttttctcagagtagtactgatactgatgtttttattttattgagaagctgatgttagtatgaatatgaaagatatttggctaacctcacaatctgaaggtgtttcataaggatcatctatttccgtaaagcctgcatgcatgtaattt

SEQ ID NO: 727 - DNA, 576 bp, Oryza sativa
ctcggtacccaatagatgtatgatggaattacgtctcacagttgtaggcaagtgaagccgctgctaaacgtctcttttccccctctgtactcctgatgcttccagttgtcagagtatcatccatctgcaagcacaagaataattcatagtgacaaacaagaccatcttcaaccatacgaggaagaccatctttaaccatacgaggaacaagaaataacaaatttgcacttatttttcttttctttttttttgacggcaagtggatatggttttgttccaaccacatctggacaattgtttcattgttgtttaagcgccacttaaattactcacatgacaaatagatgagattatcaataaaataaggaatcggtctgagttaagctagattacagaactgcgttctcgcaagcgaaaagcaacagagttgcttgagggtggggggtcaagattaatcattcatgggtcagcaattaaaacaggatgagaatctttcttgctaagcctgagctgatgcaaaagtaagggcgtccatgccaaatgaactaataaggcacagtaaataaaaatgcacat

SEQ ID NO: 728 - DNA, 1250 bp, Oryza sativa
tttcggaatagaggaagcaacttaactaacaatagtcagtggtggaggatggggacaaaatattatggcaaatcctgatgtcacggcaattaatcgtacagaattaattaaagttcacgtgttaaacgtgctgattattaaatgccttaacagatgatgaccgattacgtttaacatattaatctactagaaattatctaccggcactacaagaaaattgagctattgccaccaaattattacaacaaaaaataattcgtagcaatatattgtactattgcaatgataatttttctgtggcaaataattatattttattgcaacaatctacaatcgttgttttatttagtacttttgttgtaatagaaaatgagatatcgccacaaaaaatcgtactgttgcaaaaaacatgttctatcgccataattttaattcttgtggcaatttacatagtacatgatacttttcactatttttttgttgccacgatcaacaaattggttgtaataaaaaattgtcatctcataatttaacttaattttttcatatggacacggattgagacaaattttatatgaaaattatagctctcgacgagatctacaattttataggtgataactttttcatttgaaatcttttagatattcaaatctatgattcaaatctcagttaggtaggctcaaatagaatgatatgcattttccaactgaattgatgcgtaggtgagttggtaaaggagagcacgcatgaaggataggtcttgggttcgaatcctagccaagacatgatataaaaaaaataaatagataaatagataggatgatagactagtatttgaacttttaatttggtacgtaaaactaatgccacatatagagtggtggcaataatttttaatacaacgatgtgaagtgtggcaacatctaaatttattaccacggctagcaatgattttaaaattatgacaacatatatctattgccacaattttagtgttgataccacgatttttttcgtggcaacaaatgatttttgtagtagtgcggacaaagataaacaatatgtaatatgcataatactggcttaatttgtcaaggtttcacttgaagcaatattcgcagttatgtactacctccctttagactttttcattgaccattcatcttacttaaattaatttagtataaatatacaaaattataatttaatagtatattttatttgatgataaagcaagtcacaataag

SEQ ID NO: 729 - DNA, 1017 bp, Oryza sativa
gatgttggtgctagaagtggtgagattttgattaaacatgatactaataaaactgtgtttaaatctgctggtatcatgtctaccatgaatgcatcttcttcaaaatccaatgttgtgcatgcaaaacctcctgtttctacttgtgttgctaaatcttcttcctctaacaatgtgtctaaacaacgtgaaaaatatacttgttctttttgtggcaaagatggacatattgttgatttttgtttcagattagctcataaacagaaaaaggagagagagattgcttttgcaaaatcaaagtggcaaaaatcgggttttctctcgaggaaaccggtcagaccgtagtgggtcccgcggtcggaccggcgaccggtcagactggctgaacagcctcggtcagaccgagcaccggtcagaccggcggtacagaggcggtcagaccggtccccggtcagaccggccactgtacctcggtcagaccggcctcggaggaatttttctgaaaattctaaaattgattttgcatgtggatttatgcctattggatcttctggtcgtgtgtctcattactggattcctaaatttttattatcatctaaccccagtactgaggcttcgacttctgcttgtgtgtaggctttggtggcaaggaaggagaacgtgtggatcgtggattccggttgttcgcggcacatgaccggtgataaaaattggttctcctccctaaagaaggcatctaagattgaatcgatcatctttggtgatgctgctacaagtgccgttctcgctacaggtatggttaaggtaaatgaaaaatttgaattgaagaatgtagctttggttgaggacttaaagtacaatttgctttcagtttctcaaattgttgatgaaaatttaggttcactttaaaaaactggaagtaaagtttttgattcttgtggtaattctgtgttgaatatttctcgctatggaagagtgtttaaagctgattttgaaaatcctgtttcacctgtgataaca

SEQ ID NO: 730 - DNA, 1642 bp, Oryza sativa
atactatacgtatgtaatactattgtttactgctaatgagtcaagttggagatagcttggtctcggaatatggtttctttgtttgttccatgtgtaggtgactcgatgtctcgagagagtatttgcggtaatggactgggagtcggcttggggataaaacgacgtccgtggtggtcagagatcatgcgggatacttaggctagagttgatgcacgtggttgatggagattctatatggcataccatggaggaattgtgtgctatgggatgcggagtcgaatttggaaggagtccaaatttggtactattggttatgtaaagttttttcttgtaataatgggtttcctaaggtgtttaggactcctagtatgagtttggttcgtggctttaggctgcctacctcatatataaatagagggggagcgtgaggcttcccggtatcgctttagagagcaatagagttgagttttgagttagggttttgagtttagtcgaaatttttgtgaggagtgctgttggtgcactttgtaaatacagagagaatcaataaagtcgtcatccactttaagagttcttcgatttgtgtttatcgggtttcggcggtctaaccggcgatctaccggtggtcagactggcagcataagggcggtcagaccggcggcagcagcaggcacggcaggcgacttcagcggtcagaccggtgaatctataccggtcagaccggtggcatccgagcggttagaccggcagatcaatctcggtcagactgatctccgtcgatttcgagggtaacttttatttccgctaaaagtttttcgtttttgggtataccaaccattcaccccccctctggttggcttagttcttgtgattcgatcctacaagtggtatcagagtcttgttttcttctttggatttttatcaatctagagtttttgccatggctactcccgctcgtttctcaactgagcctcatgttttcgatggaacagatttttctcattggtgtagtaggatgcaatcttacattatggctgaagattatgatatttggagaaatgtttctcatgcttatcagattcctgaagctattaatactgctgctgaaaaaactgcttttgaacaaaattgtaaagctcgcaacattcttttgagtagtatttctcgttctgattatgatcgtgttgcgcatcttcaaactgctcatgagatttgggttgctttaagtaattttcattaaggaacaaataatatcaaagagcttcgtcgagatattttcaaaaaggagtatattaaatttgaggtgaaacctggagaagctttggatgattatctttttcggtttaataaaattttgagtgattttagatctgttgattcttcttatgatgctaatgatcaacaatctgagatttctcgtcactttttgaatgatctcgacatgtctatttgggagatgaaagttacatctattcaggagtctgtaaacatgtctactttgactttagattcactttatactaaattgaaaactcatgagatgaatgttctttcttgaaaagttgattctaaatctagtgctttggtttcttcttcttcttctttggatgttgatgcttcttcatctaagtcttcttttctt

SEQ ID NO: 731 - DNA, 861 bp, Oryza sativa
gatcaggggcctgcgtccgactggtttccagtcgggggctcttgagttgttgccgtttcagttgttgccgactggtttctagttggcgacaggtcactcggatcggccctatcgcccgaagcatgggtgccagttggctggctttcagcggtcggctggttttcagcagtcggctcggggtccttgggtatattttgctctgtcatggcaggatcggggtcttttccagatggatctatatcagatggtttcctgcagagtgttctttcagtatttagcattatcttcattggaaaacatgccgaagcggaaatcataccgagagatctaatacctggaagatgttctgatctttggcatcgcacggccagccagttttttcctgggcatggtgcgctttgggggtttattaggcgagcccttatctccagatttatcatcgtcgccttcatcatcatcaagtaccagctttctcttgcgaggacctgtttgaccagttaatttggaagtctgaggttgcggatctggtctgatcgttggccctccacctccctgagcggtgtgttggcaaggagaccggcgctgagtgactggtggatctgacttcatcaatgcatatccctgaacaagatgcttccatagttagtcaactcagcatgaagataaaattatgctctgatcacggtttgagggtttctgatgcgtacctgtggaggcggattgaatgcattatatggcacaactggcagttgatgagagtagctgactacaattgcatttgagaagattttatacatcctctccttcatgattttgaaatccagggaatctggttcttcacggttgggatcatgtttgccg

SEQ ID NO: 732 - DNA, 3517 bp, Oryza sativa
aagaaaggcttagtgacactatccacattagtatagaacacaaaaagtgtttagtttgcaccaattaatcgtttcacatggttaaaattttacttaacttgggccaaggctactgttagtaaagcaaaatttggttaacactgagaatggagttatgattgaattacagtgagaatgtgaagtacggcgttgatcatggtactgaaattatcgaccaagatttctgctgggttaaagaattttgttaaggtgccaaatggaatggcaaaataatcaatctaaaattacagtgtgttacttttgttgcataatatttttgagaattaattttccaatgagtttaagttgaaccaattattttttataattttcttagacactcaaatgaatatatgaatcctagtgcatataagagccaaaaacaattaaaataaggcatgcacatggagaggtgctgactttatttattgccacattttcatacacataatttactgggtacacctatagtggtatgttacaaatataaaagtacaagtgttttaacaacgataatacatgttttctaatgcaaacatgtatatttggaccaacgcttgtaattgggcagtgaatgcagcaagtttgcaaattatttatttaactgcattggttcaaacttgtgtaaacagagtagccctccaagatgtaaatcatcaagctactgactgatagctattacatatctaccggtaatggatggcgaatgactggaacaagcgaaagatcatggagccgtcgtgctattgcccccatctcctccttcatatcaaggttcccaagctccgtctcatcaggaagctcccagttgaaatggtacaagagacttgctagcacaagctccaagttcactagaccaaaagctattccaggacatatccgtcgacctactccgaacggcatgtacttgacatcggttccatagtaatcaatgttgacatgctcgaatctctctgggatgaactcttctgcttggtcccagtacatagggtccctacttatagcccacatgttaacgagtatcatagttccttggggcacatcgaatcctaatacctggcttgtggttcggctttctcgtaggagcaatggaagacctggagggtgcagccggagcccctccttgatgaccaagtgtaggtaacttagattttttagggcttcctctgtaactttgtgatgtttgccaagcgctcttcgaacctcgtcttgtgccttttgcatcactctcgggttcctaacgagctcagccataatccatttcagcgtcgtcgccgttgtctcgctgcccccattgaacaagtcctgtatgacacatagccgaattttcattttttgcttagtacatgaattttgaacttaattagcttggtaaattttatggttttaggatgcttactccgattgttgtcttgatgttatcagtggatagcgggaagtcaccttttctctggatcctcaggagtacgtcaaccaagtccaagtcctcctggtcatcggaggaagatctgttctcttggtgctccttgataatgatgtccaagaactcgtacacttcgtcgcgatgccgcctcatctggcgaggccttctactgatcagctcggcgaggcgcgacgatgggtaaagatctggcaagctcggcgtggcgaatagcttcacaccgcgctctagcagcatcaagaacttgtcccggtccttgaaccggctccctatcagggcgcgcatcgtcgagtcggccgagtaggccgaaatgagctcgctaaggttcacggcgcgccgcgccggcgaggccgccgccaccgcccggagcagccggccgacctcctcctcgcggatcggccggaaagactggacgcgcttggcgctgagcagctcgacggtgcagatcttgcggaggttcctccagctatccccgtagggcgtgaagacgatcccctgcgagtaggggcgtaagtggctaacccgcgaaacccgcttataaactaaaataagccgcgagcccgtttattttaacttataagtgagttcgcggctgacccatttacacccctacctgcgagccctcggggaagaccagctgcattactcgggtggaggggcgcgtcgcgaaggcgaggtcgtgcgtcctcatgacctcgcgcgcggcgtccaccgaggaggccaggatgacttggaggccgccgagccggagccgcacgagcggcccgtggcgcagcgcgatgttgcgcatggcgtgctgtggcgggagcgcgcccatgaggtggtgcaggtggccgatcaccgggagagcccacggagatggcgggagccggacgctaccgccatcgcgacgacgcatggaacggatgaggaagaagaagaagaaaggggcgatgaaaagcaagagaaccagtagctgttgggggaggtgaacaagctgatccgccatggcttgtgttgtcttgcaccagatcgatacaaagttgccaaaatttttgtatctaagcaaaagagagttcacttgcatttggtttgctcttgcagttcagcagcttggttgtttatatagtccattcttcaatagctcgatctgcaccatcaacttgttgggccacaatttggtttgatgctagagtttttaaaaaccacactttgcaaccacataatcgcacatggtaaatacttaattatttgcttgtgtcttgcctatgttgtggctcacaacttatattagaagccacaccgtacaaaattagtgggttattagcaagtaaaaaatagctacttccttaattattagtcgcccggttttcttttatatatgtaccagtatctaagtacacttctagcattcacgcacaaatgtcataacctacgcacacttacacaatctaaattaaggtttcaagtttaattaattattagtacaaatgatcgaagtgtaattttcagtttgcgttgttttttttttattttctgaataattatttaagcattattatcctgcttcatatatactgataagaacttatgccaatacacttttttaagttttaggacagaaccttctcgctccttcaccacgagataattacactacgccagatcctcacacctctgacggcatatctctgacgggcaaagaaaacggtcactgatgaaggtcacctttgacgggtcctacgggatgccgtcatcggtgagccatccggccgcggcccgtcacaggtaactagtcatctgtgacgggccggaagtggaaaccgtcgaaggtggtgtaaacctcacctatgacgggtttcattttcaacccgtcacaggtgattagtcacctgtgacggatcgcaacccggatggccgtcaaaggtgaagtaaggccggcttctccactacttctctcgattttctcccaacggggcccacacctagaggagataagaccggttctccacttctctcgattcttctctccctctccactcgctctccctctccctc

SEQ ID NO: 733 - DNA, 1302 bp, Oryza sativa
ccccgagatggccgggattcgaattccaaatcctgcctctctctccacctccacctccccacgtcggccggcgaaatcgggccactcccggctgttctcgacctctccgcccctatataatccatccccacatcctcttcctcatttttcctttttccgccagcctctcccaagctctccaccgctcccgcaccgtgcacccatccgccgccgcctcttccactactccggccacctctagccaccgctagggcctccgccgcaccgcaccactgccaccgtcgggttcgcgtggtcgaggtccacctcgtccacccctcctccgtcaaagtccgccgccggagcccgcctctccccaagcgtcgatgagcatctccattaccatcgcctttggccggctatgctgtgcgccgtggactccctctctccctctaacctctctcatcgtgttccctatgtctctcccgacgctgcccgctgttcgccgacctccctccatcactagtcgccctcgttcatcgtcagtaaggccctccccttcctctcctttctctccgccgctcgccacttgtgcaccgccgtcgcgtcgcggtgccgtgtcgccacggtggcgccgctagccgcggtgccgtcgcgtgccgccgcttgccgtcggtcgccgccggttgccgtcgccggcgaccgcgcgtgccgctgccactcgccatgctgggccggccggttttgaagccgagccgagccaccagccgcgtccctcccgccttgtgcctctgcaagtggggccgacgtgccggcgccccctccctctctctcgagtcactgacccgggggtcccgcatgtcggcgccgccccctccttgatgacgtcagccctgggatatattgcgcaataaataattaaggtttttctctttatagtaaaacacagtgaatcttctaaaattcatagaaaattcatccgagctccgtttaagcccattcaagtcttagtaaatcaagaaaaaatgcatagaatctattaaaaatggttttgttctctgtttcagtagtcttatggcctgtttgtattgtttgctttgtatgtcgcttagattcctgctctcccaacgctccggtgtattttgaaatagtcgccgaggttcctccagcagcagagcaaggcaagtcatgcttgtcacttgaacatattgaacatatattgcaaatgctctaccgttttcccttaaatactgcattgttttaaattgttactatgggatatttacctactgttacagccatgctatttttgtgcctcgctcc

SEQ ID NO: 734 - DNA, 14128 bp, Oryza sativa
gaaaccgtttggatggactctatctttagtaggctggagctatgccaaattggccttggaagttctgagtaagcttgcagtagacgacaggcaggtttaggctgtgttcggaacacagggttcccaacccaaactgttcgcacggaaaacgaacggtctattagtgcatgattaattaattatttgctatttttttttaaagaagtggatcaatatgattttttaagcaactttcgtataaaaactttttataaaaacacaccatttaatagtttgcaaagcgtgcgtatggaaaatgagaggggagtgttgggaactcgctctcgcaaactcagcctaaactgttgattgtatgggccaagtgggcctcagagaaagtccaataagcaacgtcgtcactgggctgactttaattgggcccaccgtgtgctgttgtttctaatcacctgtcaggacggcactaataagcagcagcgagccagtgattctttctttttctttctagtactactactactactagtatactactacactactagtagagtacttcctcggtcgttaagtgtagttttagctagtaagtcactgttaagctaaaattaaacttatttagtataaatagagagagtagtttctactgatgcatgcatcgagaattctactagccagtcaagttgtactcctacataacgtaacttgttgtagtagcaatacgggaaggaaaagaaactgctgagaatttagtactaacacgcacgcacgccacggtcgacacgaatgacacacggctctcgttctcaaacactccttggccctggctctcccctcgtcgtcattatccagcagtcagagagtgctactacactagcaagcggttgagtgcacgcataaagaattcctcagcttacatacggccagacaaatcacctgtacgttcaactgttccaccagtaatgaccacacctcctacgcgtcaacactcgacacgcgggggccactgacccgtccgggtcagctcagttgcgtgtgcgtgccaagcattccgtgcacgcagcagcaagcacgatcgctcgcatcgcgcgcacgggaggcattcgcacggctgatttacctgaaacacacgtactccactcctctgcgatttggctgccgcgcgcgcccgccttgagagatcgatttccagcgagttagtagttaccgtcgacgacgacgacgaggttgatcgagttactacctgttgttaccgtgcggagatatttccggacggtgacaacgaaaatatcctcggttttgctcacgctccatctgggacagcgaggggttggtttgggggaggcagagagaggagggcgaccccaaaaagctaaagcaaagcgacgacgaggaggacgccgacgaggcggcccgctgcggccacgtggcgcgtggcgccggcggggatgaggttgcttcaacgtgtggccacctcgtctttgtgcttgcgccttccccgcaacctagatctttttttgtcctcacccagtcactcgtccgaacacttgtctaatcctcttgccaaactaaaattaaaacgtgcagcatgatagtaaaattaacgctgtcgtgccaataatttcttgacgacaacgacatactacctccattttttaaatagataacaccgttagactttttctcacatgtttgaccattcgtcttattcaaaacatttacgtaattataatttattttgttatgagttgttttatcactcatagtactttaagtgtgatttatatcttatacatttgcataaaatttttaaataagacgaatggtcaaatatgtgagaaaaaaatcaacggcttcatctattaaaaaatggagggagtataatgttgaaattagaggtagataaattttgggaacgaaattaggaatgacttatatctcaaatcataattatggttcagtttaacccgatggatttggacctgaacgtaatttcgaaacttcccaagggtatttcaccaagccgtacgcattatttaaccgatggtgaagtggtgagcacacgccctctcctaaaaccaaggaacccaaccccacaaaaaagcgtaggacgccggagtgcgaaatccttatccgctcgcggcgacgccatggccgccgccgcggtggtccacctctccgtgcacggccgcctccgccgctcgccggagctccacgcccggccataccaccgcccgtcgctgctccggtgccgcgcgttcaagcaggaggccgataacggcggggaggaggcttcgtcgtcgccgccgccgccgacgacggccgaggcgcggaggcgcaggaagggcccgctgtacaagctgaagcggcgattcaggggctcgccgggtcgcggtcggcggccgcggaggcgtacgggggcgagtaccagcgcgccgtcgagaaggccgaggagatcttcttctcggtgagctccattcctgaaccccctcaagctcccccgcaagcgcagtttctctacatgataatatgataatatgtttatggccgattttttcatctgatcgtgtgatctactagtacgactgcctttaattgttgccacgtatcgggaggctcaaccactcaatgcgttagcgagcgctactaccttaatcagctcttgcttagctgcatatgggaattgcacccatcagatgctacagctacaagtgagtttaggcgatctatgttgtttcaatgggtgttaggatccaatacactagctgtggcacaaatcgatgagctgatcaacactaatcagcttgtttcttactagtaatacagtaggctccagttactgtgaaattctgtaatgtcagttccctttatgtttatgtgctggagagcaaattctgcctgcgctaaaattaatcgcaggcctgtgaagcaatttgcctgggcagaggatgcggctcgtagccagaggtgtcattttgtgtagcctttgttgcttttgaaactattttaaacttctttgaaactcgctcttgattaaatttacttcgcccctcatttatatgggcctagattctctggttcttgcatctaccattgtatggggggcatgggctgccaggctcatggttttacatgtccgactgtaagtgcatgcacaggcctgctttatagttcaattgaattgcttctaggcatgctgattctttgtattgatataaataaaatctccggtatcggctgattctctaacctaagcacatcagtaattttctatttgttgcaaacctgaacagagtggttctgaatttatcactactgagttgtaggatcaactccttttctgaaataggtgttctttttttcaaattgacttatttccttctccttttcaggttgctacgcaagtaggccgatatgttatcactatgatgagcagcggtgttgtacttggagttggatttcagttatcaggttagttacattcatttgatatattgcattgcctttggatacttctgtttttttccctacaatgggcattttcagagtttcagtaatgacctagctacctttctatttaggcggagacagccaaatgaatacactaatttggtatagttggctcgggggagtaattattggcacgatgataggtgcaaacagtgtcctagaggaacactgcaaagctggacctcgcaatgttgtcataactggaaggtaacccattttgcattcttcctttcacatgccatctgaatcttttgctaggaagcatgcatactgtgagtacaggtcaaaggtaataatcaaaactaatgaatttattcctagataggaaatactatttcaccttctattattctctattttcttatttgatgagtggagtataaccataacaatcaccaagtttatacgggttggtgcatagaggagattatgaggtgcagtcatatgaacaaatcattaaagtaacctcataaacatgttaatataaacatgacttctcattgcatcaattgtgagctgatttcttattagtatccatgttctgcaatcaacattgaagttatagtttgattttggcagcacaagaggattagggaaagcacttgctcgggagttccttctttctggagatcgtgttgtaattgcttcacgcaggtggtactcatagacatgtagctcaatgtgtgttgttgttgcatatccatgatattctttttatgaaatgcaatgcgttgtcctagttttaaatatcctattttttgaaggcagccctgaatcagtccttcagaccatcaacgagcttgaagagaacatacaggagggcttgtcagttgcgaaaaagaaacagagagaaattttgctacatgccaaggttgttggtacatcatgtgatgtttgtaaaccagaagatgtgaaaaagttggtgaactttgccaaggatgagcttggatcaattgatatttgggtaaataatttacttttacatatctatccccatcatttattctgcattatttcacggtagggtactcagttggatacttggattgagtgcacaagtttttgtacttataacctttttattttgttctgtactgtggcatcgcagaatgtacttaacatgtgctattcttcttattcttatgtatagataaataacgctggcacaaacaaaggttttaggccactggtaaacttttcagatgaagatatttctcaggtacgttaattatcttcggaaaatcagagtcttttccattctaatagagttcatagaactatattcgtcatgcaacctgacttagttatttcatcttatttttctttctgcttagcctaaacaacattattgtgtccttttctgtttgcagattgtctcaacaaacctagttggctctttactgtgcaccagagaagccatgaatgtcatgcaacaccaacaaaagggaggtcacgtatttaacatggatggagcaggttctggaggatcaagtacaccattaacagctgtgtaagtacctaatgatttcaaatttttaatgctccactgttcgtgtagctcttatactggacagggatattgtcttgtggtttcttcattggctaaaaacgagtataattgtattgatgttgttacttgtgcagtgaaactaaaactgatactattttgcaaacttgcagttatggttcaactaagtgtggccttagacagtttcaagcatcacttctgaaggaaagcagaagatcaaaagttggtgtacacactgcttctcctggaatggtccttacggacctccttttgaggtaacctctgaagttatttagatgcaattattgatgatttgcttgtttagttcattctgaacttcaatatatttattgcttggtgcacatgttgtccaaactccaaaccacactttgtgtgatgatagtaaaacaagataagacttcaagtgcataagaagttttcagtaggatctttatggaaccacacatattggttaatcagaatttcacgctatcttcattttgaatttattttagttaatcaacaatcagaatgtctcctttgttgaatggggaagagtcaaaattttgagatacctcgctgcccaaatcttctttgtttcaatctcttctttctaggatttgatttgtggcaactatttctgtagaatcagcttcacattaattattaagttgcttttgctactacacttctagctctggcttttcctatctgctataatcccgatgacacggtaaactgggtgcgtggcggttaatcagaacctgaaagaattaatgttccattcttgtgcaaatactctgccttgtaaatccagttcaaagttgtgatgttgcacatactttatacttgtaaggcttcatagtttctgtcaatatataaataacttgtgagataacttccagatataattattacaaatgactaatgcactggaaagttctaacatattaatattttttattggtaatactatatacggagaataatatgttttttaacttcaattgatggtgcatgccacttcttccatatttatctggtcagctcttctgttgccacatgcccaactatgcagactgctttagttaacttataatccttctatcttttgcagcggttcttctctgagaaataaacagatgttcaatttaatatgtgagcttccagaaacagttgcaaggacattggttccgaggatgcgagttgtgaaaggaagtggaaaggcgataaactacttgacaccaccaaggatcttgcttgccttggttactgcatgggttcgccgaggccgatggtttgatgaagaggtatgtttcttctctatgcagctagtacttttcagctttaccttttatttcagcaatgccagtatatgaaatatgctgaattcctgcagaagccatgcgtgcaaacatgattgttgttttcattattatgcatcttgcatgcacttttcatgatattgaacctcaagacttttgagctattatgcttctgaaatagtgaaatatacatttctagagaaagagtaccaagctcttctaccgttgcaccaaatgtatatgaaactcattgttgaatataaagaacaatggacatagactattcaaattatgcctgtggtgattttcttgtaaattatgctaaataagcagtattcgttctaagactggatcaaccaggcgagtcagatcataatgaagcttgagaccagtgtccagttctgtcaggtctctacataagtaagagccataaatagggtctgtcttgatggttcagtttccaggttcattatgaccagctcagtccatcacctttactgctagttggccagagctcttctggaaggccttaggctggtcctcccctcaatggcggcttcaaacacctggttccaccatggcttagctcggtccaacagtctcagtgctattgtttgtactgcatgttaaatatgacatagttaattctcacatgtattgctggatctcacctagtccacatgaaatccagcaacagatttaactggagagaatgataggggttttaaaaagcaactgcacccgtcaaatgattgcactctagtaatattttggggctgaaatgggcacaagtatacatattgacgttttttttggtatctcactggtttattggctgtgattttgggaaagaaaatcacctgcaaattttggtaccgtcgaagcttctcaccattagattgacaattattaatggaaaaactgaatgaacacatgtattattttcgcaagatatttaggaaacatgacatttgagaaaaaaaaatgctgagaagtgggtaataatttaattataacgtttgtgttccttcagaatctttcacaatataactgaagaaaagtgctgtatacatcagtgtcttttgtgatggacaatgctccaatcatcctatgtgcaaggttgaaaatcaaacagatgaagtaaaagaatattatattcttacaaatgagagatcagcataccaagcgactttatgcatacttcacagttcataatactttcagtctgatgattaattcatgtgaatgtgtgactgatcataagcacattgcagggaagagcagtatatgcagcagaggctgatagaatccgtaattgggctgaaagtcgagcacgcttctctttcacagatgccatggagatgtacacagaaaacacatgggtttctgtgttctcgctctctgtcgtctgcgcattcataattctttccagctcaggtggacctcttccaggcacatgatcccaggagttgccaaactagatggctacacacaccatttttcttcagtacggggattctattatgtactgatatatgacacacgaaacttatgaaggggggaaattgaacccagaaagcttactgcgtacatacgcccaacggtgagaagcatcagctgccactcaccatttaaggtcaagctaaccatgtgctcagtaaaaatgggtaaatagcatttgttgtgtgggcattccactgtttgtaagctgacttgtaaaaacgtgtatctgagctaaactgagcacgaacagattcgatggacaatgttatctgctgtacatgcatgtagtaatgtagttttgatgactgtaattctctggtcgtcgcttccagttgcacggttgcaccgtatgttgcaaccaccaatagaactgaaagtaagtgagagtaatcaagccagcatctgctatgtatatatatgactcatcagtctgttatatatcacaaggaaagcttcttcaaagctaaaagcaaagctatcagtaagacagtaatcctgtgtttttgtccatttgaattcttgatcacaacaggggagattcagaagttgcattaaggtatactactactatcatttatgcagtttgttgcacctgcagccttgcagagtgatgattcttcttgatggggaagcaggacgttcacttcacctcgtacaaacaatgtacggatttctgtgtgcgagccattgtgagcaaggggctttcttttcttccaaaagtaaaatacaggctagtgcttttttcatgaaaaatatctgatggtgagtggagagtgcacacgctgatgagcagccgagccggagcatgcgttggcaacttttctgaactacaagctggagacgacgtgaggcttctttccgagagttgatagcagcgtgcacttccgaagttgggtgtcgatttctccctttttttctgctgagcaatggcaccttccattagttggagggtggaagcttccttcttgagtccgaggccccaatgtcaccaatcctgtctcttctgcattgttcgttgggagtataagacaatttaggggcggagctaaaacgaaatagagagatgtaccattcacttgctttactctactttaaatcaagtttaagctaatatgagtatttgagtttggattaaggaggtacatatatagtaaaaatagaaaaactatagctaaaaaaattttcttggccaggtttctgggcacccctctctcctacctagctctgcccctaagtgcattgcccgttcttctctactagtcaagttttaggttgaactttttttttaggggatagttttaggttgaactgatctatccatatatgccctttaattttccatcagcttaagcactggggttaaaataaaatatgcatgcaaactttgccttactaacacgcatttacttgcaattgcttagctgattgaaatctcactaaatctgctgctactttgattggattaaccaactacagacaagttgactgccctggccgggcagtgaacatggctggtacagtagtactcctcttggacctctgattgcagcttgctaccagcagcagccacggcggcgtttgttttgcatgtcaatgtttagagggtgtttggttgcgagccacactgctgtttactacatctaagattagatagatttaatcccattagcagctgtttgttgtagccatagctatgacaagattcttttctaataaactgagtctcacgtgtcattgacttagaaaaatgtaacaagattctcttagacttactaaggtgtggccaataatttaatcgcctcaacttagaccgtgtgacaatatttattgataaatgacaacaaagtatggttaggaaccaaacacacccttaattcacctagcaaagccacttcttggcctttttctttctagtcttcaatattgccatcatcatgtacatacatgccactgccagaccagtacagattattccaatgtggcgtggtgttcatcctgaacagtggctgatgtgccttgaggtcaatgatttttttggtttcttgacgcgactagacggtgtgagtgctctccaagattgaactcaaccgtccgatccacttgtgctgggagagggctccttttttgtggatggctttgcatgcaggatggagccatggaggaattcatgtagtcatgtattttatgtaagtggtctgtggagccctcaaggcaaaagaattattggagaataattttgcttgtcctcatggagaaatggtttgtcgcacatggacacggttagatctctcaatctagctttactatccaaccgtgcctccttcaatacacgggaatgttacaataatcggttcaatttttattggaattggtttccttttttatattttttaaataataaaaggtttattgaactcaatcaattatatcaagatgatacaaccatctgagactctcatgcataattaatatgcacaaagcggaatcgtacatccacacactaggtttcctccaaacaaaagagattactgaattttatatgaattttacaagaatcagttcaatttatatcggaactggagttctgaaaaggttgaagttgccaacttaccaccaaggaggcaaggacaaaattaacccattttaaaatcttaaagcaacagaaataaaatggatagagctaggcagagtagttgtacaatctattccacgacaagacgaatcccacactaattaagtcactgatttgaactagtatcacaaagggggattaggctaagttatccggcccggtgcgtcaccgcatcatattcatattcatatctcatatttaattggtggccgttatcatatgaggacatgatcgaggtttagcctttggaatgtttatccaaattccaaaacgatcaaaagatgttcatatggggcttgtctatagctgaaggcgatgtgcatgaatcagaatatacacaacacaacgcacgcgtggagtggagacagtggcatattcaagaaaaaaaataataggtgggtctgaacaacttagaacaaagttacagccctctcctatctacatgtggcaaaaaaaaatttgtgggggctttggtggtgttcttttcttctgaagatgatgatgatgattaagttttttacataaaacgaggtggtattaacgtatgattgattgagttttaactattataaacttaaaaatagattaatatgatattttagagcaactttcatatagaaagttttcacacaaaacataccgtttagtagtttgaaaaacgtgacatgaaaatcttaatcaatcatacgttaatacatccaactctagttggagaaaagaacagtgacctttatgagggctccaatagtactcacgtaagtagcggaggttcgagtcctcattgcgcccatgctaatccacccttgcgtggagatgatatattgcatcctgcatgaaatgaaatggcatatttttgatattgcgcgatgtgtgcatgcgtgcatggccagtgcaaagtcacacacacatgtgatgctgtgagcatgttgggggcagaaggatcgaaagcaacggccactgtcgaatctgcaacctttttatttttggcgtaatgttgtgtgatcttgtgtagagtttgcaccgagctattgctttgcaagatttgatgtcatgtttttggtataaaaaggtcgatgtaatatgtctttctttcttcccagggaaatttgaccatgcgtggaacataacgcattgggttatatgattatattttttttaaagaaaaggaaattgaaggtatagacaattatactacatataatcattgatatatatagttcgtggtatgttctggaaaatttgtgcacataaaaaaaatccgtttgttgacaataattaaaataacaattggggagatagacaacctatggtttgacgcagaaactattggagtaactaactaaactaatccataatcatgtatatagatatgcatcctctgcttttcatttcaataggtaggtaccttccgtccctctcttaaaggagaagaagcatgtgctgtccttggactatgctgctgaaaaaaaaaatcaatggcctggagcagaggtcatgagggaaatgtaccctacagatcagaattggcgtaataatgctgcaatggggcctacggtggctgaagcaaattaaatttcaataatttttactgatatgctaactgtatttttcagagaaattcagacatgaataatttgtggacaatagaatgtaaattcttgatgaaatgttaccgtggtttgattatattgtcttaggagactcaaaccattagaaatttagaactgtgcttggccatcagaattcacgtgctatgagtgctgagattcctgcatgttacctttgtgtcctacatgcatgatgaattgctcagataagatgatctttctaaaagaaaaaaaaatagttgatgattgccaaacatttccaatcattacaatgaacaaaatatttggaaggactatgatgcaggcaatgtggttaactcaattaatagagattttggttatcatgatcgaattcctttgagttagacatacatttggtttgtagccacaaccgcgatgaaaatattactttttttactatctaggtcccacgtgtcattaatgtgtaatggtgctgcgagattttcatctcgctggcaccgtgtcatgctgattatgataacctaaccaactcgagtttagacataataaatgtagcaaatttgggcaacttatatataaaccaaagacagtgacaatgttcacgagttttgtatgctaaacggtttggtcaatacgttgggctaccgatcatgccattcttttagggctcgttggtagagctcgaactcctaaattaacttcataagttaggtttagagttaaattgtggagcatcttaaacccagctccacatctctaatttattttgtgaaagcgcttcagctatatccattcttatttagatgaagttgaaactgtttgtctgagtttcaactctagaagagataaagttggagctggagccgtggcaaacatacccttagtttcaatttcgcagtaactatctaatcaattgatcatagtatttctgccaaaatcaaatgtggaaaacgagggcatcgactagcactctaccagtagcctgcaggacacacatttatgcataaaacctcccaacgggatttaatttgcaacacaaaacgtcattaatttggtgctgactttcagttgttccatatatttgctactcctacctgctgtcaatcttataagacatgcaagtaaacacagccacagaaacggtgtacagaagacaaatgcaattaatgattaactttgcttgcatacgcaccgattctagctagcttgaataagactgttagctatagtaagtaattgattaaagaataagagatcaaataaagcaaatatcaaccaatcatgcttcaaactcccatcataggctcgtagctgtatcaaccacatattaagatcaatcatagcttcattaaccatgtctacgtcatatcaaacaacactccaaatttaaccttgctagctagctgccataggcttgttgcgtagatcatctttggtgctgacacttgtatactatgtgcacacataggttgatggtttgtcaggttgtggtggtcacagaatctatattgtgactgtacatcagaccatataatcacaaaccgcgtacccgcgatacacgtgaggcctagagtaaaccacgctaacaaaatactacctttattttaaattatgaaacatgtaccattaatttaaaaaaatctgtatagcttaataacacgtgggttatattacgaaacttatttctccattccaaaataagttcttttttaagtaatcattatattgaagttagtaagaaatagttgcattgagattttataaagcaggggtattctagttctttattggtatgtgtgagatatgtaaaaaataaacttattttgaaacagagagaatatttgttatggtgaatctctaagagtttggaatctcattgtatggaactataataatttatcgaaattgatagtcaaatattaggacaacccagaacaacatgagtattttaattcaaaattatgtattttaaaaaatcgacatgccacagtaaaaaatagaaaaaataatgtgcctattgcttgaatcaccatttcccaggtatttg

SEQ ID NO: 735 - DNA, 11989 bp, Oryza sativa
gcggaggagcaggtccggcgcgggttcgccgtggtgaagcggtcgcgggacccgtacgccgacttccggtcgtccatggtggagatggtcgtcgggcggcagctgttcggcgcggcggagctggagcggctgctccggtcgtacctctccctgaacgcgccgcgccaccaccccgtcatcctccaggccttctccgacatctgggtcgtcctccatggcggctagctactagctagcttattagccttaataaaaagagagaaaaaaatcaccgtgtttaattaattagctcagtcccaggatgattaatcactgagattagccagagtactactccatcttgcagtaatcatgtgtgttcattacttaatctttctcagagtttaattaatctcctcttgtgttgatttaattgcctctcatgtataatggtcgatcagttgggttaatttgagcttaattaattacacttgggcatgcatgcatgcactggaccgtggacactggcctctagcggtgtgtgtgtgtgtgtgtgtgtgtgatgtacctgcactgttcttggttctgaccaacctttgacttatcacgctagttttttctttttcttttttgaagactggaagaatctgatttggaaggggatttggattgaccagagagtgaggtgtggtttgtttggtagccagagagaagctgtgctgcgtttgaactttgggatcaatcatttggaaatcatgattgtatgcatacgagctagtactgttcctatttgtgtcggcagttattgggtggaattttgatcagtttaaatttgaaaattgatcagtgtgcaccttttcaggagaaaagagtaatttatcatcagagtaacatggttcaccatatggttacatacatgctccattttcctcttaatcataaactagctagggtcttccgtttgcataatacaaaactcaagtgacttgaggtaagttcagatgcatattgacaagcggctacaagtcaaaatggcacttaaattggagtaaaaagcaactataccctcactttatactctagctctgctgaaaaagagagagacatatgtactgccaaacaaacagcccaggatatcatcacaagctcattattcatccatctagagacaaccatgcccggtcaaatttcaaacgggacactataaattctcctttgagcattacttgtactccctccgtcctataatataaaggattttaaatttttgcttatagtgtttgaccactaatcttattcaaaaaatttatgcaaatataaaaaacaaaaagttatgtgtaaaatactttagataacaaagtcaaaaataaataaataataattccaaatttttttaaacaagacgagtagtcaaaccgtacaaataaaaactcaaaatcccttatattataggacggagggagtacatgtattggaggcagtacttgtactggtaatacatgaagtatcattacatcaatctcctcaaaagaacagatgcctttgccggcacaacaggtcaaagggaaaagggaatggaagatggcaatagagtatgcctttctatgctcacatcactagcttgggatttgagcctttgcatttgctgctctgctctgctctctactatctctctcctcctgcatagcctttcacctctctcacctacaaatccaggtttccaaatcaaatcaccaggtgtgttcagtctaacacaagcaaaggtacaactactagtacaacttgtatactagtagtgctccagtacaagtacaagtaggagtacgtgtactagtacatgatttgagtttacttaagtatagctaggagtattagtagtagtaagacgttggaatttcaccttggagcaggtgctgtgcatctttctccaaggacattcagaagagtgtgtggaaaaggttgaggctaactataggatgcaaatatactctaggtctatttgcgtttgaacttgggaaaaggtgggtggccttggcgcattgtccagatcatgctcttggattggatgtgccctgtttgctcgagggaattaagtttagttaaatggctgtgggattaggtttgtggggcggtgtttcaattaattgattaattaaggacaggatatgtcactgcaccaaagtcgaacttgttgctttctgcttaggactttagcgatactattacaagggacaccagccaagcgacctgaatgccatgccatgacatgcctttgcagtactagctttgcgtgtgggggtactccatattattcacaatgacatttgggaagctaattaactacttttctacattgtcttggcagcactgagttgtacttgtgtgcatatatggtttaaattacacctaacactaatagtattattttcctactgaccatgttccaaacgaattaactcggtgacatgacactgcatgttgtcttgctagaagcatacatgcgcgcctacggactatgacacatttgccatttcagatgaagcctgaccattcaaatgtccctattttcagcattgcaaatcaaatcaaatcagctcgaggtacacaattcaagtgagtgaccaacggtgtgctagctagcaatagctttttcactatttctcgaagcagaattcaagcacgctgtcttgtcctgtggctgcctgctatggtagtttgacaatgctcttgaggttaatgtaagaaaactttgtttaatgataatatttcaaaaggaaactttgtttaatgatcttaatttcaaaaaggaactttttgttgataacacaaagtgttctctcacttctaagtcaagagaaaaaaagcagctgctagtacctgtgttcccttttgactcggaggctaatctccacgttttctgctttggaaagatcgcttttagtcagcctaaaaggcgatcgatcgatcgatcacctcgagaggtagtggcctcaactgtttgctgcagaatttgcagatcaaaacacgtacggtgtattggagattggtggtagtacgtagtacgaattaaaagccaacaatgaacacagtataaaaagcaggtgtactattaatactctcttaatccctccctatcgagagaattaattaatgtctcctcgtttctctttgtatcatgcatagattaatgtgtaacgtatcactctataaacatataagttcaaatttacccttctataagttgtaaaaaaaatattactctaaatatatgagcatgatctatcgatagtctcatgtgttcttgttttctaactatctttaaagggatttctagctactattcaaatatataacatgagatatatacatgcatgtgaggccatgcattctctcgagattaggatccattaattagctaaaggttcaattgaacatatacacgagctagatacgcgtactatacgtacgtacggtgcatatatatggtgagcgtgaacagtcggattgtacattttgctggggggtgatgtactgcgtacagtggcgccacgttctttgagagattgcgagacattgtttgtagtggcgggcaggcagtcatgtcatgcatgtgtacacgtacgccccctgcccggcctctacagtgcgcgacgctgtaagcctgtaaccttgtcatagtagcgttgttgagtttcttcgatcgatctcctcttctctctgtagattcttaattatgttttttttttcctgacggtcgtttataacgatcgatctactctacctgtggctggttatgtggtcaccagctcattggtcgagctttgcaattgggtagaacagttacagatgagatgtgtcgcaccgtaaatttaggccctctttggatgcagggactatcatatcgaatgtttgaacattaatttagagtattaaatatagactaatgataaaacccattccataactctggactaattcgcgagacgaatctattgagcctaattaatccatgattaaactacgtgatgctaagtaaacatgtgctaattatggattaattaggcttaaaaatttgtctcgcaaattaattctcatttatacaattagttttattattagtctatatttaatatttcaaattagtgcctaaacatccgatgtgaattagtccctgtatccaaacaccaccttagcttcttaattaaagatgacaagtcgtcggtgatgggtgtaaacacgatatcatatcgaatttattttatgtcactgagtttactctacttcaacgatttgctatcgactttatctcctctatggctctataatatgccactgattttatccttttttacattatgctattaaggtggatacttttcaaaaaaaacctttcatgtcataccagagttgacaattgtttaaccccatggaagtttcagaaaaatataagttttttgtacttagccttcctacaaaatatagaagtttgtatgtgtattttatttctttcatgtttttttatgaaacacttttattatgtagaatatgaaagagaaatcgcatactccatccgtaaaaaaaaaacccaatctagagggatgcgacccctcctagtacaacgagtctgatctagattcattgtactaggaggggtcacatattgttttttttttaccgagagagtacacaaaagatagccgcatcagaaaaaaaaatatatggcaggtgattctattggcatataacacataaattattctattggcatataaaacataaattattttttgaaaattaatatgtgcaaaatggaaatcttgaaatttacacacacttttgtatattatgcaaggaggatacataaaaattttcatattattttttgaaacttctagtaagccaatcaattataacctcttataagccttgaaaagcatttttaggcattttttaaaaagtatccatccctaataaaatattgtacgaaaaaaataacaaagtcagtgacatataattaacaaagggaaacgaaattaatggtaaatcattgaactggaataaactcaaattttgatccctgatacactatgtgagtactaatgagaatatatccacgatgcagcgagagtgcatcgtgtcgggaccgatcgacgggtgcgcgcgagtaggcggatcagatcgacgccgccgccgacgtacgtacgcgcgtttcacagtctagccgggaccgatcccgacgcgacgtagctgcagatcggagatgtaggtatacgtacgtagtactgtatatatagtagctgagacgtgtacgtacaccgagtagctagattggctgaaagctagggcggctttgagctctgccgctagctttagctttgtggtctaaaaagctgcctgtgcggtggctggcttcctgcactgcatgcaggtcgatctctgcgacgggcgacggcgcgcgtcgaggcgttggcggcatgcgcggtcatcgctcacgcgtccgcggggatggtggcctgcggtgaccgcggagcttgtagccatgtgtacatttgcacgcaggtgcggattcataaataaatagcatgaaaggtattccctccgttccaggttaatatgttttaactttgatcaaagtcaaactactttaattttaactaagtttatagataaatatagtaatatttataataccaaattagtttcattaaatcaataattgtatatattttcataataaatttgtcttggattaaaaatgttattttttttctacaaacttagttaaatttgaatcagtttgactttgaccaaagtcaaaatgtcttataacctaaaacagaggtagaggtagtaattaaatttagagcggttcagtgggagctttcatagtcctagtgtcgatagtgagggctcaagctcccacggcaccaatagcagatccgccgttgcaagcgcttccctcaatatgttacacactagtacaaatgttctttattttccaacacctataagcttttagtggtgtgctggatactttctttgtggaagattaaattgccaacaacattctttacatccacatcacctaatgagaggattgtgtgcaggaagggattactagcttgcaccgtaaaacacacaaagaacggtctatacatcacccgacccgagtaaacccctgctcagaattaatattgttggatgtccagaccattgtcgtcaatttggaactgtgagtgtatctcctgattattttttttttataaggaggcgtcactccatttcttgattctagaaagtaagtgcattatatgtatattatcaagattcttatatggtgcgattttttgtaaaagttctatatgtgtataaagccgtggccactgacctaaaattttcatgtgcacatatttcttgttttattcttgatagttcaacttgtgttcgtgataggatgcacaggagcggcagcgatcctgattctgacaaggcgcactggtatatgagcaatagcgatgacgagtcatttgttgataaagataaagattgcagaaggggcaccgtagccccgctgctgaagaaaggcccatggacatcatgggagaactccatcttagagaagtacattaagaagcatggtgaaaggaattggaagcttgtgcagaagaacactggcctcttgaggtgtggcaagagttgccgtctctagtggatgaaccatctgagacctaacctaaagaagggggctttcagcaaggaagaagagaataaaattattaatcttcatcgcaaaatagggaataagtggtcttggatggctgccgatataagttcaccttgtagttcattgttttttcttttgctctcagaatatatatctcttgaaaccgtttataaaagtgttgttctttaatagtttttgcatcacaagtatgtttggtgacctttacatggaggggaggtgcgggggatattaatatttgtagttcatccattggtaaagttatttaatttaaagttgggtagtttttttttccaattgcattacaagtatgttttgcaaccttcacatggaggtatgggtattattaatatttgtagttcaactgttggtgaagttattttctttaactaaacgaatgttatccatttcatttatttcaattaatatttggtagtttttgcattaccagtttatcctaaaatatgattatcatcacaaatcaaatcaaccctaataagcatatataaatattgtcaaagtcccatccttgaaattatcttaaaaatgtagcctatttttgcttgtatagcttaggggttgctatttaaactaaactgctagtatcttttcattgcacttgcattcatcggcctagtttagttctactgaaaataaggagccgtgggacaagctaagttaaagtgaaacttggggtctagctttatgcatataactatcttagttgttgttttagaacattgttactgttatatgcattgttctatccattatcattgttattaacttgaccacatgttctcaattgccagggcgtactgataatgaaataaagaactactggaacactcgaataaagaaatgcaagaacaatcgttggcttttatatcctgctaatgtatgcaacgatgctttgaatgaagatcaatatgggtctgttgaccccagtgttagggagaagctaaccaataatcaactagaagatactactagtatgtattctgcaccccagttttcatatgcttccatcagtaatatacttgataggagacttgcatcaaaagattatgactccatagaagatcaaagaaaccgaatagaagttgcagcagaatatgagatttcacttcctgtgttgaaaacaaccaacaatgacatatttccatcaggtgagctatcccctaaactactctgagaagttcacataagcttttggtattgactttgtatcactttgtgactaactctaatgataagaccatgccatcttttgcagcctctatctttgccaaccatggcatttcaaatggcaatctctctgctttgtccacaactgatgctttgcagatggagctccctttaatccaatttgatccaaacaaccagttcatttactcaagggattatgcgacgcacctaacaaacttagctttattaaatgatcaagcagaagaattactaaatcatattgatgtattgaactatgtggtgatgaaaaaagagctttctggagggagtttgagtcccactattaatatgccatgtaaagcaacggcatattcttcagaactccctttatgcaagggatatcgggaacaagatcttgatttttacacacaatagtccagtatcgttgaaagagcttcatagctttgatctttctttcggttcgtatagtttacttatttcatcttttacttacatagtagtttagctgttgatttgttgatatctttttgaagcacatacctccatgactccctccaatgagctggtggtgccacggtatgaaggagatgttccacctcttcaagatgatttcacaccatatctctatttgaatggtgccaatctatccatcttcgaagacataaagtgaattgtttctggaaaacaagttggatactaaaggtgaacttgtgatgacatgttatgtttcataaaacctgcttatggttgaaatcatcgttttctaaaaatattcgttcttgtaatttcaggtaattgacgtcagattgtcatgagttgatgccctcttggacaaactcatcatgaaaccaagcattttattccatgaagctcatgaagacgatcgagccagtcgttgctatctctcttataaggatttccagtttggatattgccgtactctgttacttttcttcatgtcgaatttaccatgcgtgctacgttgaatttcatctgttgttgtgtgtgttaaactatcgaattcaaaagagtttgctgcaacacgttgcaacgttgtgccaccgaatgcagagaccgttctatttcatgttgcgtataatgtttgatttggttgcatttgcatctggttggtgtttctctgacggcttgccctgttcgacataccgtcagatgtttaaataagttttaattatttaaaattgaaacataaatttatattttaagtaactttgatatagaatattttcatataaaaaatggtatcatttaacacttagagaaacatgttaaccaatgaaacttacttcctcggtcccacaataagttcacttttagctctttccatttatctcacaataagtttatttttaaagctctttccatttatctcacaataagttcacagtaagttcatttgtaaagcaatcattacatcagaatttgtgaaattagagaataattatattataagtagataaagtgagaaatagttaagttgagatttgataaaggaatattattatagttttttttctttgtattggtatctaggagtcattgtggctttgaaaacgtcgctaaccttggtgtcgtcgcagactcactgaaactctgtgaaagtgaatcgatgagacgaaccaactccaaaaccaaaacccgcaccacccttgcgtaagcgccgcgccacctcatcaccccacccacggaatactcgtgctcgcgccgcgccgccacccccacaactccccgctccaccattgccgggggaggcgatctcccatctccatctcccatctcgcatccacgacgaactctccttcccatcgtctatcttccgtcgcggagggtggcagtgaccatttctggcgatcttcgggagggcggaggtttctcccggctccggcgacacttgactcgagagcccaccgctccgtcaccctgcgtttttggtcaggtaaaaaatggctttaggatcaccggtgtgttgcttttttctttttgttatgtttaatggtttgattggtgaattgctgggaatagtcttatgagattttagcagatctgttttttgtgggaaaagttggaaaatttgaggtcatttcaatttactttcctggaattaacaattaaacaggtgagaatggaaggttcccctccttggaacctccttattggtatcctcctttattttttttaggttaaattcttgttttttaacatcataccattgcatttcatttgccttcttttccaatataggttctataacggttccaacgacaagctttcctcgtcattcaaactggcccaccgatctcctattatcccatggctaaggtggtgtcattgtgctaacaccgcaccatcaatctctgtaaggtgggaacacctccaccctctcgctgtttggagtagttctttcccttctttcatctagctacgactttgtttttcttttcttttttcttcccctgggcataggcttgtctggacgattgcgtcgtgtaataaaaagaactctttctttctaatatattgatgtgctatccttttacgcttccaaaaaaagtaaggtgggaacacttcccaccttctgtagatttgtcgactttccaccttctgtagatccgtcgagacacgaattatagagcaaatcaaaggtcagaattcacgtgattctgtccatcatcactgactgatgtatagcatttccaaaaattggattctaacagggcctcttaaaaaaagtcatgtattcgggaaaataacgaaaaacatagcatcatgggtgtactgatgaatcttttagctgaggcgtcagggaaagctcatgaattatgctctgacgactcttttagctgaggcagggatatatggaagttgggcttgtcagaccgacactatctaactactttaccgctgacgatcaaatggctaaccaagcacgtgtgaacaaaaaagctacgagtgtctttttttcccctttccaatcgggtgtgatcgtaattttacaaagctgaagcatgattaatgttactgtaccttttattttgttgtgaaattgatgtatttttttgctgatttgagttgaacttgggatgaaagtgttggtgagaaattaagcggacaattttttttttcaaaaaaactggttaattaaaaagtactaccaaattaattccagttcaatgttcctgcaatccgagtaggaagcggtcgatcgacagcagaatctgattctacgccaagttgccgatcccccgaacagcgaagagagagagagagagagagagagagagagagagagagagagagaggataatgacaaacagatcggagtgaatgctcacattctgtgttgcctggcagggagagcttggcatcttcctgcgggcaattcgggcagaacggcgaccgaggcaaaaaaaaaaaacaacaaagccagcgccagtgaaccaaaccggacctcgtcgggctccgcgccgcatgggctctcgctgcgtcgatgtcgcgggagcggacactgccatcctgcgtacttgtacgagtaggtgcagcaagtacgtataggcgcgcatgccgcggcggacgccagcagctgctgcggtccacactactcgacgactctcgcgactgccgttgttctcgccgtcgtcgacatgggagagggcggaagcagcagcagccgaccgggccggcgtcgcggctggggctcccatccttgtcgtatactcgtctgcggtggcttgtgccagcgcgcggcttctgctggggcggcacgctcgcccctgcacggctgcaccggtttacctgtctgtcgctggaagtttggtgatgattttgaaccccttggaccaagtgagcgacaaacgaccggcccaatcgtatcgtcggctaataagcgaaacggcatagaagtatttgcaaataaaaaataatttataaataaaacttttatatatgtgttcttagcgattcagaagtataggctgaaaaataaacttcaatgaaaaaaaccctaaaatcaactccaaatttaagattgcaaattcaaatttt

SEQ ID NO: 736 - DNA, 14371 bp, Oryza sativa
gtgcagctatcgccgcaactgcctccactgtaagaacgctggtagctgggataatggaaggacacggtgcgatcaggcaggtggttttcctccattttcttcgtaccttgatctcctgatgatccattgatcggtcttgacgacgatggatagaaaggaagctcgaggcgttgatgctgtgcagcgagtaggggcagggatggttgccgaagcttttgaccaacacgtgaagaaaccggcggttcatcgtcgccggaaataattccggccggcggcggtagcagatcgccggacggagagagatcgatcggcgcagctagcgcaggcggcggctggctgcgcggactcgacgcactctagggttttgccaatggacaggccgaatcgtctgggccggcccaattggccgaaaactgcatgttggtcggcctgcggttgagtcactcctgccgtgtgtgccccccaacgtttatccccacatgggccggcccatattgcaagaaaatatgtagcgtaaatcacgactatagaaaatgtgaaaattaccgttggttaaaaaatagacgtctcatatttatccatgtactgcctgtaaaatttttactaataatttaatatagtagtaaaagttttactgatgtgaacagccttagacacctattttaatccaatgatagtttagcattacatatatagtttgtatcacatatagggcaggttcactttgatgtcattttcgaccataccttctttttttttgcaaagttgtcaaaaaaatgttaccgtttagtttgttgctaaatttgatcaatacataagaaatcctgccaaaatttggtaaggtttattttggctataatctgaacatgctcatattctcatatatctctactaattataaaagcacagttttactgacaaaggcaggaggtggtcggctccttttgtgtgtacgtaaccatcgtagaatcctgttcttgttctcagttcatccacccacctagtcaatcaattactccctccgtttcacaatgtaagtcattctagcatttttcacattcatattgatattaataaatcatcaatatgaatataggaaatactagaatgacttacattgcgaaacagaggaagtattatataggtctgactcgttgtaaagcaagaacatattactaattgagggaaaaggccaaatcgtttccctgttcaggtgaggttaacttaaaggtagcaattaggatgcgtgcatcatcaggtgcatgtgcgattgtgcatgcacggaacgttgggtacagcgaatcgagcccctgcacgcggcgtacgtacgcaggcgagtccattgcatgcacatgcatgcatgcatgaacaacaatggattatggatcaaagcgatcgaatatatggccggccatggtcccgatcaagagagcgccgacgcgcccgatcgtgctgctcatgcatcgatctactgctatatatagtacgtacaccaggaccagtactccagtagcatatgtttcttttttccgtgcacggcctttttcctcgacggggagctacccgtgcatgctgaaacagtaaatcgaccatgcataataaatgaaacgcaacgctattgtaggttgaaaaaaaaggacaaaatcatatactccctttgccctacaataagtcattgtagcattggatattacactatctagctgtataacgaatatagacagctttctgtacagattcattgtagtatgtcagatccaattttagattgttagatttccctagtagctgtcaattaacacatgtttgtaattaaactagtaatgtatccatactctgcaacgtgtcagatctatataactaaaagttgactaggatgttagattgaggataaggcaggagctaagccttatataactgggattgttgggtgagtgaattaagaagaaagtgctggatactataatggttacgcgacctccatggtgagaaaggaataggaggatgaagaatgtgcttttaaaggagcattgatgttaatactatactacatcttcatggagcacaactttcgttttaacttgtgatgatgtgcaactagcaagtagctagaaacatactatgacttgtgtaaagaaacagctgtggacaaaaccaacactagtagatggatcagctatctccgttctcatccggctccaccacactagtacgtggctgatccccctgttttacactccaacaaggcaataatgcgtcatccgtggaccatctggtacacgccaagtctcttctggtccacgccaaagtaaagtctcttcgctcaacatatatacgtgaaccatgcatcagagccgaatgcttcttgtgggggatcgatcgatatgatcaggccggccggccggcgctaatccatcaatcacgactcatcatcaatcagttacagctgctgctgctgctgctgctgcttcgcacgtcaccctggcctctcggcctactgctacatatgagtggatcgagtaccaatcacacgcatgcatgcatcgatctgatctgatctggcgatgatgatctctacctggttcgctcctgttccgtgcacttgcctccctcccccctcgaccccccttgatatcggcttcccaggggtgttagattcacatgtataaagttttagcgtatcacattagatattatataaagtgtcgcatgaagtgtttgggcactaataaaaaaattatttacagaatccgtcagtaaaccgcgagacgaatttattaaacctaattaatccgttattggcaaatgtttactgtagcgccacgttatcaaattaatcacaatctatataattaattatttttagtatatatttaatactttatacaggtgttcaaatgttgtaaaatttttatgtgggaaagcctcacttctcatcagtttctcaccaggcggccgggcgggacgagcgaggggacccaggcgacgcgacacgggcacgagcgcgcgacaagggtagtaggacaagaggcgacacgtcagtcgcacgtacatctgcctccccctgcgtggcccggccctctcttgcacagttccatatgctaaactcttttagttctaaaataattctttaaactttcaacttttttatcacatattaaaacttttctacacacataaatttctaacttttccgtcatatcattctaatttttaccaaacttttaattttggtgtaaattaaacgcagcctttaagtctcctttggacgacttcgctgcttgattcatgcatgccgtcccccctggcctctcgagacctcttggctcttttgctcttgcatgcatgtacagcgtgtacagtgtacgcatacacacgcaatacgcgtgcatatatacgtgatgagactaggtacaggtaatgtatatgtacaattaatgtgtatgcaatgcgacagtgtacatgtcgtttgtgccaaccatacactgtaatgtggcgcttaattcactctttgagagatacggagtacagctcattgatatatatatatatatatatatatatatatatatatatatatatatatatatatatatatacatgtttgatcacagttttatatcagaatatatatcttcatgaagtaataaatttgtacaattaaaaagtgtgtagtttttcaagataaatatacatgtaccatgcatcttttatgtttttaaactatataaggcccccgttcgatagggaggataggccggggtgagcttattataagctacacataaaacgaagtgagtgattagggtataattaattgagtattaactattataagattaaaaataaatttatttgattttctaaagaaactttgacatgaagagtttttgaaaactgtatcattgagcggttcagtaagtgtgcttaagatatacagtataaacgagaaagtagtcccctagagtagattaattaattagaacggggcaaagtaatttatagccgtacaaatcaacgatatttaaatcttatatatatccaaaccgtaatgatttgtgaccgaaacgagtactacctccgtcctaaattagtgatcactttaacatttttcttgtaacgtttgaccatttattttatttgaaaattttatgtaaatataaaaaataataagccatacattaaattacttttgataataaaacaaatcataaacaaaataaataataattttataatttttagaatacgacgaataataaaaattacaaataaaaacttaaaaagatagatattttgggacggaggaagtacatgttggttgaaacggagctttcttggctagctgcaggccaagagcttgcgtctaaccgcatatgtccccggctcgaatggctagctaaactagctagctgcttccagcaatccgacacaaccaactccaagcaatcgatcacgaggtccctgctgatctcgttggcgcgatctccgaggcaagtgtatatggttgtgtttagatctaaagtttggattcaaacttcagtccttttacatcacatcatcttcaatttcaaccaaaatttaaactttgtgctgaactaaagacagcctacgtcatcagctccgttcaaagaaacccatgcagctgttccagaggaagatattcgtagtcgtagtagcagcaacagcaatttttacagcaaaattaatgatacagtatgattcgattcggtacgaacagagaaaccatttccccatgtttcaaacgggcaacagtgtacgtacgtcatcccggtagatcgatgatatcatatccatgcttgcacatgcatgttaaaaaaaactgatactacagacttattattctatccatttgcatgcgtttgattcaagatgtgggatgggttggtttggatcaaactatttttcattttatttggtttgagaataagggaattaattggatgattcttgagatcatgaggcctggtggggattggaggggaattaagggggaataactcacaccaaaataattgtggaataattttcctccaatcccttcttctcaaggattaattaaacatgacctaaaagagaatattttcataaagtctgggttgccctttatccttaaaaaaaaactaacggactaattcaacttacttttttttcctcttgataacatgctggacatctttaaaaaaatagaactattccatttcttatgccaaacgaatccaaaaacaaggatgagtacgttcaactttatctcacctcgtcacaaaccaaaacacatgagattattctatttatctactgttccggcaaaaacgataatgtattgtatactagctagtacgttcacgcatgcactgatatgcacacaactccaactcctgtagtgtggtagctaggaggaatcgttcactgtttcgtacatttgttatttgcgcgcacacactgttcttacggtgcactgcacatacgcacgcatgggggcgagcaacccttgtcggtcgatcgacgaacaaaaactgttcgtcatcactagtacgagtccagcctgccaacatgcaggcatgcagctgccgccatggcgttgatacgatgatgacgacgacgacgacgacatatgttgtcacgttgaaggccactacaacaaaacagtttatttttcgagatttagagggagagatgctgctccaacaatactttaagaaaaaaaatgagcatgttgaggattgaacacggaccggaccttggttgaaactataaaccctttattaaatcgctatcaagtacatctttacaataaaacggtaaataagggatgatcctatagatacctgaaactttagacctggggtttatcaaaccgccggggctggggttagcaaacagtatgaaacagtgtaaaatttatcaaaattttaaattatttttaaaatttacttaaatttaaggaggtttgtgtagttttctttttaccgtgccccacggtaaatgtggttaccggcggctgtgtaaaccttgatgccaatagagctttacgtggtagagctgctctccgttcacctttgtgaactactccaacaaaggacgacgtacgcttggatttggatgcatgtatatacttgatccacagcgacgtgtactatactacagaagcatgcatgcatgctgttgcacgtacgtatactgtcggctcaatcttgcgtcaagtcgatcagcatgcagctgttgattgatcacaggtgctggctggctagcttgtcacgtcaagcacaaatgttgagctgctatagctggtgtacgtggtgcgtttcatcgatcgacacaaaacttaatatgcgttcatgaacgcacgcatggttgtacatcttccattcagctcatatattactgatctctctgtttctaacatatactagcattaattgttaagttctttgaaaaaaaaactaaggtaacaggaaatattattttttttcacttcggtagtcgaatttcgaatttcaaattacttagattttcttctgaagcatctcattggctaaaaatatatagatttccgtgcattttaaaatcagtgctaagaaatcctttgtacatcaagatgaagaaggcatactttattcgtttcaaaataaaccaacctcgtattacaatgtgtcacatgccaacagcggtgaacttagaaaaaaataagggtgcctagtacatatatactaataagctagtaagtacttgaataacactacaattaacgtagcctaatacaaataaaaatggacaagttatatatccagtgtctgatgcatgcaccggggacgaggtagccgccgtgttttttttaataaattggtcatttttaaaaacttatttcgaaactagtccctataaaaaacttcaaccaaaaatagaccgtagactcggcgctgtggaccttagtgctgagctataacgtcttagcgccaggcgctaagctctaatccgaggtggcatgaattttctgagtcatcgaagcttagcactaagtaacttggtgctgaggtctctacaatttaaattaatgcggaggcatttcaagtaacatctccctgatagcccaatgggagtagatttcttctataaccgtggggagcaggtttcgatccccatctctcctaattttttttcttttttagttttccctttttcttttctctctcacacttttttttagttttccctttttcttttctctctcactctttattaatatgttttttcttttttttctctcgttttatttttctatctttatttatttttagttttccctttttcttctctctctcattctttattaatatgctttttcttttttttctcacgttttctttttctatctttatttattttttccttttttctcgtaatactatcttcaaaatatatgtttaatacacaactttttttgaatttgaaaaaaaatattaaagtggtactactatattatatggcaaatgagaatttaaactgaaattttaaatcaaatttaaaataaaacaaattatagaaattcgaaaggagcataagagtgactagtcaagagaacaaaaggagggatatcaggattcaaacccagcaccctacgactcacagcctaagacatcaaccaccacgctatcacagccttgcttctatatgttgcttgcgcgttatttaaatcgtagggaccttagtgccaaataacttggcgctgagctctgatgagtcagcaaatttatgccacctcagattagagcttagcaccaatgacgttggtgctgagacattataacccagcgccaaggttcatggcgctgagtctacggcctatttttagttgatgtttttttgcagggactagttacgaaataaatttttgaaaatgatcaatttgttaaaaaaacggctgccgtattttttttaataaattggtccttttcaaaaactttgcagaaacgcccctacgatcgagccagtggatttctatactagtggatcagttgactggtatagaatggaaccaattaatataatcctagctagtcgaatgtaggaacatccttttcttccttccaaaattgtgatgtgcaaagcttttacacattcgaaaaaaaaaagggaacatgatcgccaaagctgtgtatacacacacagtatagtaaataaccttaagaggggtatcaggctaagggtacagacgtagagtagcatgtaacatactcgtatatatatggtacaaccatagtaccatacccttttcctttcttttgctaggagtacatggaataaggcctggttagacggcactacagttgcaggctattcaggataagaagggtgaggagactatagaggcaaaagggcccaacagggttgcaggtgatttgatgttggggagaaatgcgttttcaaatcgaggctgtacgcttgccactgccacagtacctagtctccttttttgaaactcaatgttgatcaacagaaaattttccagaaattctacgggcaatgccttccaaacaagccggcctcaaaaaccctgcatgcagcgacacactgttcagagaagccctgttggaagtggagtgtgctctcttaacttcgttttgttttttcaactgttacaaaactgtcacaaaggtacacattttatactatgtgtcaagctacaagaaaacctacattctgtcctggtaaaaaaacatactcctaacattgttgagcatctgatcaaattatgcagtacattactgaatttgcttccctgaagaattgcagtggccagtgtgtatgtgttttcagatttggtttgatttctctgttcttgagctagagctaaactagttgagtcagtagaggcatggtgcctctgccccagccttagacaggaaagcatatgaatgaatggagtagtaatggccattggaatgttgcctatggatgcgaaaagcagaggctagttattggaggataaggacatgcatctgctcaaagtaatgctaggtcaaggactcctgccacgcctacatgggagagttgttgaatgcagcgtctatgattgatgctcaatgcataggagtatcaaatttatgcaccatacactgcaatttatacaaagatacacttttttcatggttggtttggttcatctccttatcggcatgttttggtagcaaaataaggatccgaaaaaacgcattcatactgctggattttactgagtcaagaaaaaaaatcacttccgagagtcggttattgtgtcaatggtttaactactccgttcgtttcataatatatggtgtttttgctttgtttgaccaagtttacattcttataatatattttgaagaagttttcgacttagattaaaaccaaaacatctgacattctgaaaaacggaaggattacgtaatattcttgttcttcttgatatatagatcagagatagtatatactcgctccctcccgaaaaaaaactaatctaggatgggatttaacctctcctagttatctagattaattgtactaagaggagtcatatcttcttctaggttgggttttttttgggaccgagagagtatgtactagaaaaataggagtatatgattttataaatgcagggtatatataggagtatgtatttgtggattgtgagatgcgttctttggctgaaagcatcagaattcagaagctgcagagggagtaaagggaaggtggtggatgcagaggggagggcgttggaaacatcctctttgccaggcgaaataatgaggccatccatttcaaatgttgcattggctagctgcctagtagcacacagaagagaagaagatgccaccgttgggtagagtactctccccctaccctgcggcgcgagacgcaatataaaaaatactgaccccggttccttcggatctgagcgcagcattcatggcgatcgatcgatccatgcacaccggtgtggatggaatgtgtatcagaggaggagaccacgcatgtctgcacatcgttttgtgtgcttcgtcgtactgtaccactactgttcattcctactgtactctctcctcctcctactcgtatacaaagcctcaactatggccctgtttaattagatcacaccttaaattttgtcggcatatcacatcgaacgtttaacacctataagaaatattaaatataggcttaaaaaataactaattgcatagattgcgactaatttacgagacgaatcttttaagcctaattgctccatgatttgacaatgtgttgctacagtaaacatttgctaatgatggattaattaggcttaaaaaatccgtctcgcggtttactgacggattctgtaattagttttttattagtgcccgaataccccatacgataccctatataatatccgatgtgacatgctaaaactttacacccctggatctaaacaccctctatcattgcatatgctactgaaactaattagtactgctactcctacatctactataattaacaagatgctgctaataataactgaaactcatgatcaaggcatgcgatttgcctgcctgccagccatgtgatgcgagtacactccggtatgtgactgaggtaacatagtacagtactctccgtctctccctcgcaatgtgatcgagactttttgttagattctactgctagcattgcgaacaaaaggcagctatagctcctagtactccatttacgcccgacgcagctgcaggaagctaccacgaatgtactactatgccagtatgcctgatgcaaacgatgcattgaatggtggagtatacggctcctccagctagcactagcaacatgctcctagttatagaggctgtgtttaccctaaaacttcactgtttaaaacttcactgtttgcctgctcaaacctactcctacatatttctggcaacctagatgagatgatcaaccgatcgatcaggaagaagaagaagacggccgggggaccatatagacgatgcagagtcctacttttttttctctcataaaaaaccaacatattatcggataagacatatatatcatatcctagtaatataaatttggatatccatctatcttgattcatattaataggatacatatcaaattcgtttttatgggacggaggtgcgaagaagacgtacgtacggggggccctcctgcgcggttgcgagacgcatgcatggtgcatcggcgcgttgcagatctgttgcagtggctatccttaattagcttatcccttctggtctctgcgacgcaagccgatcgagccagcgatctgtagtgtgtagggatggaggcaggacggaaggagaagcagagagaagggcgtcgagaggatggtggggatcagagtagcgttgtgtgtgtgcagcctcgtgttttcgttatgcaatgcaaaaatcccctgctgccgcctgcagcctcgtgctgtgtctcctcttctcctcgccccccttcacgtgcagtatatcgatccatcgatggctttgtgattaacggccccgtttttgtcagggtgatgaaaatctcagtcagggcgagagaatccatacgctaatatgcaaccaaaaactattactaatagtcgcagagtcacaggctgaaattacgctgtgtcacctgctcgctgcttatccgtacacaatgcatgcacggctacggttcaagttcacgtcttgtttgaatagcttaaaaatagaattttaagaagcaggtactacctctgtcccaatttaaatgttgttgtggatttctatgttaaatgtttgactatccatcttattttaaaaaagtattaaaaagttaaaaatttagtcacgcataaagtactatttatgttttatcatctaataacaataagaaagtactataatcattattttttttcaaataagataaatggtcaaacattgaacataaacaatgcaaaaatgtggtcgttctagaacggaggtagtatttagtactacctccatttcaaaatataagatacaaccacctttaacctaaaaattaaaaaacaattattatcatcttttagtttggatcaccctaataaatataatacatataatagaattaaagatctctacggtgaaggatttagaaaaagaatagtttagtggagaggaggtgctaattaattgcatgcatacatgcagtccttatattatgaaacatcttgtcgagaaatgagcctctctagcgggtgatcgagagatccccttttgtgagttcggccgggggaaagggcacgctgatcgagatcgagtatccgcttcgagttctccgagaccgcgcatgggagccaagattatacaggttcgggccgcttggagcgtaataccctactcctgtgcgtgggatttatgattgagtgttacaaaggttcctaaacaccaaggagcacactcgctcttcttcctctagggtttaggctcactgagcgtcatcctttttctcggcgggcaaagtcctccttttatagtctaaggggataccacacgcaccgcctctacctactcctccacgggagggggacccactccgcttagaccggatcacgattcgtgccttcgcctggaagctaagcagccgtccgtcctcgagtggggcccagcgccgccccccgccgacacgggggacacccttgtcattccctcttaaatgaatggagacttgtggcagtccttctcacgtggagggggctttagatgatgattcgatgggacggggcatacctacccctactccgccgggtacagggtggaacgtgggggtatcaccgcccgtccaatcagacgtgaccggcgacaggccggtcacagtttggtcccgcctgattgacgtgggtcaatcatgcagtgccgcacgtacgcccttgtcgcattagatgcagtgagggacggttggggcgccgcgcattgatggcagctcagcctgagtctccgtcccactcgctcccctcgccacgtagcggttgggcgagggcctcggggcgaggcagcgcgagggcccgaggggcgtgacgtagcaccccgaggccccttggttgcctctgcgtcgcccgagatgtggggggagagccaggctgtagggccgcgtggcttgatgggaaggtgactcccccatacttagcatacccccgggcccatatcaccgacatctgaaaaaataattgtgccttataatccctccgtcccaaaataagtgtagttttgtactattcacgttcaacgttacgtcttatttgaaaatttttatgattagtatttttattgttgttagatgataaaacatgaatagtactttatgtgtaactaaatatttttaattttttcacaaaatttttaaataagacggacggtcaaacgttgggtatggatatccacggctgcacttattttagaacggagatagtattataaaatggagggagtagccagcttctgataattgaagaaagctcgattggtttcttagtttctagattttaattcattttctagattctataaccacatctttttagaatttgaacgaaagttaaaactgaactatttacaaaatcttatgattttgaaagaaactgcagctaacataaactctcctaagagcaagtttaataatatagcccactactagctccaaaatttaaatcatcatctatagtcaatctaatagctcactcatataatagttagctgtagaaatatactgcatcattaacatggtttattggacctcgtgttacagctagctataaatccgtagcccgtttttgctatctctcctccacacaaacataaatctgatgtggtaacttgtatagcccgtttatgtcatcttattgtacccgctccaaacgcgtactcaatggttgaatgtcacctagctagcacgtgacccgccttttccccgcacgtccccttgcctgcctgcggcccagccagtgcgcgtacgcgtacacacctccccctccccgtttcaaaatcgcggcgtctcccgctatatataacgccactgcctcgccgccgctgctaccacctctcgccgtgcgactggctgagctactggtggtagctgccaatggcgatggatcatcgtggtggtggtggtggtggtgggaggagcagcagccggctgcgggacaggctggcgaggatgttccggccgggcgcgctgctccggtcgacgtgcaacaaccacgccaccgcgtcgacgtcctcgtcatcgtcgtcggcggcggcggcggcgggtggggtggtgacggcgtccgcgtgctcgtccagcagggcgctgctcgccgcggacg

SEQ ID NO: 737 - DNA, 11126 bp, Oryza sativa
  unsure (1)..(11126): unsure at all n locations
cgatcgatcattctgcgggcactgatccccatcaacgtcggcaaaacaccatgatgtgattaagtgatgatgagctcattgtgccggctagtttagctacagagataatttgaaaaaggaggtccaattaattacccccttaaatatataaaagcctattaagttgggtattggtttagccccttaggctttgttgtttgaagtaaataaccctaagcgtttttgtgagctgtccttttgcttgcagggcatgctgactcaacgttttttttttcaccatgtcaacacactagtcaaaccagtacatggagtaataaaataaaccagtactccatgtacgtacatagagtaataaaattgttcatatatatttttcttgttctgttagtggtgaaaacatcatggtagaatcatcatgtgcacatgccaacatggtagtaggaccattaatgagttcgtgagccacataggaaaaaaccatccaataatttatactccctccatccacaaaagttacatttattacttttatcacaagaccaagaagaaattaaatcatcttgaatgttacaaaaccaaagagtgaaagcaatcaatgagaatacatgagacttcttggattctaatcaaatatttaatttatctcttcatttaagtcttaaatgtataaagactacaaatagaaacaatttatttggaaaaactcaaatgtgaaataggtgtaacttttgtggatggaaggagtatgattcaggggttatgtggaccaattagcatgttcaaaggctcaatacctaatagttcaaaattttaggcggactctcgagtatttttttcttcaaaatgttgttaatgagattatgcttgatatatttcactattacacttatgcctatatctgaacacaatacctaaaaatatcttattttttatggtattagaagtaatggttaaccactatttcttctcagtaaaagtacaaggttttaaggttgtgaaccactaggtagtatactaatatacttttttccctaaaaacaaatcggctttcctaagatgccaattggtctaagctttatatctatcctatcactctcttgcttaaattaacttccttccttaactcagatctaaatggcttcctttggatcgacatgaacttaggcgtaagtcaaagcacgggcatggaaaagggattatatggcgtgctgggctggataaaagaagcgactacgcctacaatgagaatagcgggactcccactagccgacagagaattcccagccaaaatgaaattggacttctagcaatagcagaaatatcagtagaacctttcctactggagaataactagaagtttctgggtcgagcaattgagggaacgagtaagatatgtttgtcagtctacttgaaactcgatctttcgggaattagttcacttgccattcaatctcttttccaagttcatgtcttagaaggagtacacaatctccttttctatccttgtgagaagcggaacactgcctccctctcaacgatgtcactagatagggacacacatttctgccaggcgtttgttctcattcctggccaaccgtgccatgaagagtcgagcaagagcaatcgcagctttatctctgcctttaatgctcccattttagttatccataattttgttacggcgacgtgacaatgtattccttgaatatgttacttactaaccttacttttatgaatcatgcttactgcaaaactaatgatccaaaataaccctaggagctgcagggaaactattttgattcctcgagaagatgtccttttgttgtttgcatgtcactcaaatggttatgaaatttttttgagaagatgtattaacatgtgatatatcaccccacaaacatgcaagttcaaattcaacttctacgtctcgcaacgaaaaaaacaaatttgactgtgaatatacattgattagcttagtttattttgaccaagaaaattacattagcataataatacgtgtgtaacacatattatatttccccccttttaacccgatacctacatgcatcaaattcgatacgtgagtatcagactcgatacctgagtatcaaagctgatacctatagatgtcagatctagtatctgcgtatgagaactgatacctatagatatcagatccggtacctgagtatcaaacctgatatctatagatatctgacatggtactcatatgtattactacctagtatttgggtatcatgtgtgatacaatctgatacctgagtactatcacgtatgatacagacatgtacttatatggtacctggtacttgcgaggcatatataaatcagacatcgtaggagcccaacgtgcactagtcaatcttagtaccagacataatagtgtatcatcaaagattatcaagactaaaatagtctttttatttttcacagcctcgctccatggctcgggaggcatatatatttccttgctaagacattcggccatgcctgcccaagctcaattaatttaccacaactcaaagtgtccaactaagtagctctctcgagacctgtcattgagacccaattaatatgcacatgcttagatcggtcaagttggtacatttgtactagtgggaacacggaacatcgcacgtttggcgtggagcggcatatgcgacttgggttcggaaatggtagctgggagcgacggagcgctagacgcgggggagacgatgtcagcacttatctctttgaaacggaaccccgttgtccagacattctctaaataaacacgctgtaaatctcgtcaattatttcataagaagaaccgagtgattaaccgaacaaggtcttaaacctcccggcttcacgctgtcgcgataatactttacctagcacagtcacgcacgcgcgcgcacccccggcgcggcgagttccgtttcgcctcttcgctcctctcccggccactgttcatgcgtgtcagcgtttgtcccgcaacgctcggggaccgccacttccccccgtcgcgcgccaacttgccgcgcccgcgcgcggaacggaaccacgtacgctcgatcgaatgctcgatacccccgcaagctaagctttccgatctctcccaaaaccaatcgtttctggccaaagagattccgccactccagatgtacgcagcgcatgtgactgcatgccgcgcgactgcgacgaccgagctagtaccggcggcggcgaaggcgatgttcaggtggtagtgaccaggtcagcttatcgctttggcacgcaaatggcaatcgctggcctatccacgaattactgacagtagtgaccatgagtatgacatgcagcagcagtagtagttcgctcgattcggttgatatatatgcagctcgctgtcacttcagaatcgacggacttgtcgaccaatcgatctctcacgcaaatgtgcgtgcgtccgttcgtagtcgcgagctacaagccatttgggcgtcagtagtgccgatctcaatcgggtagataaagttagcggagccatcgattcgcttattcacagaataagtgaaagcgaatatgcgaaacacatatttataaatgagaaataatttataaataaaacttttatatacgtgttcttaacaatataaaagtaaaggctaaaaaaataaacttttatgagaaaaaaactcaaaatcagttttaaatttaagattaaaaatttaaaatttaactgaaaaatataaacataaacgaaaagatgaagaccgatctgagagccgggggttctttgctgaaaaggcatagcaggtggcgaatggatagatacataggtagtaaatcatgcagcatacgtgctcgattggtgtacagtggcaacggcgtgtgtgtagttcgcccacgacggttcaaaggctggcttgatattttttccgggtgtagttggattggtaggacaaattagttgcactctggttttctgatcttccgtggaacagaacagagcaattgtttttggtgctacttactcatggtttacaatatcgaggatagccgcttggttatcgccataacagttgatatcagaggacaccatatttaaaaacattttgatattttgaacaggttaaaaaagtttcatactagaatttatttttttggtaaacattattcaaaattcatcgattttagttgataggtagttatcatggttgttgacaaaatcatggagtaacaatttcctgtgcttacgttgttagaaactgttagtgatgtaccctagaggattgtatcacatactatgtttacatatttatccgacattgttccttgaaatagataactccttattggttaatgaatatgtgattctttcatgagactctttatgttgtttgttactatttctaaaggatccctgatcaaatatcatatgtggaacaaatatgtttatatgatcagcacatgtattaattgatgatcatgtctcatggatcatggtatagtgataccaaattaataatgtggatacatgttggtaaacatgttgttggatagacccaacatgagacactgcaagagccatatgtgttgtgtcatcagtgatctcattgagtgttggtgttgaatccttagacctgagattattatggttctcaacatgtgtagtagcttacttagggactgctaaatactactccgtaattgggtagttataaaagtagttttcaggtatgttatgaaacatgtagtgagatatgaataatcaagatgagatttgccccttctatggagagatatctctgggtccctcgatgttgtagattatagaagtgcatggccatgccaagggtgattgaggagtcaatcacaagttatataatctatcaacaggttcgagtgaagattgagctattagaggatggcacatatctagccttgagcttaatcgatatcatgaggcaaaggggttcatacaagtatacactagaggttcagccgatatgatatttatgtatgcccggtgggtcaatacgttctgctaggagccgctgttgacgcgtggactgaaaaagagttttcgggttacagccgagtatacatgaacctatagggtcgcacgcttaatgggccgaaataaggggattggatggagatctaatatgagcttacttcggatagggatctgaataggagtcctacgggacttggaggcccgagtgatggatcatatatattcgtgaggggtgtgaccggcggaggcattacatcacgtgagaaaccctagccgtcacttccctccccgagcaaaaccctagccgcgcgcgggcactagcaaatctgcgcgtggcgttccgtccctgtacgtgtggataccggtagaggcgccgctggtttgcggtgctgatcagcgtgggagtacggcgaggagaacgcacgaggaggagaaggtcgagccggtgcgatcgactacttctacatcgacgcgcgctacttcgcgagagttccttcgacttctcagcgtcttcttccactgcgcagtgcgtcgagtggtaacgatttatgatctaatacttgcatggttcctggtttacgcgatagaaaattttgatttatgtctatcatagcctacgcgtatcccaacaggcataagtaattgaacttttgtgggattttttctttgtaaacatacttgtcttatatgtataggttattttttcccatgttgcttaattaattgcctggttttccaataacattacggttgtgttcgacactttattttcctatttgtccaacctctacccccttatttttcttgcgcacatttactgaactgctaaatgacactctttttttgcaaaagagtttctatagcaacttattttaaaaagtcatattatatctattttttaattttattttaactaacactcaattaatcatgcactaacagatcaccctgttttgtgtgcagggaagtggagctcctaacctccacctccaaacacagtttaggagtatctagctacattgttctcgaaagagttcctctttgtttatctatttggtgttgcgtcctccaactatgtcacttctttaccgattacctatatttcctcatccaccaaccaccctattttgggtgtctctcccctccgtcgccgttgctcctgcttcatatcccctgatggcattcccctatccactgtaaccactagatagttatgaaaattcttttaataattaatacatatagaaacctaataataaatgcaactgcaaataagactctacttttcataatcaaatgtgatgttttttccttttatttgtagataaaatttgatagttcaggtttgtgtagaacatttaacacacttatcgatttatctacagtaattattttttatgtttttttattaattatttatactgaatacaagaaacatccttgatggcttaaaatagtttcccaactttttatactacttgcactattattgctcgctagagaaaagtgctccggcataaaatgcgctctgtgttggagaatgtataagatcttgatgatgctccagatgtgaaccaagtgcaactaggggctgtttggtttccagggacttattctaagtccctgtcacatcggatgtttggacactaatttgtagtattaaacatacactaattacaaaatacattctataagcttggactaattcgcgagacgaatcttttgagtctaattacgccatgattttgacaatgtgatgctacagtaaacttttgataattatggattaattaggcttaaaaaattcgtctcacggattagctctcatttatgaaattagttttttttattagtccatgtttaatattttaaattagcatccaaacatccgatatgacatgggctaaaatgttttagccccatgtaaacactcctaggtcgctgttgacgatcagacgggactaaaaagcagaaaagcaaccttcactaaaaacaacttccaagaaaagcccatgttagccctcatctatccttttgggttctgctttgcacttatggtacttgacctcaggtcacatcatatattatgcatctaaatttggttgcaatttatgggcatgcatatatattgcaagcatgtcgtgtctactgaacctcgtgattgattgaataagacgtttagatttataagactataatacgttatatctatctaaaatcctttatattttaaaatggagggagtggtatagaataataaccagatttggcacatcacctaaaccacgtgatataaggttatataatgatagctggagtttaaaatttatctaagactacaagggtatcttatcaacattttcatctcaacaaacttatttttcatttattctttttaccggagtacttatctatgtaacaaccatctctgacctcaatcttaagctctttgaaaaaaaaaaatcaaatattgttatatttttggatgaaggagtacgggtattcacctcctctctctccatttacaaatattgtgcactatttgacttctactttttttttactttgaccatcaatatatttttgactggttagactaccattagttttaactattaatacatactatagagtgtatgtatgtcttctttattttcacttttttaaatagttatatatatgtatgaaagacagcgtagatgattatatcttcatacatccatttactgacaagtatctaaacatgctgaaacaaatataacaaacatagcaaaaataagcaatcacgttcatacttgggattaccattttgtttgttaaaaaaaatcaaatttgatcttgcatatatattttatcgagtgatatgtgacacaacaacaatctacgttatgtaatgtttttagaatttattagaacctttttggccatactcaattaaccacgtcacatacaactctattcaatcttttcaattacttcatcgtattatataatcttcgcaggcaggagggagatccgcctgcatcacaacgactgcgacaatcgcaacggcccgcctgcgaaaatgcaaaaaaacgaacaaaaaaaatcgccgcacgcggctcaccgccgccgtcctcccccggccggatctgagaggggaggggagctgccgccatcgtcatcgtcgccgccgccatgctccatgccgtcatcgccccgcgcgtcgtcttcaccgccgccccgcgctttcgtcgccgccgccgctcccgccggcctcccccctccctcctccggccaaatctacgagggagggagggaggggagacgccgccggccgccccgcgccggcggtggaggaggagttggagaggtcaagctggcggagggtggcgtcctggaggtagaagcgagggtgggtggggcagaggacgaggtagacgatgagcgcgatgatgccgacgaggatggcgaggacgacgaggatgccccgcgccgtcgcccccgccggcctcccccctccctcttccggccagatctgggagggagatgggaggggagccgccgcngtcgccccccaccggcctccccctccctcctccggccagatctgagagggaagggggaggggagccgccgccgccgccgctccacgccattgccgccaccgccggcctcccccttccctcctccggccagatctaggaggaaggggggaggggaaccgctgccgccgcccggacttcggccgcacctccttgccgctgctgccctccgccgtcaccgcccgccgccgccgccggaagccgccgccggggagagtagaagtaaggggaggggaggggaggggaggggagaggccggtgaggaagggaggagaggtgtggagcgactcggaggtgtgaggacttagaaaaaaattagggcccgcaaatctatttatattaaagtctatttttgcatgtggatcacttaagcggcgcctgcgaaaatgattttcacaggcgccgcttaagtggtccgcctgcgaaaaaaatctattttggcaagcgggcatcaaatttcaccccgatttatatttttgtaggcggtcattttgctctaagggtcatgtctgcctgcgaaaataaataaggtcctcacgttgggaaaatgctttttctagtagtgatattgccctgaattatttaatgtatatctccaaatatatgttttatagaaaaaaaatattctcatgcattgcatagaccacttgttgtaagctattttaagtttgtatattaaaatatttaaccaatccctataattaaatagattatctactataataatttagtcgtcaaatatctgtttcaaacttgcctgatcaatttatgaattacggattatcatgggcacattttctaaacttataaatagtatatatatgatttaaaaaatcttcatcggcatttattagaattttcaaatcaatttgtaatatttaattcagtcgtttgtgccctcaaataattaattatcataaactcagtatcataaatcatcaatcatctataaagaacaggcccttgcgtccatcgcataattgcaagtatatatacttcaaagttgccattttgaaagcatatgcaaattctagtaaacatccaacacaaattcaatctacattcacatgtcgttggcaaccctcggaggctcgtgtatatgaagcatatattcccagctgaaaaatcaagccaataagcaccgtgcatgtacatatatatgcagacagcaatacatggaatggaattaataatatgcatggtgtcctcctctgagcacaagagcgcaatgatgcagggacggaaccctacgtagctacgtgtgccgagtacacgccaagtgcgcgcgcggctgggtgcagtggcagctagcactacgcagggcgctcggcgatcctgcggcgccgcccgtgccccataagcacaccaccttgttgccatcgacggacagaatctctcttgcatcttgcttgttagaaagtgggaaatgatggagatgagatggaatcgtggcttcagaaaagctaaggagcaagggcttccaggctgatcgatcgatcgatctctattactccctccatttctcgttacaagatgttttaactttggtcaaagttaaactgctttaaattaacgaagtgtatataaaaaaatagtaatatattttcgatccaagataagtttattataaaaatatatttaattattaatttaataaaactgatttgtaatgtaaatattattatatttttctatatatttagttaaatttgaagcagtttgactttgaccaaagtcaaacacatcttataacttaaaacggagggagtagctgataccattggcgcgacagctcaaggctgggccggtgcaagaatatgccttgtctggaatatatgttttcatgagtctcagatgagagacagcgcagacatgcaactggggttagggcataaggtctcggagcccccttttggtgttggacaagatgagaaatgcatctccttcctctgactagctatgctatgagagtgagagggtactttgattgcatgtaggatcgatcgacatcataaaaccaggggttgaacggtatcactgcatatatgctctagtggcctgatttgtggtggtggagtggtcccttgggatcaatacatattggtacagaatgatgacgatataattgaaagcaccatgcatatatgtatgaaaatatcggcattaagaacctgtttggtatagtttcaactctatatatatcctgtagagagacttcatcgtccaaacagtttcagctcctagctgatactgaaatggtgtatgtgggattcatctagaaaggtgatatatatactgaaacatgcattagataatgtttggtattgttgacttaccatatggatttccattggtacccactgaaagtacacattagttaacgcaaaattgagagtaagaaggctataatgtgaaaacaatagaacagaaaatctaccagagcatagattattgcaaatgttgtttgttacaattgacacttacaaaataacatgacaacaattgccaaaatgaaaaaaaaaggaaatgaaatc

SEQ ID NO: 738 - DNA, 9385 bp, Oryza sativa
tgaaatgactagatagcctcatagccatttcccttgcttgtcgcgttcggaaactggttgcaatttttgccacctcctgttcttgtaggatagtaatggcaaaacacaaccacacacagtaatcaaacatgtaactactagaagcttctctgctggatacgcacaattcttgcaagttttgtaggggtagctttggtgagattgcttgcactgatcgctcagcccatttgtgtaatcagggtagatagatccaagagaattaatttctggctggatacttagctgagcaaaaagatgatgggcctgcctctcacatactccctccgtttcacagtataagtcattctagcattttccatattcatattgattttaatgaatttagacatatatatctatctagattcgttaatatcaatatgaatgtggaaaatgctagaatgatttacattgtgaaacggaggaagtatcattcacgtgtttttttttcttttttggagagagaaacatattcacatgtttgcttcagtagttctgtgtagtactcttgccagttgccacctcctcatttcaggctgctcacatggtgtggcctctgcattatgcagctgtgcgtagccaataaaggcagcaacgtacgctgacaatgcttacgtttcgtgtctcttgatgttgccaaacattaggccaaagtccttttttatgatttttttttccaaaattttgtgaagcgagaatcttgttgacctgatggttttttgttgttcaaggatgtcctcaattctttttatttttctgttgcagaatgcaatggtcttccaagtcttcgcgatcctgtcgcggtcgatcgatcaaccgagctccatgtcggagccaccgtcgtacaccagcgtggcgctcgccggcgtcggcaccggggcgctgcagacgctgatcctgtcccccgtcgagctcgtcaagatcaggctgcagctggaggcggccgggcagaagcaccgccggcccggcgaccaccacgggcccgtggacatggcgcgcgacatcctgcggaaggagggcgtccgcggcatataccgcggcctcgcggtgaccgcgctccgggacgcgccggcgcacggcgtgtacttctggacgtacgagtacgcgcgggagcggctgcacccggggtgccgcggccacggcggggagcaggagagcctcgccaccatgctcgtattcggcggcctcgccggcgtcgccagctgggtctgctgctacccgctcgacgtggtgaagtcgcggatgcaggcgcagggctacccgccgaggtaccgtggcatcgccgactgctttcggcggagcgtcagggaggaagggctccccgtgctgtggcgcggcctcggcaccgacgtcgcgcgggcgttcgtcgtcaacggcgccatcttctctgcctacgagctggcactccggttcttggctagcagcagcaacgaccagaggctggtcatggaggagaactgaatcaccgagacggcgagactgcaggggttgtacatagactagtattcattggcagcatttccgaggctcgtagcgtcgcaagaagatgagattttcagagaaagcatcgttgctgcagagttcgtgtagattggcattataggtttgccaaatgatgatgatgatcaatccccaattgtctagggaaaactttttctggtgtactgctattacagatataataacattgtttgagacagtaaagactaaaattaatcttcttgtcttgctgggattccatgtttactctgttgtttttcctaaaaaaaaaagtttactctgttgtgtagtttttttttctcagttcagacaaataaacaaatacccttttgctaattcacatttctaaacccttagaaatatgcttcttttttatcctctgtggatctccaaaagctcaaagatgcacattattttcagtttcccgtttgatttttttacttctacaggaaaaggaggagaatcccaatacaaaacaatggtcttgtgactttgtgaggtgttttcaatcaagacaagaaaaaggttgctttcagcagctacctcaatgaacaagaggaaggcaaaaggtagactcttttcttgggagcactcgtggatatgaaattaccatttatgtgtaatctttttctgcttacgattggcgaaattgcaggctatcttactccacccaaccaggtctagatcctgattccaaaaggaatccagttggtttgatttgatttgaggtcccagatccctggagaaagctaagccaagtgagaaagatacagccgtgctaactgattgctttgccaattgtcatggaattttgtccttgtccatatcttcaacatggattcacctatttctgaagattcgcagaatcagacaagatcatattctatatcatattctcaagacttaggactccatcgaggcatatttgcaaaagaaaaaataatttgtaaataaaaattttatatacgtgttcttaatgatctaaaagcaaaagctgaaaaataaactacgatgaaaaaactccaaaatcaactccatatttaaggttgaaaattcaaattttgacttataagcataagcataagccaaaagatgaggttgttagatcatataatctttgtgaaatctcatatccttgtatgatgtcacaaataagtggtgtatcgaacatcagcatagtctgtaaagcacactccatatgagataatcttgggaagacattatgtaattacctccatccctttttatacaacgtcagttactaggatcgaacaacaataactaagccaacccttgcgtgcgcgcgggggagggggggaggttgaatggttgtaatacccaaaaccaaaacttttagtaatcgacggatgtcggtctgaccgaagtaggtctgccgttctaacagcgtgatctgaccggagttgatctcccggtctgaccgtcctgaagcgtcgttgccttctgtcgcggtcgccggtctgaccgaagcgatgccaccggtctgaccgtcggtgtcctgctggttggaccaccgcacccgaacaaacacaaattgaagatacctcaaagtagattgaaactttattatttctctctgtgtttacaaagtgcaacaacactcctcacaaaaatctcgactacccattgtgtgtatgtgggatgtggagtcgaatttggagggagtccaaatttggtacaattgagtttgtaaagttctttttcttgcacgagaaggtttcctaggggagtaggacttcttgtaaaaggttggttcttagctttagactgcttacctcgggtataaatagaaagggagggtgtggcatcccgttatcgatattgagagagttaagtttagagaaaagttagggtttcgagatcgtatgtcatatgaaatctttaccaaccacgtgcatggatctttagcctaagcatcctgcatgatatcttgatcgtccggccatcatcttctcccaagttgactcccgatccggcgtcaagactcacatacacatgcatcaatcaagaaaccatatctgagcacatgttctcaccaatttgactcattgttagcacacaaaagtattacatacgccataatatccacctagaaatcataaacatgatttatccataggtatccaaataagcaatccgaaaacgaaaccgacacatcgtcggctggtcagaacggctatcacaacccggtctgaccagacctaatatgtcagcaataatccctgttcatcacctgaaaaactaatatctctaaaaccaccttgccaataatctacaaaaatcaaaactaataatctcatatgccaattgttcgtcacaaaatagcaatcaaacacactttgattttacaagttagttaaaaataagctaaccacgttaaaaaaacaccaaagggcgaaagggcctgtagcctagtagttacaaaagtctcagtagcaccttgggtcctgggttcgactccctatgggagcgaatttttccaggatttaacggatttgttctctagcgatgttttagaatgtagacaaacactacaagggacagtcttgaaaagaaaatccagtgtgatagtaaaagggttgaaaacgagaaaaaaaaaaccgtagacaacatagtgcatacagcgtggcccaaatagctattctgggtccctatcttgctctaactgggctaccagaggtccacacagcccatgtggagaatacatttccaaagttcaaaataagcaaattattttttctaggggcttggctagtaccgagaattaacacaaagttttccaggttagtagtaggaaaaatctatcagaataaaatatgaatgcacatagctggatagcatgtaacacatggcaaaaatgtgtgcttccaatgctatatgcaacgtcatatatagggacaaaactagaactatttgaagggaataatttcaaggaaaaatatggtgaacttaccgcatcgcaaggtcaaatactcaatcaatatacacgacacatgtacatttgcaagtaacactgtatatatagatggactcttgaatcgtactcgagcattctgaatggattgtttctggatgaaagcccacggattatctacttaactaggtgatttcttgtgtgttgttgcgggaattactaagtagtcttttatatgttttcttttgtcgacaattgagctatgagtaaaaagaatattagttattaacaacaaataaaaccgatttatgaaaccatgtttgaagagaaatacatttcatagactttgtatgagattgcagatgaaatattaaattgctagctgaaatttgcatcaagcagagataaggaaaaaaaatgaagaaagtctgagtttattagtaataatcaataaataaactaaatgatataccattctttgatggataaatatatattaagtattataagaatgataaatagatatgctgaaatattgtaaaaataatgtgaggggtgatgcatattgatttgtaaaattcattaaattttagatgatgttgcatgcttgcatgagttttggtatgtaattattgctagtagatgatgaggtgatatgtttgcatgttaagttttagacttagtgggtacatgatgaggtggcatgtttgcatgttgagttttaacttcagtaggttacaactgttgggggaaggattgtgaccctttcgtcagcgcccccctccccccgggtcctgaggaggctagggtctccactcccagggccgccaccgatgccttgcggagtcccgcaaggcgggctcttgatggagccctgcgaagttggcaagcccgtagagggcagttggctccggaggcctcggaaccaactgaagggctccgagggtctcgaagcccagtcaagggacccagagaccccggagtcggagcctaggatggcctccagaagtgggcatgggcattgctcaccctccaaccaccactgacgtcacggcacggaaggcgatgtgaaggccaatgctagctattacgtggagctcgctattacccgggtaaaagctagcatcatgatggcaccataccgccttcttaatgggcgcagccggcgtgcgttcgggtggatttgacccccaacctgttggctggcccacccgtcagccaactcgggatagctaggatgatagggacaattttgtaacttcctttatatgctatcgggtataaatatgtaaatgctaccctcagaagagctcagaagagggggattgaaccatacacagaaacacttgcttagcattcgtgagttgtgttccaacacaactgtatagaatgtatatattatgtggaggactaagtatattataagttgtgaacataacaatagaacaaccgatataatagacgcaatagatttttttagaaatagtgtttttaagaagagtagagtaagaaatctcgagcaataatcggtggataatctaaaaagaggggccaatatgatgagttagcatgcattacgggcacatgacatgatctagatccatgcagggcaatcttgcacacccaacaagtgttgattataggcctcaatcacaatcacaatcacaatcacattatattgatgtgcctcaatcgactattgggcacatctagacaagctgtaatatggattttaagttcctggttagcttaaagaaccgtactgtgtacacatgaactgagctcatctaatttgatttcttgtgctgaaacttatccatttatgttctaagtcctattcttgacacgaccactcacgtttacagttgattttctttccgtcgtagatatcgaaagcgagacatttgtatacaccgatccagtgttcgaagatgcttatagaaatatgatatgcatatgcttattcataagggtgagtgcgacgcttaagctcacgtgtttaggaaggaaaaaaagctcatcatgggacgctaaatcgtcggagctctgccgaagttcgccacggctagggaaggatgtcgcggtgcacaaatcgtgtagctgacctgacggtcatgattttgtaaggtttgcgctgatttttaagtgaaatacctagtaccatttagcaaattcataattttagtataattcctgatccacggtacgaatcgactttttgggcacatccagacaagctgtaatatatgaattttaagttcctgcctagcttaaagtacagaactgtaaaagctgtacctttatctcgcgttttgtaagccaggatgctggttgagtaatatatttctctcccccccctaaaaaaaaagaacagtactgtacacatgaactgagctcatctaatttgatttcctgtgctggaacttatccatttatgttcaaagtcctattcttaacacgatgactcatgtttacagttgattttctttccgtcgtagatatcgaaagtgagacatttgtatatacagatccagtgtaaaaaatgctcatataaatatgatatgcatatgcttattcataaaggatgagtgtgacgcttaagctcacgtgtttaggaaggaaaaaaaagttactgtacactgtcctcttgttcttggccgggattgccggataaactctaggcgatcgacacagaatgggaccgcggcaacaatatttggagcacacgctgcccaccaacacgccaccacacacacacgcgcacgtacagtcgtccaccactaccccgcgtgatctgacgatgtgagatgcccctttcgtccatccatctctcgttcttcaacgactgaaacgaaacgacgggcggctgatcgcgagcacccctgtcacagcgctcgacgcagccgccgccggtcgcgaaaacgcgacagtgcgcgggaccccgcaccggaaatggaattttttttcacgaacacgtaaagaattacacgttaatatattaaaaaaatataataacaccacgcaatcagccagaccggcttatgctaagggaagagagaaaagcaaaataaaaaactaaagcttagaaaaaactacggtggctaaaataaaactccaaatagcgggaaggagctgagccacgttacactcctaacaagtccctagaaatggcaacgccagctaacaaacacatacgacccttcgagtaaatggactccagaaccactaagacagaagagagctcagagtcgaaaactctagcgttccgctccttccccccacacacattcacacgtacagtcgtccaccacggcaacaacctaaaaacggcagggcacgatcgaggaaaaacgtacgatccgggaagcagaaaaagggtctctcttcgggggctcgcttttcccatcatttcaggtttgcgatggcgcaatccacatcaacatccaaccaaaccaaacctgtgcgttggcgcacgggcagggcacaccgaacgggccgacatgtgtgggcgtgtgggtcacacgggaccaatgcgcgcggcggctacgttaccacggccccggcgctcgcgcgcgcgcggtggctgcaagccggccggccactagagtagagagagcccctgcatggctggatctgtacagatctcaggctcgacaaaggggtggaatctttccgtgccggccggaatctgagtgttaatgggtgtgttaggacaaagcccctgttgctgcagcatcattattggtaccactgtccttgttgtgttacagtatgtacgagtactatttcggtggatatacacatgtagtggactagtatggcttctccatattcattactactcctatacatgctctgattggtcaaacgaactcgctcagcactcttgcacatatcttaagtgtgtccttgtaacgcaagaagggatggacactaaatttgttcaaaatgcacccagttgttgccatgtggccagggtgaaaaacggtcggaaacgatcagaatcggtagcatttcttcggaaacgattctcaatcggccggtaattaaccatatttatcatttaaactattcagtgttaatattaatacgatgcagaaagaaattagaaaaaaaacaaaatttaaaaatagcaaaaaaaaaaacagtacggtcggaaacgatatcccttatacggaaacggtgggcggccgattaggaatttccgtgaccgttttcatccctacttgtgggtaatcgtggatggcaaaacttttgaatctactatccttttactccatactaaatctaaatgtgtttccacatagtttatccgagtaaattccataactctgttcccagcagatcatgagtggatgtacatgcaacaagtcagagaataaaagctgcattattaattctagaagccgcaaaagggcaaagcagggttgaaaattccccagaacaacatacatgtgtaaagctgccaaatactactattccatatactaacctgaagcacccctacacacatgcattgatgcatatgatgcatcgacggatcgatctctgcaggttgcggtccggcccacaccgtgccgtcgcgcgcatatacatgtgtcacgtcagggtgcatcatgtggcacggaatggaagcagctacacaagtatacctcggtcctaatcctaataatggagatcgttttccagggcctaaaaaacaacaaccaaagcgaaaggaaaaggaattataattaaagtcgacggaacccccccaatatgtggcctcatgattatctggatatgccaaatgccgagcaaaagtagtgtaggaatgacgacgaagaagagcatcccgttggcccccgtcggctctccccttcgcacacacgacacgacatgacatggatccatcgatcggccagatgtaggagt

SEQ ID NO: 739 - DNA, 25432 bp, Oryza sativa
tctcccgcctcctaaccccaagaattctcctggacaccaccgccgtgttcccgccaagcagcagcgtcgtcgccccgtcgctctcccgccaactgcggtgcacgcgcacgggtgggtcgccgccggcgccgccgcataggctcgtggcgcggcgggcgatgagcaacggggcggcggagccggccatctacggcggcggcggcggcgcacaacaggcggcgtcgtctgctgcggcgcggcgcgtgacgctggcgacgctccgcgggaagcaccggcgcggggagccgatcagcatggtgaccgcctacgactacccgtccggggtgcacgtcgacgccgccgggttcgacatctgcctcgtcggcgactccgccgccatggtcgcgcacggccacgacaacaccctccccatctccctcgacctcatgatcgagcactgccgcgccgtggcgcgcggcgcggccaggacgttcctcgtcggcgacctcccgttcggcagctacgaggcctccaccgcacaggtaaatctagattctagacgcggacgccacgccattgattagctcgacgacgagcagcacacatgtactgaaattaactgacacgtacgtatcgtaggctgtcggctcggcggtgagggtgatgaaggaaggcggcgtgaattcaatcaagctggaagggagcgcgccgtcgaggatcagcgcggcgagggccatcgtggacgccgggatcgccgtgatggggcacatcgggctcacgccgcagtccgtcagcgcgctcggcgggttccggccacaggggaagacggtcgagagcgccgtcaaggtgcgtgtgaacgcgtcgcgcgcggcggggcacggcgcggcggcgagcgtgtgctagctactgatcatcgatctggttgattgcgcacacgcaggtcgtggaggcggcgctcgcgttgcaggaggccggctgcttcgccgtcgtgctggagtgcgtgccggctccggtggcggcggcggcgacttcggcactgacaatcccgaccattggcatcggcgccgggccattctgcagcgggcaggttcgtccattattcgagcagagccggttgccattctttactttctcaagttttcgaaaagaggaacgtattatatgtacacaagctttgtatatattctcggtgcacaacaactaacaaaatatcacaattttttttattaaaaaagaatctacatctaccaataatcacttacgtggttatgcataatggacatcttcggaggacattgatacggttgcacagctgtagcaactacagtatcaacagcacaaatcacactgcttttttttataaacaaaatcacactgcttatacggttgctactgctacagcacagctaccgccatagccggctgcagcgtcgtgttgctgaacagggcccaacgaaaactataattcagacacttatatcaacattttttttaaacacccagtacaaagtttcgttttaatataaaagtaaaaagaaaaacattaagtctcatatcaacatatttgaatttctaccgcaggtcttagtctaccacgacttgttagggacgttccaaacaagtcatgccaaggtaaatgccaccttcttttactgatccgacctaaaccattttttacccgttacgattttgctctttgagctcatagtactgaacttcttactctatacctgactacatctgcaggtctcgccaaaattctgtaaacagtatggtaacattggggacgtgattaacagagctctatcaaagtacaagcaagaggtggaaacccagtcttttccgggtcctagtcacacgccctacaaactagctgccacagatgttgatgcctttctgaatgcgctgaagatgaagggcctgaatgtggctgctgatgctgcagccgatgctgttgaatatacagatgagaaagagataaatggaacgccgcagctcaaggtctatgcttgattgttcctagctagctagcaatggatgaatagcaatatggtttgatttatcgcaaaataaataaatgatttggttgctgaatgaagctgaatctgaatctgaagagtgaagacccatcaagtgttatgatcttctttaggtgtatttgaccatggatgcatggggatttcttattttttgtgaagtataacgtgagtgttgtatgcatgaagtatgtatggggagtgcactcaaacctatcagatagtagattccattggtgacaaagttataattatgtattctgtaataagttcatcgtatgctattgttgtggttttggaatgtgttcagcaaaatttgtagcaaagtagtactcctacttttttataagatagtcgcatgtttataaaattatattagatcccgcaaaaaaaaaagatattagaaaaaatgactttaatgaatgttcactttgatggcctagaccatgttaactacataagtaaatttcactaaactacaaatgttcttttatcaaactatcataaaacgttagatttgatacattatatcataaaaatacatatttagtgctaaatgtattaaaaacaacatatttatcaaactgcatattgaggttcgaggacatcttttttttccgccccaaactcagcctcaacctgagggacctcaagtgaacttatttccaaaccatccacatcggttaggtttaggtgggctgaaaatccaaatatcctgaaaccaaataccagcccaatgaaactacatattcactcgtgactcgtcgtcacccgtcccaatccaaacccccacccaaaacctctcggcatcccacttgtccccgtcgctctctctctttttcgccgcctcgcctcgcctcgcaccaatcaccacacgcgcaccgcgcactcactcgccgcgcggcgcggcgcggcgccgcctcacgcggcgatgatgatgatgatgcggcgggcgttccggcacctggcgcggcagcagcggcggccgctgagccacgtgccggagtcggccgtctacggcgggccgcggccgcaggatgtgggggcggcggcgggagcgggggcgggggcgggggcgacgcggcgggtgacggtgacgacgctccgcgggaagcaccgacgcggggagcccatcaccgtcgtcacggcctacgactacccgtccgcggtgcacgtcgactcggccgggatcgacgtctgcctcgtcggggactcggcggccatggtggtgcacggccacgacaccacgctccccatctcgctcgacgtcatgctcgagcactgccgcgccgtcgcccgcggcgccaccaggccgctcctcgtcggcgacctccccttcggttgctatgagtcctcctccacgcgggtacacgcgcctctctcatcattcaccccatcgatgctatgccgccgcgttgccgattgattttgttccacatctgaattttgatctgatagacgttattttaactcttttttttttctatattcgtgtttactactaggaaaatagctatgcgagttcatgcaggatgaataaattttggttgtcttgcaatgttatttctgtttggtacaatggggatgtcaataaaggcacaaatttacccccttgtgattacaaaagcagatagtgtttggttggcgatgctagcatctatgtgttctaaggaatttgattgatattggttattcttatcacaaagtttctgctatcagatgaagtttttttatacacaatatatgtagtacttgtgttattttgttcacctttcgatgacacatgagaagtcgagacttgaactgtcagtagagctctgtttcttacgttcagaacactagcatatgctgaaatttcagctcaaaacagtataaaataacccaaaagatcagcttgccaaatactttttaagtatttcacatgtatgcatatgcatacatatgagacattgagattttcgtggtgtatgctttattcgtaataggctgttgactctgcggtgagggtgctaaaagaaggtggaatggacgcaatcaagctggaaggaggtgcaccctcgagaatcagtgcggctaaggctattgtggaggctggaatcgctgtaatggggcatgttgggctcacgccgcaggctattagcgtgcttggtggatttcgaccacaaggaaagacggttgatagtgctgtgaaggtgtggttctcttgattttgttggttacttggctcttagcctgattcatgttctttcttcatgtatagatttgccccatgctgttctgcttgtttgtgtaggttgtggagacagcacttgccttgcaggaggctggctgcttctcggttgtgttggagtgtgtgccagctcctgtggcagctgctgcaacatcagcattgcaaatcccaaccattggaattggtgctggaccattctgcagtggacaggttcagttattcagtatacttcacagttcacacttctacagatatatgttcattttcctcaacagtttagattaagccagttgtatctattctgattcttgcatcatttctgtcaatgcatgtgtaattttgtcctttagcttccttgaataaataacttcaataaaatctgctacgagaccttgtcgagtatacaaattttatgaagccctcatgccgaaatatttgtaatgcaggtcttagtttaccatgacttgttagggatgatgcaacatccacaccatgccaaggtaaatgacacttgacaccatcctttcaatgtcagtaagcagctttgctttgatgtgagttgtgccgagctgaacaatttgtataatcgcttactgctctactgcaggtcacaccgaaattctgcaaacaatttggaaatgtcggtcatgtcatcaacaaggctctatcggagtacaagcaggaagtggaaacccggagtttcccaggtcccagccatacgccgtacaagatagctgccgcggatgtggatggcttcgcgaatgcactgcagaagatgggcttggacgaggctgcaaatgctgcagctgccgcagctgaaaacgcagagaaagatggagaactacccgagaacaaatgatttttttttctgttggtggcttcgagcatcagagcctgccacaatgtcgccacatctctcaatgcaatcctgccaaggctgcaggggtaactgttgtcggaaacgcctgcacagtgtttgggtaatctttcctatgccctaacgtgagtcttaaaaaaaaaaagacgatgacatcgatcccctgtccgggcaattataaactggatgtttgggagcgaattgcacatctcaacgtattcttgctctgagtgacgatttcgcatctatctcgacaccacccatcatgggatgcacacgctctgaaaggaagcacataatacacacacagatgctatccagctactgaaaggaagcaccttaatgcatttctccagccaagctaagaacagaactaaagaatatgctgttccaatgctatatattcactcgccatctagtacataactaattcagaaaacaaaacatattttcttgctttctggactctgctctacatacattgataaaaaattctatgcacacagccaccatatgacaccaaagtatatccggaaatcctagaagtggcaatatacagatttaccagacctggaaatcctaggaagtggtaatatacatttacagaactataacctgttcttccagattagcattgtaacattgactatcatggctggttttgttagaaattcagtatgtgcgaagtgcataagctgaaatgtggaccaggagcacttcatcagtctcatgtagagctaatcttagttatccttgagtaatcgccaacgttggcaacaaagagtgggtctttctcgtcgctaaagatagtcttctcgcctgcttgttctaactctttagtcaagtcttccattgttttcttcaagttggctttgctcatctgtccaccttcgcccattgagataccaaccatcgtgattttggggagaagtgggttggcttgtaaatcattgttgatgctggcatcacatctgttcatcaaacaaagatgatttgaaaatttgtgcataaatataaccataagaaagattatacaaataaacaaagcgacttattaaatagattatgataaacattaaacaaacaaagtacaaccaaagcacaaaaccaaaattgaggctattgtatagaaacatgattcatagagtgtacacttcatgtgcatgacagcaagagggaagggaaagatgaggaagaacagaccttctgaatgctctgtctcttccttgtgctttgaaacttctatcatgacctggccatatattaggaagcaggttgctaaatgggaagtgagattggccattatttgagttttcatgttttccacggttgctgttatcaacgtctgactccaaagtttctggttgtttactaatttggaagcaatcagcatcctttgaagcagtaaaactactactggcagtagcagccctgtcaattgcagcagcagtcctgagagtgaataaaacaagagaaaggcatggatgaagcaaaaggtagaactaacagatactgatgaactagttaaattagtgtaggctatcaatgagtattcacacaagaaaataacaggttaaataatttgtttcagtatctcaggaagtttgattattttttaggcctccaataatcaagttaaccattttttctctcctcttctcaaggtcagatctcagtttttcaacaaccttctctgtacactaaacaaggtcatcaagctactgagctactagaagcagctttttttaaatatgtgataaccagggtacgtgtagttaaaactaaattcaaacatgttaaaaaaatcatagaagtatttcatgaccaatctaaatcagcttggccgttaatctccctcaagttaatagcaatcagcgaagcacttctatattaaaaaatgtaagaggcgttaaataatttaaacatgcattgaggatgcacctttcttcaaatgaatcaacgacataggggaattgtggctgtatgccagtagcttttctcaaccacttatttcctagaagcattttatcaacaacatcaagaaattgaatctccgctgcttttgttacaacatttagcggtatcccaactggaccaatctcattcatcaactcttgtacctacatcaacatttcctagcaatttgaggggaccaaaaaaattgtagaagagattggagacatctcgtgcatagctaatgatcatattacctctgggggctcaaggaaactgtctgcactttcttccatcatttcagatgtcaaactatcatcaacaatatctctcctacgccgtgtgtggcgattttggaccattgagtgaaaatgttgatccattgaagcttcaagaatattgtccaacaagtttttatcaaaaaaatatggtgtatacctgaaattgtgatcagcagaagaattcatattgtgctttcaaacaaatactgaatacacctaaaggatctcctatgctttctttcctatcaccaaatagaagcatccactccgaacaagaactgctatagatggcaaatggaacttcactgaagaatccacgaatacaagataacattttagttgatcaagtataagtaatccaaacattttggcatttgacagaaatcagcacctaatgttgagtaacgtttaagaataaagaataaatcaatgttgtttggttcacaatgctgtcagttcataggaaaatgaagcttataatgaacatctgtggaaaaatatataattgcttattcttctcaaagaaacagtaaaaaatatcaagaattcaatccataccatctaattccatcattcgttgccacggcaatatttaagttttgagcactaaagacggggacaccatcaagttttttccttcttctcctttgaggaagagactttaagagcttattggcagccttaacctataatggaaaaggtaatagcctctaaatggcacgttcaaatttatgcaaaactgaaatatttcagcacaaacctgcttttcacttggaacaaactggaacatttgaggtttttcctgaaaaataacaattacagggaatatgatgaatacaagatgctaaatgtttgatacgcagatatgaaaatgactagcatagtgtatgtgtgtgtgatgggtgataaataaatatactacaagatccagagtaaaaatacatactacaaaaaataacataaatattcaggcaaaacctcatattaaaaaaatcatcatacctaccttgaaatgctcgtatgccacatcaaggcgacaagcccccaccataccacttggcacatttaggcgtttaacataagatactgaatattttaaaccaagttagctaaaattattccctgcaataactaaatgtttgaaatactaagttatgtgaaagccagtaatcagatgtatctatataatgcaaggaaaatttgctcaggaatgcaaagttatttctagaaatacaagatccaaacctgaaataactatataacacagaaaacataggccagaagaataattaaggattgaagaaaatggcctgcccaataggcaactctggattaccaagtttttggtgtatcagatgtgtaagaggtgggtcgtgggtggggttgtggggctaggcttcaggagaagctagaaaacacaactataattggttttctgttagttttctaagcccgagtgaaagcaaattctaggcaaacagatttgcgagatatttgctacaaattttgaactgaaattctatgcagtgcacaaaatctcctctatcaaatctaccccctaatagagctgttctacaaggtgcctgctgtaccacctctataatccaataagttcatgatgcatcaagcaacaagaaaacagagtatttgataacagaaaatacctgcatcattcaaatccataaagaacctaaatactggaccattttcactcttcttcaatggcgataagatccttttgaaccacataggagtcctgagaaaataaatttgaaaagtgcaattcagtagacaactaatacattatgatgccattatatgttacaatcaacaatttggattgttatcagatagtgtgagtactaagtaggcaaagccaattcaacaaagtagaaacttgcaaatgatactccctccgggttgataatatttgtcgttttggacaagagcacggtctccaaaaaacaactttgaccattgttttccattataatatgtataaaagtgttaacaaatatatgattttattaaagtacttttaagactaatatatgcatgtaatcaccatatttgaaagataatgattttaaaaatgattcataatcaaagattctaaagtttgacctcacccttgtctaaaatgacaagtattatcagcccggagggagtagtatttcagtatctgaagattttaaaaaaaaaaactatctcaagattaaaaaaaactaatatttgcatttcactgtatgcacatctacggtgcttcaggttatggagtatcacatacaaggctcaatcccactttggtctgatggtcagcaggttctagaaaaacaaaaaccaatacagcctgagcctgccatgttggcattctatgtgctggcgtcaaggtggacaatatgcccaaacgtctggtgcgagttgcaatattggcacactgggttagatggattaatcaatgtagtataataaaaccacttctaatgagagaatcaattcatggtagcggtaagcaggtaagaatttctcctagattatgtaatccacttctaagaagtgcatagtctagccgtctagcgcataattctcactcagtcaaaacaggtgaaaaaacatttcgtgtcagcactcagcagtaacgaaggccccaatctaacatagggcaacatcaacagatacactgctgcgagaaaaaaggccaagaacaaactgcgcaggaagcaaaccctccacgggaggaaatggaaatggtacctgctggcgaggaattgggggagctcgaagcgggtggtgacggccatgaggccgttcccggaggggtcgagcatggtgaacacctgccccacgaacgcggggcccccgcccttccccaaaccacctccaccccccgccttgccgcctgacgccgccgcggccatccgcgccccacggttcgactcgggggaagccgcggcggcggaggcggaggaggaggaggtgatggggaggatgagagggacggcgaggtggggagccgggggcgagggcgagggcgaggcggaggttggggacggggacggggaggggaggaaggggagggtggaggcgaaggcgtggaaggggttggacgccgacgagacaggtggtggtggtggtggagcggccgcgcggcatggcggtggatggcgccgggagagagcggcgctgctgttaaaaaagtcacggtggcgatgaggggtgggagagcgtttcgttggatttgggcttggaatctgggggatttgcgggtggtgggtgcgttgcttcggcgagggattagcttagcacgcttttggctctacctcgtgttgccttctctcctctactgattaattactctcctaatctcatctcctgtgaggtgtgagaggctagggaggttgataacttgattgatttcgagtcgtctaggattaattagctgcagtgcagtaattggttaaacgttgtttcaagtcaatgccttaacatccagattatccgtacaaacacactagttttattttgttaggtgaagctccgaatgggtcgaaactcagaacaccttttgtctattctctgtacaatacagaacatgatttcatcctgacaaataagttcgatgtcatactccatccattgtgctttgtcgaaaacactaccacagccgttgccttcaggcttcgataatcgaagcagaggacgcacctttccacggttctcaggagaaattagtatcaccacatcacggttagattgctttcctttcttctcaacaatcagcaaacggctaccatcttgatcacttcggtgcaggcagcaaagctagctaaaccactggctacattttttgactgaaacgcagcagtttctcttccatcagctaggtcaccttcataacaaagcaaccactgaagattgccgcccttctgtagggttagctcgtagtacgtcgtgccagcatcctctatgacgtagtgggttcacatactgttgtccttttatctgttctcatcctggtattgatcctaggaccggtattcctgctgttgctttttacagtctcttttctaggaatggtgcgctgtacaacccggattggtatccctccaatgtcgaaatcttctttgagagattttgtcaagaaccttatatctgtatcagatagctgaaccttcccactcataaaggcaacgaacgtcggtggccgtgctttcacctgagtgaagtacttcacttttggctgggtagctgagtctttccaggaatgtctgctcataacctgtcacggggaattcaaaggaagactaatgtaaatgtcgaagtgacataaaagactggcgatcaataatttaaacatgtggtcaaagtagagaatggcaatgatatctaataagaactagtcctgagaaaaaaaaaagaactatggaaatctgacatccctaagtacagatggcttagatcaaccactacagtacaaattgatatttctgaacaaccccctagttattccattttgcaagcacaaaatcccacctagtgaaggtaactcactttaatatgcagccatacaccatcaaaattcaatctaacagcacatatttaagttactactcccttccaagaatataaggatatctggaggggggttttttagagagattaaggttgaggtgaaggatggttgtgattggttgatatggggaagtagatggggatgtcctcaaattattggacagatttcaaactctagatgtccttgtatttctggacagaaggagtgcttgttgctatcctacatttacatcacttgccatggttgttaaggcgtaaggcgacctgaggcgatccatcctcgccttactgctataatccacactattagtagcgattagaagagggagagagaaaattagccctgcagaccagcccagaaagctcatgtcgcccacaaagcccatgccacccaaagttcaaagagatagccctaacacagtgtcaggcgagtctctcctctcacagcaccaccttgatgtcgcttcttcttccttgcgcaagctcttctcctctttctgcgctccttccctgctgattcagaatgaatccagcactccactctgcatgtgctccttccctgacttggatggatctggctgctcccctgactcaaatcaatctggtacagggagagaaaagaaaggtagtggagaccagagctaagggggagtaagatgggggatgacatggagcagagaacaaggaagaaggggaagttgctgctgccttaacctctccctctctccctctctgtgttatgcccttaaggcggagggacgccttgacccctgggagtgccttagcgctatagcgacgcctcaacaaccatgtcacttgcaattcctacttgtcacacaccctaaaagcaagttctgtaatgccaatgtaagcaccgaacacttgagcaagatgtttaccttacgcaaccaacggttcagccgtgaggtcgacaaccttaaacaccatttctcataagtatctataacctggcgcatgacagcaatccgccccctaccctccaatgcagacataaacacaactggtattcctgtaacctgccagaaataggagaagattagtatattttgtcacgtggtcccctgtcaaaatatgaagcaaactactgatatattctggtaaaatggttcactgtaattctccctttttagtgaatcaaagttatacgaaatgcactggaaaagcaacacttcatatttcataatgatattactacactaaatcattaatagatatgcaacgtgctctggaaaggtcaaaaaaataagccagagattagattgcacatttccagccattagcagacactaaagaaatcatggtttgtcaatcaagaacatggaagatccatcaaaatgaatctcaatatctacattccgtcagtagacagagcaagacatctccatgtgcaataacaaccaaaacaaagaaacttcaatcttccatttctcgtactccatcggcaaacaaagtaaagcatctacatgagtaatactcagaaagcactaaactgataataaaacatcaagcttgttgctgaaaaaactgattataaacttggcaaggtttcaactaaagaacaaataatcagaaagctttcccagaatcaattggaaatgaaagtctccaagataattagataatacttagcagaaattacacaaaagtttccagtgtctgtgcaatcatgttagcagtatataggtcaaggttgtaggttagtacaacaagaaagcaaacctggggaataactgtctggatttctttaggaacagcatctatcactttgtcaaacaatggtcggttttccctaagaagatccattttgttgacaatcacaacaagtccacgaccttcttctattgcttgccgtgctatcagaacttcagggtgattcatgctacttttagactttgcaatctacaaattaataaagatttgttatggcattggccgttaaaaatcaaatgacagcaaatgcatagacatgcaaagtatcagactggtatattcaatttaaacattgactatgatgcttctgatgcttactagtttgaaataggactgacattacaacatcaagcttacaaaaactaaattcagtacattaaacagaactacggttaagaagtaatagtattgaggaggcgattgttacaaaataaatgactgtacaaaatattactggcactggaccaaatttcacatgtattttacataaaaaggtggtggcactcgccataaatgtgaaaagcacatcaactatgatttacaaccaccaacacatccaatactagcactttagtagtgcagccccatgactaatgcaacttagtttctagcagagtacataaacaacgttaacatgcttgatgaggttgttcatcctctgtctgactctttgtacttggcaagttgacatagaacttatgcatatcaaggttaaagagcagataacccaggtgatctagcaaatgcaattggtaaagaagaacaccacaatcaattgagttattgtttattccctcaaatattcagacaaaagtcatacacatgtagtgatgcctccattagcaaatcatggcttgagaggttgaaatgttgaatagcacgccctgctcaagtgcaaatcaggattttttttttccacattccaaaggggcatgaatatatgccacattaataacatggcaccagaaacccgtagtaaaagatattcacttggagttcttcgttatgaaaaaaaaaagacacaaactacagaacaggggagcattgaaaatgttatcccttaaccatatagaaagaagcatagtaagaaatatgcaggtcattggctcagagcacatcaggatgaaattaagtaccttttctccatccagaacaagagctacaatatgagctctcatcagattctttcttgactgcaccacgctcaacgatgctggacctttctcctttcctgacctttccatccaacctgcagtgtccacctgcaccacgaaaaaaaggaaaaatgaaaatgatgactccgttcagataagtagcttgcatggacattatgatatgagctcctagattgcaccatgcaatcgcaactttgagtgaatttgacacactccaactagataatatttttaaacaaataatcattatgttctcgcaaaaaggctgtgtgacacatcatagtgtaagaccactaaagttcacaacacaagcacatatatatatggccaatacaagaaataaaagtgaaaaatataatattgaactcataaaaaggaattaccaaatatacagttcgattgtcaaactgaaactgagtccgaatagagtcccttgttaagcctgcctcggggccaaccagaactctttgttcttgcaacaaggtattcagcagggtagacttcccaacattaggacgcccaacaattgccaattgcaaaggtaacttgctttcatcaccttcatgggcttccgtctcagcctcagaggtagggtcatcttggttgagtccatctatcatatttgagtgtaattcatgaataatttgttcgtaaatggcaatacagtttgcttgagagaaagtatagcattataagcaaacacaaaagactattgccttgaactcaataggttgtggtcactcatttgttgatccctccataacaaacaaaccagttcctccagtaatgtgcatgcaaataaaaaaataaggtagtcccaactgtcaagatatcatttctacttgggcagaataaaagggacagatttaccagatgaagatatgatattgtttagagaagccttgatacctaaacattctgctaagaagaattcatcatagaggtgaatattgtactaaatgtctctcgatcagtatgacagtagaaggtaaagatgcttgaccaaggaggaagcatggagtcagtcatgttaccaaacatcaacacaaatgatcaataacaaaagagtacttactgtttgttagctgaaacatgtagtcctcaaacaatggccttagtgtctcataaagctctgccatccccaggcctgtctctgcagatattgcaactgggtcaccaaaacccaacctatgggcttctccagcagccgcagtcagcactccatgctcatcaagtgactcagacttgttcattgctacaatggtatgtatcccagatgcatgtctccgcagccattgtccaacctcaagatccagtggctgcagaccatccctaaacagagcattgctcttttaataggcaacaagtgccaacacttaaaattgactcaacaatgagaacttgaaaattgaaatcaagccatagcctactcacctgacatcaatcaagaaaatagcaaattgagatctagctaacacattcccagtcatgtcagctgttcgagcaaggatgctaccagatgttgctgctgtctcaagtccagccgagtcaagcacacggaaacggagatcaccaagcttggcaactccttcacgaatgtcacgggtgacatggtccccaggtgtattgtacaccaatgcctccctccttcgtataaatctagtttcgataatcaaaacctctaagtcagaagcaaacatttcaagagaacaagatagtggcaaacaatgcacgctgcaatgccaaagcgcataaactgatcagagtagtacaatgatgagacatttgtcagtatgtacgcagaccaaattgtggtgaatgattcatgaaatgatgaaatacataaagcttccaaggaaacgtaccaacatacttgatgtaataaaaaaaatacataataggttgcatgcgttattgcaaaatgcaaaatattagagaaggtaaatacatgctatcataaaaattaaaatgtgtatgaaaatgcaagttaagtaaattcagaaaatgataaggggtttaaatgtgcagtatcattaagatggcggcaaccataagttacaattgtaagaaagggttatcttgcaccgcgaattttctactagtaggaagcggtaagaaaacaaagtggagtaacctaaaacgtgttcgtggaaatgccgacctcacgatacacaagcaaactacgaaggggggcgtctctcaccggttgaatagggcggacttgccaacgttgggtcggccgacgaggatgacggtgggtaggagcgcggcgtccaccttggtgaagtcgaagcgggactgcttcatggggttcttcctggccttgcccttgggcttcacgggagcggtcgactcatccgctacggtggagtacacgaatccggcggagcctggaaatcgggagaggagaggagaactccggcctgcgttggggagtgggacggtgagacgaggagggaggagagggtttagggggtttggttcgagagcggagaggggggacttaccgagagaaggaagaggcgggaggcttcgagaggacgggaggggacggtggtggaggagggccgcggcagctggacggctccggcggagggcggcgcggaggatggcggcggccattgagggtaagcgggacggcgaagcgaagctgggctgggcgctgcaaaaagcaagtgcgaaaggcccaggcgcccagcgcccctgcgtgactgctttgcgtccctccgagacaatttagccgtaaaactggtgtaatctaacgaagatttaccgtataaacttatgggataacatagtactacctccaacataagatataaatatttctaactataaatatttttcataaacacaatacaaacggtaatactcgcggaattcatcatggatgcctcgcggcacatcctatcccctatgagcatatcttgagattgacaaagtcatcataaccgtcttactcgctgtgtacatgtacatcccgctattactgaaaaataattagacctaaatacgagcatttatgctaagtcgacttgaactcgagtgagctggttccatcacacggaatgtaaccagttaagctatactcactttgtcaaactatgaatcctaggactaaatgggacgcatccaactactactaaacttaagtttgtactaataggatgtgtcccatctaattttcggttcttatattttgaaatgaagaagtaaaagatagctaaaagttattatattttggaatggaagtgcatatacgaatagaggcctaaacaacatacgccttcatctgtattgtttttcttatattatgctgttattatataatacctctgttggtagtttggtttgaaacatagttaaataagcaattgtccctagaatagaaaaagacttatggctacgaatatgaacacaagatatatccaagtttaaacctagaaattaaattttctaaaatgaagatagtattgttattatatagttgggtacttgtctaagaaacatgtttagatggtgaaaacaataatatagttgagtacttgtctaagaaacatgtttagatggtgatttagttttgacagttcgtttttctgattggagataagaatttccgaatggaacaattgattttaatcatgttttaatcttgacagattgtatttctgttcagagacgagatgactacggctggtcaaacgatcacgaacatggtgcacattcatccgcttgtaggcaaatgcatccatcatataaactcgaaaactgtaaagtaagatcgtgctcttgcgtatgcgttacaacagatgctaaatttcacagctaattttgtttctgatagttcctttagtagatcaattgtctgaatgttgcaatgttgacattcaagacataagttatcttgagcatcacatcaaaacaattagacaggtacatagctagagttcattacaaggttagcagcctacaatgatcattacatcagagcctacaacgatcattacatcagacagcacctgttctctactccttgctattccagagcctgtatgtcagaaactacagccctacatcagaggacgacctaggtcacctatccataattacaacacatgtaaatacagatagatacaggagatacatagattagaacggccgttaatctatgtaaagtctcctcaaaacagacacccaaggctcaatcagagtcactgtcatgctcaaggaaacgatactcccttgggccaccaagccttagtactatggtcccggcattttcctcatgccactcaacgccttccttctccacaagctcggcaacctaccacagccatttttacagaattcaaaagcatggtacattaggtaatgagattgaccaattaagagtactagtctacagattgaaagagtaaagatcagcaacacagacactgtcaagagctgcatgctaaaagcattctattatagtggggccatatagccaccacgagatagaaagtaatataacacaggaaggtatcaaggtattcaaccaaacatttcatgagggcagctcagtttaaagaacatgctgataatactataaattaatgaagaaacgaagcatgacaacaagcaggcacacatgtgaggtcccagcttgtctaagcaaatacttaccgcgcgcttatttttcccttccctgtgccttctacaccacaaccagtaattactctaagaaaggtggctgtttataagagcacaagaaaggagacaacagtaggaccatgaagcattagaccaaatcaaagttgaataaaaaatattaacactgataatcagtgtagcacccaatcgggtcatactagaatactcacttggcatgcacacacaaatcatcatgtgaaccttgagaagcctcatggcttgtttaacatgttgcccatgcaggtcaatagtcactgtattcgttatatgcttatttctgcaaacagaagattagcacgcagatgtgatttaaaagtaatagctgggaaagttatgcaaattacctggcttcaaatatttccctgctagctctctcatcttccatgcgagctaattcacggtaatgcttcccctaaaaagacagaattttgatactgaggcataaggaagttactgagatttaacagcctatgcaaagttttaaactttgagaaaattgcagtctattggcataagaaatgttcctaaagaactgtatgctgcactacatcagaaatccctacaacctatctgctatcaccccgccttctttcttttattgaatcatcatagtcatctcagaattaacaaattaaaatgggatatcagacctcctctgcgagataggaggcataagatttttctcctttggaatatgccatggcagcctgcataggaagaaatgacaggaggcaataagaaatacaaaagatagagggtatatgataatagtagttcagattaaaaaatccctcttactttctgataatatgttttcattgtatcataatgccttccagcgacagtacgaaattcttgatacccattcccttaatgagagaagtaggtgttatatcttttcagaagtatcaaatgtaacaataacaaagcacaacaagtgacagttgaaacaagaaggggaaaacaattttactgtattaatagggtgaggcatgtgctcaaaactaaaggtattatcaagtccataaataaactagtcttaaatgaaggtcatacaattattgatcttattatatggtagctcaaacagctacacttcccagaattcattctaaagtgatatttggaagccattgaataagaatgtgaaaacatgctacagatttagaagatggatacagaaaaaattgccagaaataaaggaagtaaaggaaaaaagttcaatgtgatgcaaaaagaaattaatgatcttaacaaataacgacacaaataacagtggctaaaacaacataccattttttggtttttcttgattgttcgatgtgatgggagaattgaatgactgcagcctcttaactaccttcttccagtccatggaacttggttcatatgtgcgttgttcaggtattttgaacagtgaatcgagcacttgttgtggtgtcttagatatcgagcttgttgatcttgtagatgatgttgttgagtggggctcctcacatgcaaccttcaagtagctgttgagcaaggataacatagaaacagtcacataagtgcaaaaatagagttgaacttacagatagcaactaactagttatacaatctgcgcaattgaagtaaataaacaaagtatatgcacctacacttagcataaaatttacaggttaaactggtaaggtcaaaacattgcaagagatacaagccttgactgcaaaaaataagctcacataatttgtttgtccattataaagaccatattttagaattcctaggaaagttgcaactttagtaattaacaccatgcaatctgatgtatctagacaacttaagtttctatccgatcgactgagaatatgtcccatgatcaaagattttctattgtgcttctcgcaaacacatatatccaaataaaatatttatacaggatggggtgcaagaataatgcataggtatatccgtatattatcaatttgacgcatgagctagcaaaaatcagcttatatattggcaaattattacccaccttctctgaagctcgccccaaaagaatccgtgctcattatcggaacgattatatgacatgtttcgcatttcatctgtaaactgaataaaactataatgttagataatagttttacaggggtttaaagaacctagttgaaataatataagtatctagaaggtactaaggaacaagaaggaatcacaagcatgcttatcagactgtatgtatcatgtcaatcaataggaaatagaaagttgaattccaaatgcttgatatcacactctgtgcaaggatcattatcagtgtcaaaagtgaacaagaaaaccaacacaatttatatcattcttgtttgtcttgttagcactaaaaccacaactcagcagctcctaaaaacaagtggtagtaagtggtgtcttgaaagataccttcttatcttagaaggctgtaacacatatatgttagcaagcaagaagatacaataatacctgcactaataactacaaaattataaggtagtctatccaggtcccacactaatataatttgtaaaaaagataactactgtgacctcaataataaccactaatatatgcatgagtgaactaagaatagtctaaattttcagtacggcatatctgcatatgattgtagatagtgctaagtaaacacctggtatgaacttttttcaatgcctgcagttgacacttcctcagacagtccatttcctaggaagatgtttggagagctcatgccatttatttgagcattcgggaaacacctttccatgttttgaagggaagacatacccgagatatcaagtaatgcatccagagcctgaaagcatttcaatttgttaaacttctgaacaaatagctgaaaacttacggcatgcaattctttcagggaaacaagaggaaatgctagttgattagatttcatgcaacctagataacaatccttgctttacaaccttccttttggtttaatatgtgaaaattcggtacaaaccatcaagtttgcccactgatgggtgctcattgacccacaccaatcacttgaaagtgaacatctctcccatttcctagtatgtatcaggtagacaattgaaatcaaataaaatggtgtggatcagtgggtaactgtgggctgacccacgtgcatccctacctagatatgacaaaactttatatcgatgtgaccaacttatcatgagaacaagccaatctggtttagaatatcaagacctacctacactggctactacaaatatgattagatggagagattttcttataagaataaggtgataatattaaaaaaggattatgccaggttagatccagtatacaagaactgtgcaacacagctgtaccatcaccaccttactcatcaatgtcacaagtgaccgcaactgttgatggtatttgatgtccatcgattgtttttttgtcaatagacacaagacactgcaatctgcaaaggctagacatgttccacatgtactacggcatgtgtttcctactgtccacatcttgtgtctagcagaaaggcactctttcgcagccacagtagaccaactggaacgctattcaagaaattggtatcgtctgcgcaatgtcataagtcatgatggatattggtaacaaatgattaccaaaggtatttttcatgtgtgcatgtgttcaacatgacatcatgtaccataaaaatatttcatttacttgcatggctgttttcatgtgcaaaaaaatgacaacttatttttgcaaatgtgcatgattaatgagtggaaattcccggaatagtgcgctaacttgcacaaatgcatagttgcttgttttgagtttgggaaaagaatcaagttgaaaatagttcccgcgaagaaaagtaaaattctactccaaccaaaaggcaaactttttctattcaggacgtaaaaacatagctggaagtcactgagaaatggacccaataagataaatcctttaccttctcaacatcgcatccatattgacctgaacaatagagggaagtaacatcagaaactcattccactaagattcatttccacttccaactgactggccaatcacaaataataaaatgttaaggtaaaagaaatcttttgccctccactagttttagtaagcataaaagtgaaagatttggtattacattcaatgaaaccataaaaatggatcaactttcaacacaacacaacaccaatttcatccatgactagtttcatgacgaaaacataacttcagcagttgtgtgagtaaattatgcagcagttccgcatataaataacatttacaaacatgcagctattcaactaaatgtatagatgattttaacctgcagaacgctacccatgtatgtaagaaaaccagccaatgtccatgacattgaaaggtagaacgttgatctatgatggaaatcagtatgcttccattcttagttcatgcaagaacttagcataaaacaatcaccgtaggcaacaatctccttcacatcccaatgcttggcctaagagaacaacggtgcaccacaatgtatgttggcataacacaagtccaagtgactgatcatacaagaatcttgctctatttattcagggcttctacaatgtttcaaacaaaaaatcaatcctctgaataaccttcctataggacttcatcccaaatccaccatcacagcctcagacacatctgtgctggaagaggcatagtcaaacctaattgccacagatttgagaacgagatagacagcctattgccctttcatttcaagcattttgaaataataataataccccaactaatcaataacattttgtgttgggatagctaagattagtagtagtagtagtagcactaacgtcaaatattattgactggagggagtaataataacaattcatatagaatattagcagatcaggaagttaacacaagattcgcacccagaataagaaaactaaaaactaatcatcatattttctagttcaatcaaacaatatatttgctcctttcactagattggcttatgaactgtgcaatgttatggatggcatttggattctctttttgtaaacaagaaccaaccattccttgggggaaaaaatatatcttttgaatcgtagatgctctcctgttgtgtgtagtaagtgtttctatctttatttcattctttgatgtattataactctgctgggctcttacaacggtaaaaaaaatgcatttttttacaggtacgcttgttaggcaaaagcagcttaccgagcacgtctctgaccacacccatgccaagctccgaattatcccccagcatagagcacaggaactgctcggcctcttcaacactatacttgcggtcgccaccacttccgtccttccaagcgttgcccttccacgcgttcgttttgtttacgggcgaagtggcaggtcgcgtgtacgccttaccgatcacgtccgcaaccatcccggtcgcagccacggctaccttcttcggcctcctgctggccttcctgccaccagatccggcccgcggcgagagatccgggggccggggtggcggggagggctgcgtttcgggcgaggagccaaggatgccggccgcgaggaaggcgtcgccgccggcctcgcggtaggcggagtccacctggtcgatcgtggcggtgccgaaggcgtccagcagccacgccatgtcgcgccgctcgtcgccggcggccgacgacgacgcggtggaggccgacgacgagaaggcggagagggaggaggtcgaggccgcccccgacgacccggggttgaaagccgacgacgacgacgagcacgtggacgcctcgcagctgctgctcgactccgtctccgacgccaccgccggcgccgccgccgcagcagct

SEQ ID NO: 740 - DNA, 712 bp, Oryza sativa
ggtactgccaacgtgaggttattgaaaggttttgccttggcaagtctcattcgttgggacgtaggctcatgtgttgggcaagtcgcggagtacgggtaaagtgtacatccactgcagtgtgagtaaaaccaatctattcgaatagccgtgctcgcggatattgagcatcaggacatgtattacacttggctagactctaaattcttaaattgaatgagatgggatatgcatgatgattttatactggtggatcatcttctcgagagacgagaaggagtaaaccccagaaaaccattacagccagtaacgggaagccatctttgggaagacaatggatggtgaaaagaaccgttgctgtgtaataaatactggaattaaaactggactagtctatgctagataataagcttgtgaaaagaattgtgaaactagctttatgcaaataaaccaacggccatactttgaatatcactatctgacggagctcgtggctcctcaccgggagaccgcgcaggcccccctttgccggttcggccgggggcttaggtgaaatccaagctctctctgtatgtggaaagattgttctgctagcaagggaacgcgagacacggcgatgtatacaggttcgggccgctgccaagcgtaataccctactcctgtgtttttgtggatctgtgtatgaatgagctacaaagtgtgagccaaactctcc

SEQ ID NO: 741 - DNA, 981 bp, Oryza sativa
gtttccgcctgcacggctggcctattatgccgctgttgttgggcgtctacgttttcaccgaccggccgcttcgaccgccgccgactagtgtttccgcctgcacggctggcctattatgccgccgttgttgggcgtctacgttttcaccgaccggccgcctcgtccgccgttgttggatgtctacatcttcaccgttggctcactttcgttgccgtcgactggtgtttccgcttacacggctggcctattatgccgccgttagtgggcatcttcgctttcaccgtcgaccgccttcgtcgccgccgactggtgtcttcattgttattgatggacgactttgttcccacattggccacttctgccatcaccaaggggaatattacaaagctaagtcatcatttattttattctttatatgatatttttccttttcctctgcctcactacaccaattggtcttccattgagtagtgagtcgggggctacagatgttatatcatatttttcataatatttatcttgattgcttgcgacataatctgagtacaaaagtacctatcgagttatggagttctatcttcctatgctttccgttcggtttgccaatggatggttgcctttgggccgattcctagcacccgggggctcgttggatggaccgaataacgcaaggtgctaagtattattcggaataaatcaaaagcatagagataagataatttattttctgctcttaataattgcaaaagtacctgagtagtaaattctaatccgtgaaactttgttccattaatgacgaactcatatcactcatatgcatgtttgggaagtgcctaggccgactcccgatgcttggtggttatgactagtcgggcagagtgtttaaacgtacagagtcatctgctcggggaaatcaaaattgacaagaggagaaatacatatttataaatattttaaaatacttgattttttctcgagtat

SEQ ID NO: 742 - DNA, 544 bp, Oryza sativa
atcatcaattggccgacgcgacgctccacggtttcgctgttcatacctgtagaccgagaaccagaattcggtaagtcaggagaaacatgcacataaggaagtcaaattaaatacaagaaaaataccccgaggagaaacccgggtcgcgtcctccggcccagaatagtcaaaggctgggtgggctcgagcctggagtggctggatccgcctaccaatgaagtcggcagcgacttcataccccgacaaaccccgtactcggaggtcatcgatggcatcaatgaaggactgaagagaaggggtcaagacgggtttggcggtccaagacggaatcttgtctggttgttcctcaggaacaacaaagattggatctgaatcctctatctgaagatagaaccacctcgcctgccacttgctacgagaagaagggcactggaaggggatatagcgcaacttcaggccatcccaaagtcggaaaccaacgcatccagataccctggtggattctatccgacgcaactcgtagtagaagcgaaagaggtcgaga

SEQ ID NO: 743 - DNA, 592 bp, Oryza sativa
ttcatctttcaaaataacactgcattgatgaggttttctcaatatttgtacctgtggtgcttcttctgattgttaggttcgcttatatgacactgcttcccaaagaaggcctgtaatttcagttgattttagggagtcaccaatcaaggcagttgctgaggacccaaatggacatgctgtctacattggtacaggaagaggggaccttgcttcctttgacatgagaacaggtattatatgatagtagctggtgtgtgataattcttgctgatggcacttggaagtcaaaatacattctgaattatattttcagagttgtagcttagtttgaattttgtatctagtatactatagttcaaataaaaatctcttttcattttcgtactctaaagttcactctggcatgtgtatttcattgtactattttttggctaccatgctctgatgcttacataggtggtacaacattggttgtttatttattttcctgatcgattcatagttagttcatcatgtgctatatggatacatttaactgcctggagaagttttatttaaatttaacttaatattctgcaatgagcttatgcat

SEQ ID NO: 744 - DNA, 1208 bp, Oryza sativa
cgagttcgaccgccccctgggcgaggtccctcgaggatgacttgatggtcttctcgagctcctcggggagtcgttcgaggacccaggccatcctgttgaggtgcggagcgaggccttccaggttgctagggcgcgtcctcgtctggcctttccagaggcccgcttgccgaccggcgcgatccatgcgggagaccgagtcccaaagcatgtcgggccccatctcgcccgccaagcggagggcctcggcctccccgatggaagaatccagcgcgcgctgcatgtcagcgacggtgtgttcggcagccgcgaggcgagcggctaagtcgctttcgcccgcagccgccccaccgatgcgcgccctcgcggccagctctttctcccgtgcctcgaggttggcagcccgctgctccagcgcggctctctcggcacggacgcattcaaggttgcggcgcgcctgctcctcttgcgccgcctcgtgatgaaccctgagttcctctcgacactcaaggttgttgttggcccgatctttcggtgagttgatgaaaactacgatttggaagaaacgttgacgacccgactacaaccgtacaagacgttgcgttgcgccttagcgatcgatacacctctccgtgggttgttgatcttgccggtgcaaatcaaccttattcctgcaagcaaatcgaagaaacaagcaagaacaagataaaagcaatctgaattgcaaataggagttaaatacgaatgataagttggggttccgaagaacaagcagacggacggtctagccgacacgcgcgctgcaagcaagtagcaatggctaaactttaatctaacaaaacccaagaaaccctgaaggggtacctaactatttatagaggtgggaggacgaccaagagggtccaagggtcgtgctccaccagattggggcgcaccccacatgggcctcacatgggccagggtcccaaacaaagttacaagcccattggcccaatacaggagacgcagcaccttggttttgtgattgcggccaaacgagatagatttccgagatgaggctggatccgttggaaggaggacttcgagagctttccatcaagtactcacgggcccaaaacggagcacgtatgtagatttggcggccgtttgaagtcagcaatgtaacacgtggccgaatcagattgcagcacatggaggacttgatcttgatg

SEQ ID NO: 745 - DNA, 677 bp, Oryza sativa
acgttcgacctatccaggcggttccccaagggtcgccgttcgggaccgggcaaccgaacacgatggcccaacctcatgcgcaagtcatgacttcacccttcaccacaccatatccgcagctggtgccgaacaagccagggggtgagaaggggctaccgctgagcaggggaatcaagattcatccaatcccaccccagtttaagttcccacctgttccgcggtactcgggcaaaacggacccgaaggaatttctgtccatctatgagtccgcaatcgaagccgctcacggcgacgaaaacaccaaggcaaaggtaatccatctcgctctagatggcatcgcccgttcttggtactttaatttaccagccaatagcatttactcatgggagcaattgcgcgatgtttttgttattaactttcaaggcacctatgaggagccgaagacgcagcaacatctactcggcattcgccagaggccgggggaatcgataagggagtacatgcgttgtttctcgtaagcccgatgctaagttcaggacataaccgaagcgtctgtcatcaacgctgcttcggccgggctgctcgaaggcgaactcaaaagaaaaatcgccaacaaggagccgcagacacttgagcacctgcttcgtatcattgatgggtacgcaaggggcgaagag

SEQ ID NO: 746 - DNA, 702 bp, Oryza sativa
cctgcagcccctgtggtattctcccccggccttctgagtttctcctgctcgttttgaatttctacggtctttctttgctccatttgaaccccaattccatcgccttcctcagtatcttttcgcatctttgtgaggcctacattggggtagagccgtttctcgacctctttcgcttctactacgagttgcgtcggatagaatccaccagggtatctggatgcgttggtttccgactttgggatggcctgaagttgcgctatatccccttccagtgcccttcttctcgtagcaagtggcaggcgaggtggttctatcttcagatagaggattcagatccaatctttgttgttcctgaggaacaaccagacaagattccgtcttggaccgccaaacccgtcttgaccccttctcttcagtccttcattgatgccatcgatgacctccgagtacggggtttgtcggggtatgaagtcgctgccgacttcattggtaggcggatccagccactccaggctcgagcccacccagcctttgactattctgggccggaggacgcgacccgggtttctcctcggggtatttttcttgtatttaatttgacttccttatgtgcatgtttctcctgacttaccgaattctggttctcggtctacaggtatgaacagcgaaaccgtggagcgtcgcgtcggccaattgatgatc

SEQ ID NO: 747 - DNA, 1258 bp, Oryza sativa
acaccaattggtcttccattgagtagtgagtcgggggctacagatgttatatcatatttttcataatatttatcttgattgcttgcgacataatctgagtacaaaagtacctatcgagttatggagttctatcttcctatgctttccgttcggtttgccaatggatggttgcctttgggccgattcctagcacccgggggctcgttggatggaccgaataacgcaaggtgctaagtattattcggaataaatcaaaagcatagagataagataatttattttctgctcttaataattgcaaaagtacctgagtagtaaattctaatccgtgaaactttgttccattaatgacgaactcatatcactcatatgcatgtttgggaagtgcctaggccgactcccgatgcttggtggttatgactagtcgggcagagtgtttaaacgtacagagtcatctgctcggggaaatcaaaattgacaagaggagaaatacatatttataaatattttaaaatacttgattttttctcgagtattatatttatatcagatactactcatcctatatgtttgttctgcaggatccagatccagatatgcataaaagggattcatggctttaagcttatctcttacgctccaggaatggatcagtcagaacatcaccaccggccgcctcgaccgccgccgacaggtgtttccgcctgcacggctggcctattatgccgccgttgttgggcgtctactcttcaccgaccggccgcctcgtccgccgccgactggtgcttccgcctgcacggctgacttattatgccgccgttgttgggcgtctacgtcttcaccgaccggcttgccttcgccgccgccgactggtgtttccgcctgcacggctggcctattatgccgctgttgttgggcgtctacgtcttcaccgaccggctgcctcgtccgccgccgactggtgtcaccgcctgcacggctgacttattatgccgccgttgttgggcgtctacgtcttcaccgaccggccgcctcgaccgccgccgactggtgtttccgcctgcacggctggcctattatgccgctgttgttgggcgtctacgtcttcacgaccggccgcctcgaccgccgccgactggtgtttccgcctgcacggctggcctattatgccgccgttgttgggcgtctacgtcttcaccgaccggccgcctcgaccgccgccgactggtgtttccgcctgcacggctggcctattatg

SEQ ID NO: 748 - DNA, 616 bp, Oryza sativa
cgttgagcgagtggaggatcagatttcatcagagaaaattcctatgcaagataatttaagctctcagccgataatacaaaggataaaaggatatcttgagaaaggccggattatttgatacataccggtggaggagggttgaaggcgttatatggtaccactggcagaaggtgtgagtagctaaccacgatagcatttgagaagattttatacattctctccttcataatcctgaactcaagagattctagatcttcacgattagggtcatttttgccatcaaactcgaaggcagtgtgggatctctccttaataggcgccagtcggctcttgatgaagtgtcgagtaatctgttccccttgcagaccttgctcttcgattttagcatgcgttccatcagagtaagcgcttgagcagcttcatctcccattggaagcgagttccaggtttcttgaaatgtcggaggaaggcaggaatactcgggaagcgctggctcaggattttgcacataaaaccaatttgcatgccatcctttgtttgaggttttgaaaggcatggagaagtatttctggcctaaggatccccttaactgaaaacctgccccaccaacgacgca

SEQ ID NO: 749 - DNA, 1334 bp, Oryza sativa
atttagatgactccttggttctaatcaaatgtttaatttatctcttcatttaatttaagtcttcaatgcataaagactaatataggaacaacttatttagaaaaacttaaatataaaatatgtgtaacttttgtggatggagggagtatttgaaaataaaggtgaatgagtactctctccgtctaaaaaataaactcaacctcgtaagggtgtgtttagttcacgcgaaaattagaagtttggttaaaattggaacgatgtgacggaaaagttgaaattttatgtgtgtagaaaagttttgatgtgatgaaaaagttaaaagtttcaaattttttttgaaagttgagtatttttttttaacggagggaataatgttgtgcagtaaaacccgtcagactgctgtgtggactgttgtcccgtggttcagtcaaagatgccatttataaacccttgccttaaaatatggagggatgtgtagctcagctcctggagctgacaactccgttagaatagtgcaggtatgtgaagaagacttgtatggccaaacgtaagggttagggtatgtactcctagggttagagtaaagatggaagctttgccgtgacaacatatgcggactgtatcaccgcgttaggttttgaagctgggaggggcggagggcagcgattttggttggtagtagtacgggacggcggcgaaaaaaaagaagcaaaagcagtgctcccgctcgccgcgctcggtttcgacttccaaaggcaccgccgcggcggcagcttccccgtctttattaccccaccacgccatcccttttttttcacactcccgccacgcctcccaacgcccccgaaatctcgtgtccctacgtgccggagcagctgcgagcttttgcacccacgctgtgagccccacccgcgtacgccgcggcctacgccgcactccactccaccccaccctactgcgccgcgccgtttcaaacccgttcctttcgtttcaccgttcccaccacgcacccctctatttatccccgcccccaacaacctcgctgcactccacactccacgcctccgcccgctctcgtcgcagcgcaccccgtcgcgtgcgacgactccatccccgtcacaacaatgtcgtcccgccgagacgtcctcgctgttgtcctcgtggccgcgctgctcccgccggcgttgtcccgtgggctttggctggggcaccacgggctggggcacgggcacgggcgatggcgcgcgccgcatgtcggcggacacggccagggacaggggccgcagcagcacgcgccgctcggcggcggcgggtggtcgtcggcgcacgccacg

SEQ ID NO: 750 - DNA, 602 bp, Oryza sativa
tccttgactaaaatagaatcccaaaaaaataataataataaggcacaggaagacaaacacgataacgcttacaagttattttctaaattcaccttgaaggagagactacatcccttgtagccctctcaaccttgatagtaccagtaccatcatcttcttcaacatgtgttcgaccattttgtgtggcatccgcactgctttttactggaaacttcggtcgctctctgccaataacagcaattgaggaacaagggaatcagataggtgttgagatgtctcaattatcagcaaaagactgcttttaactcttctctctgttatgaacagaagtactataccacataccttattctatccagaagctttggagattttctagcatttcttacaaagcggtgcttaagaagatccttggcacttagcctctgtgagaaagttataaagggaaggcgttaagggcaaggacttaaaacacaattttttgcaggttagacatcaataattatcaaatgagattgataaaaaaagcataaagcattaaaatttcccccaaacattacaatatgccaaatttgttggaaaaacgggcatatgatgttttg

SEQ ID NO: 751 - DNA, 712 bp, Oryza sativa
gggatacataccgcatacgggttgcagaacgcagatagtactaccagcacagcgcatcgcgatagataaaggcaagcaaacaagggatggtccaaaccgagctcgggccgcgctgccatctcgcctaaataaaaccgcgctacccatcgaccgatcctactcgcacgcgcacacacccaatcaaatgctcctcctccgccgcctcctctcgctgagctgagctgagctgtgaaatagtgccaccgagtgagcgctgagctgagctcgaagcaagagaggaagaggaggaggagggaagagggggggcgaagatgattacggcggcggacttctaccacgtgatgacggcgatggtgccgttgtacgtggcgatgatactggcgtacgggtcggtgaagtggtggcgcatcttcacgccggaccagtgctccgggatcaaccgcttcgtggcgctcttcgccgtgccgctgctgtcgttccacttcatctccaccaacaacccgtacacgatgaacctccggttcatcgccgccgacacgctgcagaagctgatggtgctggccatgctcacggcgtggagccacctcagccgccgggggagcctcgagtggaccatcacgctcttctccctctccacgctgcccaacacgctcgtcatggggatccctttgctcaagggcatgtacggggagttctccggcagcctcatggt

SEQ ID NO: 752 - DNA, 16449 bp, Oryza sativa
aattttgggacgaaattcaaatgttaatggtagctatatttggggatggagagagtactgttctctgcgcctactttcctaccaaaggcatctccatctgctagctctttcctaggattatgtaacgatctgtttatcatctataataaaccatattgaacactttaccagcaaaagttgtccagactcttcctttatatgctacagaatttttttttttgtcattgccatcaccacactgttagaaagctgtaagagagaaaagcctttacgttttggggaaaatcccctctcattcttcttcacctagactcctacaggatccccccccccccttttgccccctgttgctgcatgctatacatccatggatgatgcaccttttcctcagaatttcgtggtgagcattacgttcgtgcattacttccatagcaagatttgcacggttgatgatatcagcccaagtataaataacgcgaccttggctatcaactacagatggttgaaattgaacccatttagattgaaagccatagtcctaatacctaaagcagtgaaccaaatctctacctagttgacattgataacaacgatctaatgaattatgagtttaatagatcctctttagcataaagatgtatatttcttactcatcacttattcccaaacctcgtatggggcaaatcgttttcatttaccatctcagggaaatcctgcctcccaaccactagcatcctactaatggtgtgttgaaacaagatgcagccttttcttctattcctcatgaaatctattgaacaattactaagcaatttggcatcaacagaattgagaagggagggggatgaagaaaacaggaggcaaatcaggaattcagcacttgtagattccataggatttcttataatttggatctgctgttttggtatcattcagggaagtaaactctccagtgagtggaattagaagaagccaaacagcacagttgaatagtataccttctgcataggcaacccaaagtaaaaataatacccggaaggttaaatggtataccttctgcatgtccacacctctagaacacacagcaatactgtaaagagacccaccaacactagttgatggaacctcaattacttgacggctagccatgctgcaacatcaaacatcaaaaaatacataaataaaaaacagagcaagcattcgcaaatgcagaaaagggaataaacttgattgtgtaccactagaagggtatgtgcttaaaattattccagtaccttcagccttttctctaaaacaggaagggagaattctacccacatctacggaaataaaatcctactatctctaatgttccaaaacttctcaaaatgacttcttacactttattagtacactaacccaaaatattcgttcattaattaaaaaaaatcaataccaacaaatgatcacatccagaaacaatgctgcatagtactatgtcaatcatagtccctaccactcatgtgcatagacatgaagttgcacatagtttagactgagaacaacagaggatttcatcattgcttcattcaacatgaagataatgatgaaaagattgcagtacatacctacaacacctttggtaatcctgggacacttcagactccaagatgtacagatacatcccagataatacaacataacttgtatgccattcagctagcgaataaccaagacccttgcatccaaaataaaatatacaaaactctgttactgtactgcataaatgcatcatatgagaagagcactcaagaaaagaaagacaaggcaataccttccaaaccaagttctagcatcaccagctagatcagcaggataccaaggtgccaggttacaattttcacagctatcagaatcttcactatcacttcccttcaacttgcaaagtacaccaagtagttcaacaatcttgccgtatctttttggtgagaagtgaatatccagattcggcacttgaaaagaaacacgagttgatggataactcgggtgtggaactttgatcttcaagcaatcacagaataggacagtcaatacagtataacacccgtacagaataatttgcattacaatcactaaaaagttaacagcgatgcatccctaagtgtctacgtagaagtataaaacagtaacagtatgaagtgcaaggacaatttatttcatggagtttgttcccactatttcctcccttagggaaaaaaggaacaaaacattaaaaacatataaattgtttctatgacaacagcatgatgcactgctccaacaaatagttctcaattctagctttctattctttgttgaagctattagattctttgctgaaacatataaaatgttccgataacaagagcaacttaaagtatgtgtgcaagccattagatttactcagcctacaaaaatatacaattgatcccctcaactacaataaatgctagctctctcttctttgctaaagccatatatgccctccgtccgataaaaaaccaacttagtaccggatgtatatcttagtactacgaatctggagataagtccagattcatagtactaggatgtgtcacatccagtactaggttggttttttatggaatggagggagtatctcttattttcagccaatgatgactgtagtaaggtacagattgtttgataagtgttgtaattccatatgtcttagcccaaagcctaaccagataccccaagtctacattgacatgcagtttagtatgtggtgtccagatgttgaagttcaatgtatgcctccatctagtggttttagatagctatagattgtgaatagaattatagaaccaatctgaggcccgctagtccactgcaaccaccagagcaactatagcttatggtatacaatagagcatcctacaagcaaatgttacagcatatggtatgtaacagagcatcctacaagcaaaggttccaaaagaaaaaaaaaaaggatcaatgcccatgcaagggggaaatgatatgacaactcccattcttcagtaagccaaggaataactgagtatttcaaaccacaaataatcagtacttaaagacttgacaatattaaaatacttccatttatgttacctgatcaattatcactgacattccacaacgatctagaagagaacaaaactgattagcatcaacagtaggacctgacagcacacgctgattttctggtacagaatatatgtcttcagctgtatcacaaacaacaaaagcagccatatccctcccagcaatataaaaccgtgaatataaactgcgtctttcctcttcacgtgtgccgtcctataattcaatggcatggggttaggaaaagaaacagcacttgcatcaagaattcatgaggtaacttacccttgtatgcaacgtaaaatggcctaaatccagaacaaaatgttcattccccagcaaaggttgacaagtgattaaaggaatcctaacttttggtgcatccaaatcaatatcaagtccaaaactagaaacagaacaataaacagtcagccaacataaagacatcataacactgttacaagcaagttatggatattggaaatttcttaaccataacaaaataagattgcaagaaaaaataacaacttggaaaacataagaaagcaggatgaaagtaacattttgtcaaacaattaggacacgaacaagaatgcttaattattcatggcagttcatgaataagtaaagaaaactgatgtaaaaagtcttcctttcatatatgtatctcacatttaaacagatcatgcacactaaacaagagtatagaactcaaggccattaagattgagcgtagataatgagaatacatgtacctgctctgctcttccaataccatctgaagctgctcctgagctctacgtgtgacctgctctatcttcatctgcagttcaaaagatatgatcaatcattatgactatagcgtcctatatatccaaatagtaacgacgaaatatcaaacaaactgttccacaacatggtcatgagtatccaaattcgaaagtaaacttgcctgtagagcagttgctgtttccatggttactgttgggctaacagctttgctccgtttaatgaactctagaaaccgttcatagcttcccttcaaaacctaccgaaaaaacacattattatgccatgtacataaaaaaaatgcaatagcctgataaagcatgtgcattaaggaatagcgatgaaagtaattcacctccagagctttctcaaaatcctactaaaatgtgacatgaggaagtgaatttagtcctaaaagcataatgaacacaagatacaaaccgtaacatggcatggtgatatctttgccacgagctgccaatccaggtccaagccgacaggcgcacgcacaaaactgacatctagagcattactctttccctcactgacaacactctgcaaaaatagatattattccaaaacataaatgtagggatagaaggcattcatgaaatgaaaaaaaatgttgagcaatgtaacactggaaataacacttcttatttgcaacatcatagctcatgcaactgcaatggccatcagacacccaaaaataaaagcaaggagtaatacttagtaattaagtggatagccatcatctataaggtcaggtgcaacctaatttaaatgtttgatggctagccacctagaaccttgtatataataatgtaccaattgcggtttgctaattaaacaatatggttgacgaaaacttgcattcaacagataaacaatatatttcgtgctacagatgaagtggcatttttctgagtcacatcctagagtccataggaggtttgcagcaagaaattcaaacaatcgcttcatattcactgacctgagcaagagaaccttcaggagaagacaaaccacaatatctcaaagtaacatcacaccgcgtactcttgggatacaatttcgtgaccacttgaagtttctcaaatctaccacacaaaatttctgtccggtcaatattgatgatccttgcagcagcttggccaatagacacatccaccaagaatcgggttgtattcggggagactttttcaaggggggaagacagatcatcttctggttggtaactcaacagcttattaatggcctgccattcttcttttgttaatctctcctcctcatctaactgcggttctagaagggcattctcttcagaaggtaattcagccgagttccttaaacaagaaaacaagcataattatgatgtgacaaaaaatgattcatatgcactcatgaaactatccattgttcacaaaataaatactagtaataaattactcccaacaagttaacaatggccacattgatcatctatacaatttgctcgttataatgtcactaaaccgaaagatatatgtgaaatcacactcaatgaaagaaatgatttggttgaagttatatatgaaatgaaaagctgctttctgagcaacttataactgtcctaaaaacaaaattgtctttggcaacatgtcaataaagtactttcctttcatgtatgtacccatcgattgcctaaattcaggggagcaataagcaggcactttaattaaattagtatttttaagttttgtgtaaatatcgctactattataaaaattgataacgcttttgcatgttttttcgtctgtcacctctgtgatcgagtcggtctcataccccgcacgctcgcataaagatgggcactctctacacatcctcccgtacgtaagacggagcctctcgctcctccctcaaccggcatggccaggtgaccttcagcccatcatcaccaactgagcttgcacctctagctaggccactgccctggccagtcgtgccccactggcctgatgggcctgctgcccaaaaccatgcagctttgaccacttatgtgtgtgaagcgacaaaaggtttccacggaaacagtaacccgaccggtacccctaggtgaaacgctatcctcttataatttcagttggatctcttctcttctcttttcattttcgatagttttctctttgtgatttttggcacctgtacttatcgacttgcgtacccatcacattaatccttccatccagtgcttgtgtgccatgccttggcttctcattcagcataatccttacccaaaccattaatcaagattgacttcaaacctctaatatcagtagacgaaataaccatctaactaatagattttccgtgacccaaccatgtacacactaataaattaaccaacacaagccatcacacactactacaaaaaagaattgtgtttcataactaaacatgtacaaacaacgctaatttcccttcacaattcatcaaccatacacactaattttccttttacatgtagcatttgttaccctaagtatatgagaaattattgatgattagaattttaaaaagttgaccaaatcatatcataaaacatcaaatatttacgactggattgagtaattttgttcagttattttaaaattgtctttgcccattgcaacacatggatattttgctagtaccttataaaattagtataccgttggggcctcccctactgtttcaaggttaagaaaaaaggtatttttagtagcaaggctgcttcacaccattgttattctgcaacctgcagtaaactaatggcccaaaaaaaagcagtaacagcaaaaattaggcacgagaaacgcccaggggtcttccggctagctcgacaaggtggtgggctagacgacctaggttcgaagcctcaccccttctaattatttgatattaggtccttccctaatattcgcgtcttttttgcaaacattaggcacactatgcagtatcactaaccaacaagtagcaggtgttgcaatgggccctagattccagcaggccaataagccaaagatatacgattggcttgtaggtaaaaatgcacagataaccatataataggagataaatgtactgctatacacacacctaaaagcaggtataaggattgcctacatatagttgcttattactgtattgttgcaaaggaactttggaacctgcaacttgaaactaacagggaaaaagaactaatggttgctagaatgagtaaaaacttcatttgatcacgtattgttacttttatcctcctccaaatttaactaagtgatgctcccatgtgcaatgcttaatgaaaaagttggcaagcattggcatacaagtttcattagtcctaccatctacaaactaaaccatttaagttgcacagaagttaccaacaagattgggaacctaagttaaaaagaatatctttctgcctatttctatgagtacacctcaaaggagcaatagtacagaaaaatgagaatagctgccacaatgaacataatatagaatggtaccataaaaaaattagtatcttaaaaatagacagaagcaatgaacaataaaggtacagatattattatcaacttattggacaaaccatccaaaagtccaccatcttctctttgatgcccccttcttatgtaatatttcctttgatttcacggtctcaactttagcatgtcccaacaacctgaaagtatttaattatagcaataccataaccagatgaatggtgacccaaatgaaagcaaaaggttacaaaagatacatgtacatgttctgtaccgcacctccaaagtattatgacttttgtgtccagaattttctctatctgccgaatttcggacatatcaacattagatgcttgttgcaataatgtggcatacaagtgaacatagcgtcgacgaagctggcagagatgcctagttctctcccatgagaaccaatagctgaaaaaagaataaacaaatttcataaggaagaaatcctaatttgtaaagaaagatgacagcatatataattttttgcatcaaaatatctacacaattcaagtaattgcctccaagatgcaagaaaaatgcaacacacagtccatgatgatataatcacacatgattttgtcaaaaattgatcaatgtagcgccatgaaaagaaaaaaataacagttgacagactgattgtagcaaatgttctcaggtgatgctaagagcctaaagtgtagcttgcaacataatcccaatccatccttacaagggccaattcgcctggttgacggaaccaattctgttagacagaacatagtaattgggttcgactggcatttagaaagaaaaaagtcaaaaaaccacacctccactttttataccactaaaaacccaaggccaccaagggtaataacatggaatgcaaacctcctacgcagctacgctccccccgagttccttgtaccacttgtgctgtacgttgttgtaactccatgctgtcctttaaatgcactaccccacagacatgggttgcttcacatgctgtatcaactaccatcaatgcaaattccatgtgccaatgagctgaccatggcaatgggtttgtcagggaactgatgatctgtggattagcacagattcttcacggaatgtaaatgttttacatccattagaatgacatgatgcacaaatgttccttcacccacctacgcatacctggggcccaccaacagcaagcttcacctgctgccagcctgccaccaagtacgagtggcactggcaattagcatactgctataaagatagccacctagctctcccaggcaacaatacttaggcgctaggcatcagtcatctttgaagccaatgtccagttactatcactaagtagccatcaagcttaaataggcattaagcaccatccagctgaagtagggggggaggggcaaaaatcagccacaaccaagcttacttggaacctgatcaatgggattgaggggcaaaggccatggatgattgaaaaggagggtcaaagtgggtagtgcagtagtgttcttcaggatgctatactagttcaagcagggacataactccagtaaatctggggaagatgttaagttcacggtcaataattacttaattagatgagttctaagctcctgagcagagataggctagttattcagttagatgaattatgtttgttcctcgagtaattaggtagaaggtgtttggctagttcagctaggttagctgattagttagttcagacagtgttagcctaagagtccaagtcagcatgttgcctaatcattcaacttttgggccaagttattgtggatgatgtgtttggacaattatggagaattaatcctgcgtcaagaatgccagcaagaaccagaacatcattatctccctcctcattcctgcacatggcttatggcaagtcgagcacattctattgccgctcgttttttgttctaatctttccagagtttaacaggaagctgaatttcgaataagatcaataccataattttttctgtcgcagaccagccagcacagcataacgccaccaagcacggcaatccactttaactggcacaataggccgtaaatgggacacgtcaacacgtgtcctgaaccttgaaaatgtttccaacagtttaatgccatcataatactgggcctggtgcaatagtgtaaagagagtaagcacttggtcaatttcacaatttaactgatggagaaggcacaattccaaggtacctcagtaacagttagtgaaacatcactaagaacaagtgatgctttctctaaagggatatctggaccccctctctcctgctttccaagtcgtttgtagttaagagttccatttatagggtaaactaaatagttcctattcattgcccaaacagaattgccagaatgatcatcaatgccatcttgaaatatctgtgggagatcattctaggataagaagcagcgaacaggtactgaagaatgaagttgttatgaaagacaaatatataacctcgccccattcagtaggatttagatcttcccatttcttagcaagcttccacgcgctgctgtcagaatcatggtagatggctagcctatgcagttcgaccgactaaataagggccaaaaaagaacataaatgcattggttataaataaagataataataataataaagcaaaagcagatgatcagatggggaataaactaaaagaatatcggagtttatgaaccaattgattattaatattgtgtttgtgaacttgtgatataatctgtccaaacaagctcaaaaaatggcaaaaggccaacaatagcttcacaagtatcacataagcaagcattcagaagaaaagaaaaaggtccaagagcacaataacaatgataaacaaaacataaacctggtgaaaggccaaccaaatttagttccaatgtacaccatatcgctgtagaaccatggtatataaggaggtattacagaattttactcaagtcttgatgaacattatctaacccttattttaatttgatcaatcagcgcttgaattttgacaccaccatgttcatgttagattccctatatattccctcaatcttaataacatttgggacctccttcggtcatcccggcaaaaaagatgccctatataaaaccatgcagaagggcagaaaatggtcgaatgtctcaggatcagtaacaagctaggcataacagagctggagtttaagttgaagttggaaccaagaaaaagagaatggcaatatgttggaacttataatgatatatggctcttaatagttctactagtagcatttacgcatgatgatccactgatccacctcagttttgttactaatttatcacatgatgatggactacagcagcgcaaccttaatactgggatcatattaaaaccctcggtggctcaaagggagcagattatgcattgagatgttacatttcttcgctatttttttgacaaggctttcttccctgatttctcatagttgtagctacgatttgccaattccaccattattttttccactcaagttctttcacttagatctagaaaatcaattcaatacattcacttgcagctttgatcattagaattaattgcaatatattctagtaaatacaatattatagggttagttttaactaaatatttgtgtgcagttctgtactggtggttgaaagtcaaaaggtgcacgggttctaaaccatactccctccatactcataaaggaagtcgtttaggacagcgacacggtctccaaaacacaactttgacttcttgtttctataaaaatatttattgaaaagtgatatatatatacttttatgaaagtatttttcaagacaaatctattcatataatttttacattttcaaactcaacaacttgagagttatttatgatttatattcccaaggtttgacttaaacattgtcctaaacgacttcctttatgagtacggagggagtaccaatttagggacagaggagcatttatctcaaagtctaaataacaattgtatgctgatcatatgctatggccaggtaaccaagaggcaatctacatacctttgcataggagatgagatgcctatcgaggcaggttaaaaaataacagaacatacagttaaatgttacataaatttgttctcaccttccgcagcttatctaatgctacaccagcatcaaatgtctcgttaccgtcttcgtcgactgtaacggctgcaagtcttgacaacgtgaagccagatgcaaatggatgcccagaattgctggtagaaaaacaaagaataaatttacggaagacattgggataaaagaaagactaaaaaagtgtgcaaatgacttagcatacctgacagaatcttcatatctgatatgcacgttgctgatggtgactttaaggtttccaataattgttgatattaaattgtatagccatgaattactccctggtacctgcagcatccaacaagcactatcaaaaaacaagcaacaaaaatgtgtgtaatccatattaaacaatcgaacagacaaataagagaaatgacagaaaccataataggtattaaaaacagtaatggacatccagaaacaccaaaacccaacttgaactttcacagctaaccttttagaactattgacctacaaagtttaagacaaagtgcatgttcagatgctataatactttaaacctgtactatatgataaaacttagtgtcatggagtcaaaggataatccaaaaaaaaaaagttgtttttttcccatcatcacagttagagctacagacagaacaataacttcaaatggacaaatatccccaggaccacaattttgttttccactaaaacagcatgctttcatggaatcgactataatcaagtcatcaattagtcattaatgtgtagtcacccgctggcagacaaatagcaccataaccacaacttcaagtaagtcaggacaatggactaaaagtaacaggctagcttcagctggacaggagaatcgctgccttggcatgcaagagcagccagatagagtgacaacaaaggagcaagatcaaattcgaattgtcttcacaaaattatcctcccgggtaacactatttatttgttttaagttatgacaaaaagaaattgagataaacaataaattcttccatcaaatcattaggaaggcaagcaatgaacaggaaatattcttacatcaaaggtataggtacttcaatatttatcaaatttaaaaatacaacctaaataaaaaacacgtctgagctagaatatttagccattaatgaatgaatgaatgaatgaatgaatgaatagggaaattggaaagaattggcacacggtcaattaacaggagagctccagcaatattgtttatgaaaaaagaaattaatatcaaaggccatcaacctgaccatacactcgaatgtaatattacaacttcaagaagaaacatgatatccatctatgggcacctaaaattgctctaatattgtgcctcaagaagtttgtttttatatgattatgattgcacttgttgacatcatcttttactcttataaaatgaggtgaggtgatggtgtattcaacatgtcactgatatatgtagcatgactttcatgtttgcatgctcttttgtaatatttgtattctttgcaagtgcatatatattcactgattgattcagcatatgttttgcattttgatcttcagactatagggcacttttttttggcatccattacaatggggaagtatgatgtaatttccaaatgtcataactgttcacaactatcagagtattgcttgccagaatatcgaaatagaatactagaattaagctttgtgagagaaacaggagaaaaaaatcatacaggtcctcctttcgagctcctacttgttgcttcaagagttgctgcctctgcagcctgcggataagaccattagagcttgagctttgcataaagatgatcgtgagcattatctttgaggggaagcagagaaataaaataggtgaagcagaagataaaagcaagaaaacaataaaagtaaaaatctggttcataaagctataattccatataatgattgctaaagcatataatgcaaatatgtggaacagtttcaactctcgtatgattgcattacagatcactatgaaacatttgactcttggaggtcagctctcacctcagtcccatctgacctaaattaacctaaatgatacacactcgtcacttgaatgtaccacacattgcatgactacttttacaaacactattgtattgtaccagctcctggaagccaataaaattgcaatttctcacttgcaaattgtgcataaaaagttcagtgctccatgtttaattttttttcctcgaacatgcaggagagctgtgtatcattgtatcaaaagaagaaaccaggatataaagccttataaaacccgccacacacaccacactgagactgttgaagttgcatccgtacccgagactaacaagcaccagacaaccttggccaacatttctgctttgcaaatgccgtataatatatgttaattaaagaataaattgagccataggtacaacagatcgtgctgtgggtgcacataggccatataatttgatgtttgctccccttagtcacctttcttgttttaagcggagcattcagcacaaaatattaccctgtgacaatgaaacgcacaagtagcattgactcacccatctctttatgtgtcccgctctcagattcaccctcctttctctttgttttctctctatcccgatattgaaaataaatgtgatattatgtttttacctttctgttctgcaaatacatatgcacagttgatgcttatgaccttaagttaccatgaccatgaatgattacaaggcagcacaatgcatgtttcggccatgtgttaggtttttattaccctagtgtgcaccacctaagcaagctcagtgattcaaatgagcaattctcaagcgttgcagcctgcatgcactcaccacccacaagtagtattataactgcattttactcgatacaagtgctatgtttcatatacagtgaatagtcaacacatagtcttgtacgcacttcttgtttccttctgttcaaataaattcggagatagctatattttgtaaagaaaaggtttataaatgtacttgaaaggagtttggaggaagctgcataacctggtttgtggtcaagcggaaccaagtttaaaataggtgatctgaccacccaactaacatctaacatgatctcacaagtcacaacaaaagaatgaacagaaaacaaatattatacattaagcacctaacaaataaacaatatcatggtgaaaatattgctctgctacatcaattaggcatgttgatttcatcaggtggtcaaatacataaaaaaaggaggtacactaccaagtacaagtgcctacaaaacatacattatgatgaatacccattccttacaagaacacattcaatttaaggttatttaacttatttcaaattaaccaaattgtctcgaatggaaaaataacaaaaaatcagagttttagttccatcataccaacctattgaagtagagcctaaagtaattaaaaaatgccccacatataattgtatttcattattatggtgatcaaatattcctacagtggtactgtcaaaaataaatacttccaaaactatacttctgaacctactagtctacaagagaccttatgaaatggagcaattaaaaccaacaaacattttcctcggatatggagaactttcagaggtattgacttcttgttaacaacatatagtctcaaatttaactaataatagatagttctattgactgttcaaacaagggggtaaaaaactcatgagagaagttgcaaacaaacctcaatctgctgaagttttgcttcaaaaagtttctctctatcttcttcctaacacaaaaatgtgaaaaatattaagaataagggacaaagaatgacatgcatagaatagaaatggcatcaccaataacacaataccaaattatagttacataccttcagagtctgtccatcaggggcaggatgagcaagaacaaacagacgatcaataagaacaataactggctctttacccaagcttttccatggaacctattaaaaatcaatattttttgtgtgtgaacaattaacaggtacaagataaacaaatacagtagcaaacttgatattataagctgcaggcagcaaaatcatgttcagcaattcaaccacaggatgttatcatttgctatcctgccaaaccaaaaacatacaacacaactatttgtttccgttttaaaatgcttcccaatgtacccattagatgaaaagaatgtaactgtacattcatcaataaagctagttgctgatggttccttttatgaatccttaaataaagttttactaaggtttgaggcccatttcaactgtataacacaagaagtgattgactatgtaaggttgctgctgtgaatgatttggtttgctggccaatctgaaacttgaatgttcatggaatcctctatctgtgcttcctccctaggaagcctcaaaatttactgccgtgtcctttgttctcactgtttggtactttctatcaatgaggttctttgctgtggagctgttgccagagagaaaaatgagcgctgcttcattagaaccaagaagctaggggttaagttgtctgtgcgcatattcacatatacctcattttgatgcttcctgatgtttagttaaagcaacataggaaattatttgcggctatgtttagttaaattgcatgattctagtattctgctagtttttccatgtcagaaaacttagggcaacataagtcaggctcagaaaacagaaaataacaagtacctttaaagttatggtgccaacaaacccagctttcactgttactggaagccgaagagaattcagtg

SEQ ID NO: 753 - DNA, 79138 bp, Oryza sativa
aacttgtttttgttagattttgattctaggtatatagcatccatacatataattagttaggtatgtaatcatggattgtgaaataaagttaaatttgagttgttttgttgataagtataggtatgaatcaaattattataactaggtatatactcacaatttgaaaattttgaaaaatttgagtgattttgtgcattagataccatggtgccccatatgagtgtcctatatatatatatatatatatatatatatatatatatatatatatatatatatatatatatatatatatatatatatatatatatatatatatatatatatatatatatatatgtatatgtgtgtatatatatatatatatatatatatatatatatttcaatgcataaaaaatatatacacatatacacaaagtttatatacgcataaaatataaaaataaataaaaaaatacatcatgaatagaaagtttgtatacgcgtatatacaagtttatatacacatatagaaagtttgtatacgcgtatagaaaagtttgtatacgcgtatagaaagtttatatacgcgtatacaaacattctatatgtacgaatacaaacttggtatacatacgaatacaaacttgatatttatacatctcgaaaaaaaaaggaaaaaaagccgaacagaagagaaaccggaaaaataacaaaccgaacggaaaaaaaaccagaggaaaaaaccaaacagaaacgaaaaaaccggtgaaaaaaaccaaccgaacataaacgaaaaaaagggaaaaaaacaaaaaaaacgaaaaactcgctcctcatccctgttagagtttgtgtcgaatatgtgtacatagtcggttacagtttaggactaggagttgtaataggtattaggactagagtatgagtcggactctatccaaggttctctcataaatagagaggcatgcctgttgtaaccgcatggcgacttagcatagcgagagggagcgactgaactccgttaacaaatatcgtgtctcggtgtcgtcatcgttttggatctcctatgacgttttcttccgcgtttagctaacgatgttgatttcggggctggttttataacaagtggtatcagagcctacatgaggtccatggtagaggcgcgatggaggtgctccacaccgcgtagcctgctgtaatgcccacggaggggcattggcgcaaggtgaagcatggcggagatcaacggagtcttgatcggtggatcgaacacttctggcagcggccggaaccgtcgatggctgctttcaacagggagatgactagacgtggtgctcgggttgatggcggcggaagcgattggcgatccaatcggtgggtcagacacttcgggcgggtggctcggactttccggtgagctactctcgacagggagacgtgcggccgcacgctcgggttgattgaagctggaggcgatcggcgttctcgatcggtggattcgaacgctctgggcggggtggcccgggcctttcgatgagctacgttcgacagggagacggctagacgtagcgctcgggtcgttcggcggctgggaagacggcatgcgacttgtcggcttcagctcgcgactagattgatggcgtttcaatcggaagtcggagcgggtggatcctataggctgttttggaggtgttgacgaggtatttgcacgatggaattgcttcaaaggcggcgtattttgtggcatatggctgaacaaagcctagggcgaatagagcagcatctagtagcggttcaaccctggagaggttttggttcaacctgtttttccctctagcagacaagaagtaaaccacgtgggctgtagatcaatgacaacagttgttggtggagtcgtcggtggtgcttggcattggtgctagatgttgtcagagatacgaagaagcccaggaggtcagggtcgcggcggtgtgcgcgtcctgcgtcgaagccgagccggcgacggagatcagggcgatgccgagaaggagctggctagggttttagctaggtcgtgcagggttcggtcttgagggtttgtggtgtggaagacacggacatggagtcgtctccggttcggtcacggcgcggacacaattgaagacaaacagtggataccaagtttcaacacgaaggggaatcggacgaggactacgattagttcatgaatcggactcgattttttcccaaataaaagcagcagaggaccacgggattgcaacaacgcaatcgaaacaaatcacctagcagagggcgagattcgtacccgattttcgcaaaggcggaggtggtttgggcggcgaggtcacgggtggctggaggcgcatccttgcaggcggtgtgtggcggcgtggtactcggcggcgtccgtcggagctcgagcgagagcttgcggcggcggctgcggcggttcccgacgaagaaccggcgtaggtcttcggtggcggtgctcccaaggcggcgcggcagcctcttgcggggccggcggctccccaaggtccggcggcgcggcggctcctcgtgggtcggcacaggcactagacggcggcgggaggcgatggtggtgtgcggcggcgcaaggcagcggtgtgcggcagcttcggcaacgaggcggcggcgcatcgggtagggcggcagcgtgcgcaggagggaggagcgaggaagccgaagagaaaaggggatcggctcgatctgagccggtctttgaccgctgttgtctggtggttgaccgagtaaaggagaccgagtccggttttttggagaaagagaaaaaaaactgattcggtccggctggtactgttcgagttagtcggtggggtcgattgaaccagggcagatcaatttaacagggcaacagctattgagttgattatcgtcgatggcggcaacggtggtttccaaatttgaggtggtgaagttcgatggcaccgggaatttcgttctctggcagatgaggctgaaggatctgttggctcaacagaggatatccaaggctcttgaggagacgatgctggaaaagatggatgctggcaagtgggaggagatgaagacgcaggcagctgcaacaatatgcttgagtctctcggattctgtcatgtaccaggtcatggatgaaaaaacgccgaaggaaatttgggacaagttggcaagcctgtatatgtccaagtcgctgacaagtaagttgtatctcaaacaacagttgtatggtttgcagatgcaagaggagtcagatcttaggaagcatgtggacgtcttcaatcaattggttgtggatctaagtaagttagatgtgaaactggatgatgaagacaaggccataattcttctgtgctcgcttccaccgtcttatgaacatgtggtgactaccctaacgcacggcaaggatactgtcaaaactgagataatttcgtcgttgcttgcacgagacttgagaagatcaaagaaaaacgaggcaatggaggcttctcaggctgagagtttgctggtcaaggcaaagcatgatcatgaagcgggggtgtcgaagagcaaggagaagggggcacggtgctataaatgtcatgagtttggacatataaggaggaattgtccgttactgaagaagaggaaaggtggcattgcaagtttagcagctcatggtgatgattcagatagcagcagtcatgagattctcacagtgtctaacgagaagtctggagaagcgtggatgttggactcagctagttcctatcacgtgacatcgaagcgggagtggttctcttcatacaaatctggtgattttggtgttgtttacttgggcgatgacacgagttatcgtttgttggagtgggcgatgtcaagttcaagatgtatgatggaaacgaggtgctactttcagatgtgagacacgtgccgggactaaggaagagtttgatttcgcttgggagcctacatgagacaggttggttgtatcaggtggattctaataggaagaccatgaatatcatgaaggacggcaagactgttatgactggtgagaggacaagctcatgtttgtacaagttacaaggaactgctgttgtaggtggagtcatggaagatgggcatgctggtgttgctgtgcacgatcctgaaggcggcgagtctagcgtaggctcgtcaggcggcttggcgtgagctgcggcagaaccaactcaagtcctggtacacggaggttcgagcaagtaacagattcggattggcgtggcatattcgccaaggtggagtttgttagagtttgtgtcaaatatgtgtacgtagtcggttacagtttaggacttggagttgtaataggtattaggactagagtatgagtcggactctatcctaggttctctcataaatagagaggcgtgcctgttgtaaccgcatggcgacttagcatagcgagagggagcggctgccggcgtcgaccggccgtgagtcgttgtaactctgatacgctgtatatgctggatcggggaggagcacccgtaatcagtgccccagagatgtaggctacggctgaactccgttaccaaatatcgtgtctcggtgtcgtcatcgttttggatctcctatgacgttttcttccgcgtttagctaccgatgttgatttcggggttggttttataacactccctccggcgcgtcgccgccccctccccgcgcgcgacacgtgtccagtcgcgcggggagggaggcgcgcgactgatcgcccaatagcaatctcggccccgcccggcacagcggccgtgcctaggccaaggtcagtcgggccagcatgggcctgacttacacgtcaggccatgccgggctgacccaaaggcatgatattctatcgtgcttctctacagaataagtctatttttcctatcttaactctttgggctttgtctatatggctggaaatacatctattttgtatttctcttctctttgggtcttaccttatatggttgattaagcctattttgcgtccctctactatttttcttccattgtactgggccgtgccgacccaacgtgccgaggtagcagcccagacacggcacggctgttgggtcggggcggcacaggcacaaccccagtcaggccgtgccgtgcttgggtcgggctaaattgctgccttgggctgggccgtcaagcctcgggccatatggccatctataggtgaagcaacaaatgtcagtgatggcaaagcttgacgccttgtaacttaaacgccgtgattaggggctctactaagtcaaagctaaagctaaagttaaaatataaatttttaattttaattttaaagttaattttaagatattttcaacgtagtttttttaatattagcttttaagtcgctaagagcatcactaaccgcaatcctatttccttactaaaactaattttgagggtttttagtgaaaaaattggatccaacagattcccaaaagcactgcaatagttttggagttcccatccccatatatttcgctctatggatttgagggcgagagagtgactcccaatctctcgttcgcgtgtttctcctctcctttatgcacgagcagtgaaaatttctaaatttctgtcggtgatcgcgatctctttctgcgcgcatggaaggaaaaaaagggaatttctgttggttgtttaacagaagggcccagtttttgggattgaatatcttttggaggcaggagtattttcacttcctattttcagttttggaaaaaattttgggatagattattgctaatctgttggtgatgctatacatatacaagatttttacatatagattaattttttataccttaataagccgtttagggaatgtgagcaaccgacaggggcggagccaggcaaaaatggcatcggggtcactatagttcttattctttactacttacgtacaacatgtactatctccgtttcatattacaagtcgtttttttcttaatcaaacttgtttaagtttgactatgtttatagaaaaatatagtaacatttctaatagagaataaacattttatttaaaatatgtggtatactctctccggcccattttaagcgcaatcataaatttatgtgtccattttttatcgttagtcttatttgaaattttttttatgattagtatttgtattgttattagatgatacaacatgaattgtactttatacgtgacttatatctttttatttttttcaaaaagaatgaaataagatggatgactaaatttagacacggaaactcatgagcttaaaatgagatgaagggagtatttaagtccagatggggataatttgttttagttttcacgagggcatgatagaggaaagaagttgaagatggggataatttgttttagttttcacgagggcatgatagaggaaagaagttgaagagtgtctgcttaaagaaaactagggtttttgttaggaggcttggctcaagggatctgagccttcgttcctttttctctgattcaacggtggtggaagggtcggcacacagggccacatggatggttggatcaagcctcgtatcagatagtacggtccacgtgaattcgaacgtgtttgctatttcaccagatgatgaggggttttctaaaaaatcgctgacgtggcgctctcccagcaatcccacggcttttaagtaaacctatattacgtgggcagccagctctgtactacttctagttagtaatataggcttgtaggccttttatgatacacgtcattacctgaaaacaggcttgaaaagctagccttctaatccccaaaacttaatggccgagctagtggaacgagatggcaaaaagaaacggggtcagatcaaaattttcaccggggtctttctagcattactaaggtggtaaggtggtgtttgggaaggaggaactaaactcacaaaaattttagtccctatagaaggggtttatgtttttgtaaaagggactaaagttcagtggtggagccaggatttcaaagttgggtatttctgtctaacaaaaaaaaagttcatagtagaaaaaaaatcaatggttcacactatgtcaatactgataatctaaaaaataaaactacaaattattacatggtacctctaattttctacctcaggcacaacctcaactgcagtaatctgaatctgaactggactctcatttgcatatgtaatcggctgaacaaaaggaacagcaacttcgctatcaattctaacgggctgtgctgttgatccagaaccagaacctgaccctaccttcctagactttgaatgtctatcccacaaagtcttcaaatcaatcgatttcttcttcattttgagagctctttaatctacagaactacagaagtacagaacaaaaaaaaaaaactactcagagactaaggtaaaaagacatggacacatgatgagtggatttaggctgattgaatcttgaactcttgattgctcacctgaagttgtgcttgccgccgggcgctgtcccgttgagccgcagccgctggccgccgcgcccttgcccctcgcggcctcgctcccgctgtcgctggtcgcccgtcagttgccgcctcgaggcctcgccgcgccgccgccgaacgcctcactgcgccgccgctggtctagctcccgtcgccaatcctgtcgccgcccaccggaagccggttgccgctcccgccggtcgccgcgccgccgccgaacgccaccacctagggtttggaaatggggaattggggagcgggcgagcagcgcgtgactgcgtgaggcgtgagcgcgagccgagccagggactcaggaggagtggggacaactactacgtgtacatgtgtatatactgatgttaggtattccggggaatacacaggaatcactgtagctccgcccctgctaaagtttagtccctccttctcaaataccacctaagggtattaccccagtgagagtatggtagctccacccctggcaaccgaggaagctacgagatcaccatgcaggtggaggtcgtccctgatctttctttagcacctcaattaatagggttttatgggttcttttggaccggagatgacatcgagagagctctcgtacgaggtttaatcctcttatagtgctaaaggagatatgaacaatttaatttatttgaattaactgcgcaatccgatcaatgcacaagtttaagaaacgtgtgcatgagctcgagaacaatagtcagcatgtcggtgacccttcttcttacggactatccgtaaataagaagtcgtcacctcgccaatcctcttatagtgctacaggagacatgaacgatttaatttatttgaattagctgcgcaatccgatcaatgcacaagtttaggaaacatgtgcatgaactcgagaacaatagtcagtatgtcggtgaccctcctccttatgaactatcctattaccatacataagaagtcgccacctcgctggagatcacaaggaaggtggtctagaggagggtgttggtgtggactgtatagagggtgataacctctgcttccgtcatgagtgggaaaacttctcaagtgcttagtttttctttaaaaaaagtatgcactggatttggcttgaaaagtgttgttataatatcataaaacttaaattatatatatatttatcttcgttagatagttgaagttttaaaagtttggctcctaaatgctagtaaatatttatgaccaagcacatgtttagtgcgtttgtatattgaaagaccaccacataacaacgagccatgtgtttatcgactcaaataacgattagctagagtattatagttcgagttcgtcaaattgttaaagtgccgtaggctcacctgtctcttgaaccgttgacgtcagtttttttttttttttggcatattgtcctaaattgaaacgtctcgaatacgtcttgttgcttattatttttaatctcactctttaaccgtcgatctggttaggtttactttggaatgcaggatatgaggtttactttgcaaaacaggataaataaaacataggaataggaaagttatagaaatataataggattgtatatgtatatataggattatcactaatctcagtactttatagcatgctaagccattgctaatggaccacgcaggaagtaaaaaattaagtagcaaaataactgagtgttgtttctgttcctagcatataggaaaataaaaagaaagaggtttgactggacggtttttttccccgtaattttcctttgagttcttcctatgtcccaaaggtaggaatagtgcctaaatcctttataatgtgaatactgagtttttccttaaaaaaactgcaatccaaagtaccctaattgtgtttctcattttccatctaatatttccatgttatatctactcactcttacacgaatgtatacaacatactaccgctaattacaaatggttctgttacactgtttttcccaaaaagatatacgagttctaaatgactttttaaaatttagaattgagttaaagggattaaattactccatccattccataatataaggcacaaccactttttttaaatgttccataatgcatgcaattaactatgacatattctccattaaattattccttttttaaatcatccactctcatgttatctaattttattggatacatgagagtatcatgcagatttttgagccaggggatcaacaccaaacaactcagatttttcagcagaaaaacaattacaaaaaaatatataaaaagaaaaaatagggatagcaagcctgccttttaccgagcccaaccacccgaggcccattaacagacccaaaaccaaacttttaccaagacccattaacaggcccaaatatcatctgagccacattgaacaaacaattttgctatatatttgtcgacaaattttctcccaaaaatttgacagatataattacagtacaatcgtagtgtaattacattgtaacttacatataattacactgtaactataatgtaacttgtatgtaactttcaaaaatctctttgtaacatgttatttcggtaaatgaaggtcatgggaacaaatcctttcagtaaaatggaggttatgggaacaaatcctttcacatatgtatgtgctgcgattttttttcttcctcaccagaacaaatcttgtaatagatctaatgattcaaaattacgtgaaacttatatacaagttacaatgtaattgcatacaagttacagtgtaattacactacgattatactataattaaatctattaaatttttaggagaaaatttgtcgacaaatgtatatgtggtcatgcaagcccaaagcacgcataccgaacttaaagaaggcctataagcgtgaacgaatctcaaataaatcaaacggtctaaaaaacgaatgattcagcgctcagaaatcattcgactgctgtatagtctttccgttattaggatgatctaaactacaagatcataataattattttttagtctttagattaagagtggttgtgtcttatattttggaatggagggagtcctatatttaaaatcggagatagcaattactccgaattccgaaagctcagtttgacatctccaggagctcatcagcaaaatcctggacatacgtaacgcacggaaaaaaattaaaaatacacctctttttcattggttttatataaatatacacgtttacgaagattttgcacaaatataccactgtcgtgaaatgaaagtgcgagatcgagctaattacttgatctcgtgcggcaggtgtgcgagaccgtctcgcgcgagaccgctccttcgcttccctaaccaccgtattcgcgtgagtaataaattaattagtgtcattagcagttaattaattaattaatatttatttaattaacatcattagtaattaattaatcgttaattatacgctaatcatgagccatgtcaggccatctcgcacgctgctcaagcgagatcgcttcttgtcttgccgtcacgccggtctcgcgtcctggtcttgcgagaccgtgcggtatcgcttaaccatcctggcctatcgtcacgctatcgttactttcgctgaataaatcagcgatattgtttcgcttttgcactttcaatcaacgacgatagtatatttgtataaacaaaattacatctcgaatattaatgagaaaaaaataaaaaacggtatattttcatatttaattccgtaacgcactgcctagcgagggttggccaagtttcgcttgggggagtagaattctaggtagacacagatatttccaaagcaaacgaaacgtgtcgccttccctccttcccaacggggagggttccgcacgcctcctctctctctcacacacacacacagccagccgggtcatagggcacgtggggcccacctgtcagctgccgatcgacaaggacgagtagatgatcttctgcgacgtgtacgtgagctcactggcgttcctgcttttattaacgccgaaagagacgacgacgactttttgtgcttttatttactaacccttgttgttgttgtttttttcagaaacgtcctccataaatcgtacagttgtttcgttggttgctgttatcgttactgacttcctgtgcgctgaaagataccttcggccaagcgggctaattgtagcgtgtgtagcttgggaataaagtagcagaattaatttttgaaataatattatttttgaaaaattgtaaaagtagaggttgatgttgaaacaacaatttagcaatagtaaaatggatagcgaacaagcaggaaagtggatgggttatgagacaaatgatttatacaagttcaggccttctcaataagaataagaagtaataacatatttctgtttgaggatttgattcacttattttggtattgatctaaagatctcaagtgtggttatgttcacaaggggccctgccttccttagatagtcggaggagataagattacaagatagagactttatcccttacagtctaaatccctataactactttacaatcgtaactgactaagactacatgatatttccttgatatgcaggttaatacaatatccgagtcttagcctatacatattctaatcatatgatatatcccctataatcagttggatagtctagccttgtgggtatatgatacccataatttccacagtagcccctgagaccttcacagtctgaaacaaaacccttctctcaaactacattatataacagccgaatgcttcaattcttcctcctgcaatctcccgagtgcttttatccctagtaggttgtgaagggctgaaaaataaaaattaggtgcatcgactagatacacctaattaggtgtagcccccgactatgagattagttgaataaactaaacatatagtcaaggataaaataaaataaccaaccgagtggtttataacaattatagtcatcaaaatgacttaatattatacaacacatattgtgtaaatccttgaataatataactcaagtgatatatcgactgctttttattaaaaaatattccaaacatatattcaacctaagccataaggttgattaataaaaatatgcacttacgtgacaataagcaatgatattgtatccaatcaattgctaatataacctaagcagtgtgttgacttataatcatataaaaaagtcagcaggacagttatgaaaaacttcattgctaggcaccttttaaaatacattgtatcaactcctaaaacattgtatatctgcggtatataaaaaaggattttaaggtattaggtacttgatcatgcgtatttttgtctaagaaaaaaacacctaagtctctaggagaatgtgacagaccacacctgaaattatgggtcgaaaacacttcaagggcctcggcccaaatgaacagtgttctccgatatcctaattataaaaaatttggtttttggtatttcaaccattcgcccttctctggtaggcttggttcttgtattcgatcctacacatcactcgtcttgataatatggtattcctagactctaaccaaagacttatttaaatttggattattttttgtcttttttaattttcaagatcaccaatcgtcattaatttcttcatggaactaatacactttcaatctttcgtacaaacattaaacacaatagatacgttttgttttatcatcaattcgccaaaacccacgggggatctaaatgcactttcaacacgtttattagtagggtttcaataatgccttgttggtacttttgcaatacataaactcaaataattgtttgttcaaaagcatagtaacaacaataatagaatgcctaaggctgtgttcgaactataaggaaggttggggatcttctagttcgtgcacataaaaatggagtagcttattaaagcacgattaatttaagtattactatcttcgtcctaaaataagtacagccgtgggtatccgtgtccaacatttgaccgttcgtcttatttgaaaaatttataaaaaaattaaaaaaatagtcacacataaagtactattcatgttttatcatctaataataataaaaatactaatcataaaaaaatttcaaataagacaaacggttaaacgttggacgtgaacagtgtaaaacattacttattttgggacggagggagtagttgtaaaaaacttaaaaaataaatcaatataatttttaaccaactttttatatagatttttttttcaaaaagattcgggaagcatgcatgcaaaagagagagagaaagcagaagtcgggttttatctttgatttgactgtgcttgcattttatttttctctcttaggatggctaggccttctctccattctatcataactatcctcccaatctcgacattacatcatctaaaaggagcactattttttccttaaactataatctgtgttaaataacctagaaagcaactactatactctatattataagatgtaagcatttttataatttttcacggaaattaaagaaataggtgaaattgaacggtggaatgttgtaattactccctcagtcttaatatgtagcaacctcggataggtcctatccgagcttgctacgtattgaaaatgagagggtaggggtgtaggtaagaagaattaggaggagaaactaaatgagatatggttgtgcttgtttgggatgagaaaaatgtagagaaatagttatatcttgggataaattcaaaactaaaaaaggatatattttggaacgatggagtagtactttaggagggaaggagtagtgtatttagcaaactaactacccctggtaattggcaggtgtacgttcgtgttcatatagaatagagatgagtgtgtgagctttgtgagcgcatatatttgtagtgctgtgttttaacaaaatatccacatccttctacttcaatataaccaatctatagaggaccattttgtaattaccacaacacccagaagtctaaacagatagagtactggaggagtagtactactgcaaatccccaccccaaaaaaataaaaaaaaaatctgctcttaacaactccctataaagctaccactacgcccccctaccgcggagaagcaaccaatccaattccgaacaagcaaggcaccaaatccccccaccatggatcaccgcctcctcctcctcggcctcctcctcctctccccggcggtggccgccgcctcagtccccggcgaggaggagccgctgatccggcaggtggtcggcggcggcgacgacaacgagctggagctgaacgcggagcgccacttcgccagcttcgtccagaggttcgggaagtcctaccgtgacgccgacgagcacgcgtaccggctctccgtgttcaaggccaacctccgccgcgcgcgccgccaccagctgctcgacccctccgcggagcacggcgtcaccaagttctccgacctcaccccggccgagttccgccgggcctacctcggcctccgcacgtcgcgccgcgccttcctgcgggggctcggcgggtccgcccacgaggcgcccgtcctccccaccgacggcctccccgacgacttcgactggagagaccacggcgccgtcggccccgtcaagaaccaggttcccctctcgtctcccgtcgatttttcccccaaaccaaggactcctcctttgatttctcgattgaatcagccgtcttatcgtttcttgattttttttaatttttttgcttttgcagggatcgtgcgggtcgtgctggtcgttcagcgcgtcgggggcgctagagggagcgaactacctggcgacgggcaagatggacgtgctctccgagcagcagatggtcgattgcgaccatgaggtgagaggcgtttgcttcccctttcttgtttttgcgtactggtatattattatccttttattaggagcaagttttatttgtaattttgtgattggtctgtgcttctatgggtgttataagagaggttggatgggtgctataagagaggttggatttttctggctttccgccaatgttttgtcagctgctgcgctgtccttttcctatctattttcttggtttgtgattgggcagcgcacccaaatgagaaggggaaagggaaattggggcaaatgaatgggaaagggaaatttgggaaaggagttgcatgattccttggctaactttgaaagggaaattatgaggaaaaaagagtggcttgtggtattatcagtgcttaagaagtcaaaccaaagtggtgaacttagcaagcaaatttgtcgtggtcgattttatagtggtgaagtaggtgaataaaacaaaagatgatgaatgcaaggctgagtggataaaatctccaattgatactggcacatgtcgctctggaagatcggtctaggtaggcgtctctctgggtctaccgcaggtggataaaactaagatgagatctaggtaagcgtctctctgggagttcatggtgaccttgtgcattgataggtctatgaaataagagagttcatgcacccttgtgtgttggtacgtgcctatggtatggtaacgaacaagcgtatacaattgggcacaaagggttgtttgagtgggcacttaatgaactgaaaagtgctgaacttgggaaccctatgattagttaaattttagagaaagggagttaagaaagtacccgatgttctggggttgtcatgtattccagcaattttagtttttaggtactagtgaagctaccatgaagaagttgtaaattactcaaatctcaaccattaagttcacttgagtgaaaaatataaatggagtcgatatcggccgcaggttgtttctgtcattgcttcatttcttattttactgtctcacttgatggatagacagccaaacgtttgtgtgcactggcttgatgtactctttcgttttggtaactgggccccaggtgagaccccatcttggtgatattgttgtacaactgaataactactgtaccttttatatcattatatcggttaagaaaaaaataatcaaatttcctcttttcttttggatgtgtcatcatattttaggggcaaatttccggtttcctctttcatttggttgtgtccatcatattttaggggcttgctcttgacctatttctttccatatttacttcttgaagcttcactcctaaatcctaattaatgaaaaagttagtgcttctctgttctgttcaaaaataaaacaaatcttatttccataataacacaattcactaaaccatccttacaaagtctgcaccaccgttttaatttccgcctatagcatgggtgattctcttcctagttgaaaattctatgtaggattttttggtagtaagatgtaagtggctctcattctagaaggcttttcattactaagcttctacattaggaaatgcgagaaatatttgttcagaaaaaacaattttctcatatatttaaaagataatcaacagtgattcctatggtaattttacaaagtagcaccaggctaatgtcttgcacaacctctacaatttgtcgtaaccagcttaagtgattttcacattgctttcatcgcaaagtacacatgtaaagcttacccgagtcgtgctcaaataatttttagccttcctggtattataatactttttttgacttgacagtgggatatgtactgttgttatttgttttctactgttacctgtttcaactgaatggggtatctcaacttactgggcttcattgttatctaattttgcagtgtgattcatcagaacctgattcatgtgatgctggatgcaatggtggattgatgactaacgccttcagctatcttttgaaatccggtggccttgagagtgagaaggattacccctacactgggagggatggcacctgcaaatttgacaagtcgaagattgttacttcagttcagaacttcagtgttgtctctgtcgatgaggatcagattgctgccaaccttgtcaaacatgggccacttgcaagtaagtactataaccatctctcggaatgatgcatttgcaggtctgactgttatatgtaaatacatgaatatattgtgcaattgctgatgaatgacttcacattttcctgcagttggcatcaatgctgcgtacatgcaaacatacattggtggtgtttcgtgcccgtacatctgtggcaggcaccttgatcacggtgttcttctcgttggctacggcgcatctggttttgctccaatccgcctaaaggataaggcctactggatcatcaagaactcctggggcgagaactggggagagcatgggtactacaagatctgcaggggctccaacgtccgcaacaaatgtggcgtggattctatggtctccaccgtgtctgccatccacacctcaaaggagtagattctgatcagtagtcccccgaccatcctgtggatggttcacagttggtgattctgatattatatataagctagaactacgaaatatacttagtttatgctccatctgcgctgttattgcagttatgataagcagcgatgatgtgaagctgcaactgaatgtttgtcctaagttatatgcttggtttgctacgcaatgctacacgctatttggaggtagctttaagtattatcgccattcacgaacttgtatttttactattaccaatcttttgaatggtctgtattatatgcatgtggtctgtttacatggaataactctgtctattgctacgaatttgcgtcttgcacattctccattttaagggactctggtattgatatttcagtatttgaatctgtacaagctgcaagatggttgggttattaccatacgagttataactacttatgcttaacaaattatggacgatagcaaaatcttggtataatccctcgagtggaactttctctctttaaatttaatgtaaatggttgtaaaaaatatttagcaatatagcgtatagtaacatctaccactgtaccaaaagtcattcaaaatgaatgttgttaatttttttagaacttttagcaactatttagatagcgtttgaataaatgaggggatatctcctcgagagtttaaaatactttctcattgtccgtggcattctcatgttagtaagactacaatctctacttatatgatcatatcaacacattttattcatattatggaaattgcaagatttgccattcatccattgggtaggggaggcgggaagagaggggaggaagagagatgacaaggactctgtggctatggtagcgatggtacaaagttgtttctcttccctagcaagaaggggcatgtagcttagtggttgtagtagccttagtagcatcccaggtcctgagttcaaagctctattagtggcgaatctaagaagaaaatagagggggtgttttattcgaatgagagtttcaggcgagtagtcgtctagcttatcacgtcagtggcgaatccaagaagaaaatagagggggtgctttgttcgaatgagagtttcgggcgagtagtcgtctagcttatcagacaagctattgacgtatgattacttaagcgctgactattataaactttaaaatttgatttatttgaattttgatgaaatttctttataagatcttttttcaaaattaagaaagtctagtggtttgacaagcacgcccacaaaaagtaccttaaaaaaactctaaatcccaaacaacagggcctaaagctagtaaactatactaccccatccaaaaaagactatcctaacaacgaatctggacacacatgtatccagattcgtacttaaaattggtttttttatgggacggagggatacacgccaatctattgtcaatcaaatttctgatttgtacgagaaagaactcaaaataaagaataaaaatatactaggtatgatagctatagttggctgtaaatatatatatgaaaaacggttcgatgttcttttttcattttttttatttggttgcacttataataaaggaaccagttagataaatatatatgaccaaaggcaggtagtactgcttccctagctagccagctactagtttgtttcttgctgtgatgacttcactagagcacgtactggatgtatgtggatagatacttgttacatatgggctatggccggccggagctggggctggagccctaaccagccccaacgatgaatccgccgctgagccccgtgggagcgaattttaggctaggtaaaaaaggtcactcgctagggaccaactagtgatgatgagcattattggtgacgacttgacagattagggtttagggttgggttgagggtggtaggaggggttaaggggaggtggccagccaacaataggctgtggatagtggacaagggtgcgtgacaaggtggcgatgaaggtagagtttgtgtgatttggtaggacaggtctcatcagcaacaacaaagcaggaggggggggggggggcgacccatgtggaatcggttagggaaagagcgagaagggaggttgaaggcatccagtaggatcagggacaaccctaggctccgagcaccctgggccatgatccagggcctaggattaagaggcaatgggccaagataaattttcaccacattgggccaaccttgtgaaaatccagtataggtcataccgaagggggggggggattaagggtaatgttgtcgacacacgaaggatgagggagtgcatgtatcgtggagaaggatacaaggggaagataaggcttctatttaagcataacgaatcttggcgtgagctagaccattcaaaatgactaaactttgcaggtaattgaggtgaccgaggaagatggaatatgttgttgggtgcaatgtactagctgtagaaagggtgaaagagctgcccctagtggattttggtttattgatgacaaacgattaagggactaatgcacttattgagtgtataagcaagtgattagtccgatgaagaagctaggaaatggacttatcgatggatgagaattaaagagaagatattgaagatgcgggtatgaagtgactacctatggcaagatggtgaagcgcaagcgacgctcagctgcgatggaccatgcagtggtgaagggcaagcaaggggcttggcgccgatgaaccgaaaccggtggtgaagggcgagtgaagactgtgtcgtgatgaaccgtgcgaggccatttgaagccatagattatccacatcaatcatttgagaaatagaagatgaaatgccaaagatcaagaagatgagatcttcccgatgatcaaatgaccttgacgttggtaaccctccaagtgaagaaacaatatggtgtgaaggtactcctattggtataactttgctttttaaatttgagtttaggatgccgtactattaagagggatactacatgcatataattggttgaatactagtgctcaaaatgcttcatctttgtgtgagttgaaaaacctaagccaaaatttcaatcccgagttgtttcacttgtcacaacacttacatcgggtttctttgcaagtttttcataatctcttgaaggttttggaccatgttttatgttgggtttgatagcccacgaaactagctttccataaagtccaagatcttcgaaatcggagttcagagtaaaaagttattgcatttttacttgagcaacatcagactatccgatttgaaatcggactatccgatgtatcggactatccgatttttcacagaacttcactctctgcctttgtttgaaaaatcctttcgagtgagtttttctaagtgtcggagtatccgatgttggatcagatagtccaatgatacagagactccgaaatttcatggaacttgagtctctgttggaggatgaagtttttgcttctaaaatatcggatactccgatttaacattagattgtccgatgtctcggaaagtccgaaatttcatggaacttcattctctgtttcttgttgccttggaggtttaaaatatcggactatccgatcttgtatcggactatccaacgtgggctgaaagattcccctccaacggtcacattttggggggatctatataaatcccccaccaacccttttctagggttgcctaaactgatttcattccaatcttgctttgggttgagctttgtgctaagtgctttggatctttgagctctctccctctctatctcaaatcccccttgttctttgtgacttggatctttgtgtgtggatttggactttgggagcctagtgtgtgtttcttttgatcttgagcactaggatttgtccaagagttgtgtggtgtttattactcttggaggttgaggactcctagacggctaggtgtcgttcttgggccaccgatctacgtggggttggccaagagaagtttgtgaaggtcggatctcgcctccgcaaggaaagagatacccttagtggaaggaggagtgcatttgtgcaacctcacgaggatagggttgaaaaagacccggctctttgcgagcccctcaacgaagactagaatcccctcaaggatttgaactccgggaaatacatcggcgcataaatctcggtgatatcctcactctctttaccttcttgttccattgctttgtgctatgctaatattatttttggtcgagctcacctctttgcttgtggattgaatctagatctcttaggttgttctcttatttgtattgttgttgtgcagttcagatagtctgatctcagttcagactatctgatcacataggactatccgacctgatatcggacaatccgaccctgttttgttttagcttccgcctttatttttaaaaccgcctattcaccccccctctaggcgacatcaaggtcctttcaaaggggttggagcatccgccgctaatgcgtggcggcagacatcgaggtggcagtgatactgctgttgtggcggcgccactgccccgcccttgttggctagtcttactgcgtcttagatccactgcttcctcttccttccactcacccctactagagcaggccaccgaatttgcccgcgtgagcaagaccttaacgagcaccaaggaggcggaagatgagggagttgagccacctttgatttttcccatatccgtgtcgagtacgccgtggatggggacactgttgagctcggtgcctcggtgggtgcccttcctctcttcctcatctcaccgcggtttgagcttcttcccctcgatgcttgagttctcccccctcatcgcctcagcctcccggatccttcctcttcgccccagccttagccggctccacgagctttgcccttcccttcacccgtctggcagtcgagtgtgtatcactggaggagaggagatcgacatctgcaccatcacactactgagtgctgacttgctaatggcggcttcattggtagagaggagaacgggttcgtggagaaccgttgcgtggatgcatggaggctcacaacaatgtctcggattctgccgtggcgtcatccaccgccacctgcctcctttgcattaccgctcgctgacatcttgccctcgctctattgccctttggtaggagatacggagaaaaaaagggaaagagagagagagagagagaggaggaggaggaggaggaggaggaggaggagggaagtagagagaggatgacacgtgggtcctactaatttttttgggttaatgggatctatgccattgcaaatttgcctattcagaaaaataccattataattcgtctattcatagttgtgccattgaaattttagaaaatttgaaccgtgacactgctgtcatgttttccatccaactccttcctttttccatcttcttccttccatagggaggggcaaaggccggagcatgcgccatcattgtagaagagctcaacgctggtggctgcggcgagggagtcgccgttgccggcggcaatggcagcgggggagcagtgcaagacaatgacagagttgaacggcaagcggtcgccggccaccgccaccgtcacgacaacccggcatgtgggtctcaggtcgttggtgatggcaggccgagtgcggcggggttacgtgccagccagtccttgagaaggccaccgccgtcgttggcagcggcgaggagggatgaggtttcttctccttattgctgggtggcagggccaacagtagtgcgtcgttggcgtgtaggggcgatgggggaggaccatcctgcagcggcgtatgtccccccaccaggcacgacgtaggcaagccaagccggcaggctggactgatgatacctcgccaagtcgccatgtgggtcccacatgttgacttagcgagttaacaacggtcaactaccatattagtaaaccactttccaaaccaccaaagatttgcactggttttcgaagattgggaaagcattagggcatgtacaatggtgtctaataacgggctctcttcgttgtcatgcaggtaaatttggtgacgtggaagaaagagagggaaggaaggagaaacatcattgttatgcatgacagcggctcagagtcaactcttagcgtttattaacggaaagtttgttgcatgagggtggagaaaaggaaagaagtataataaaaaaatatttagtgtattaatggtttagaaatcttattgtctctactattgtagaaggatagtctctaatgtcattaattaatatagagagctcatattagactctacctttgtatatgcccttatacccggttttgtggtcgagggagaaaattcagtaaggagcaagagttgagggttgcaaataaacttattccatatatggtaggtgttctgggccttaagcgattatgcccaacccatgtgaggcccagtcctccaggcaccttgacacaggctattattttctgcgaatattagcaagtagcaaccatacgatcgtcaattccactactagaaaactcattttcggcgtcgtaggggatcgattttcacaagcgggcatgtaattcggtgccaaaacccggccggaaaaaaagtacccggggtggagggggcagtccgcctgcaaagatcaatcctcgcaggcgccgcttatatggcccgcctgaaaagatgcccctatatagtcttcttcctccccgagccctgttcattctccccgaagtttctctctcctaaagtgacttaaatataggggggggggaggttttgaacttcaaatctttgagggatttttctacggtgcttagatctactcatttccacactaggtatgcaattttttaagcttttagaccttaatttgtgatggatttatgcatgcaaaattgtgaaggaagagctccatgttttttaattttatttcttttgatatgttgatgttagatgtatgtgtaatacttgatgcctcttgttgtagtggtttaatgtggtaacataaattctcaattttttttatttttgctatcacatccacctcctacttctagatctagatctagatcttgtcatatatatagagagaataaaatttttaatgtctatttattcggtgcaataaaaaaaagttatagtattttgtaatatgccgatgatatgattttgttagattttcctaatgtactaatttggcatgtctgtgtaaaaaaaattgaaataaactttgattttttattaatttacacttaacttttagttaattagttttgaatagcgataagttttttcaataaaccctacaaatttggtattaattgtgcaaatattttatgtgtattttttttagagatatggaaagtcgggaatggatgtatcattggccgaggtttttgtctccatatagaaacgaagtgtctaaatttattggtattgccaaggcacacgctgagaagaacaatatgaggaagataatttgtccatgtgctgactgtaagaatgaaatagcctgggacttcgacgatgcttttaaagtgaaggagcacttagtaactcgtagatttatggacaagtatgaaatatggacacgtcatggcgaagaacaagtggacgggcctgaaattaatgtagttccgacacaagttgaagacatggtgcatgacaatggttctgttgaggacaaaatcgacctagaggaaatgttatgtcatgcagaacccgaggtgctgatggggtcggctagagggttaaataactttgaagctttacagaaggcagcaaaggaagttttgtacgatgagtcgaagggctgtgacagtgagttcacaacactctggtcagttcttgaacttatgaggttaaaggcgagacatggatggtctgataccagtttcgacagtttgttagaacttctgcagaaaatgctcccgaggcctaactcactaccatccagcacatatcaagcaaagaaactcatatgccctctttcacttggtgtggaaaagattcatgcgtgtgtaaatcactgcatactgtacaggaaagagtacgcttctttagatgaatgtccaacatgcggtgctagccggtacaaatcgaatagcaatactggcctagaaccgtctgacacaactgagggacgacagagaaaaatcccacagcttgtgatgtggtaccttcctgtcaaagaccgcattaaacggatatactcaaacccgcgagatgcggaactagtgtgctggcatgaagaagggcgcaagaaggatgggatgattcgacacccggcagatgctcgtcagtggataaactttgatgctcagtacagagagtttgctaaagacccatggaacattagatttgccctgagtactgatagagttaatccttttggagacatgagcagctcacatagtacttggccagtgcttctcaccatgtataatcttcctacctggctttgtcaaaagcgaaaatacgtactactctgtatcctcatacagggaccccgttagcctggtattgatattgacgtatttcttgaaccattgttggaagatatggctgatttatggaaagagtgattgaaagtgtgggacgagtacttaagggaatacttcacagtgaaggccatcatcttcgtgaccattaacgattatccagcaatgtttttagtttcaggtcaaattaaaggtaaaacaggatgtgtgatctgcttgaatggaacgtactatatgtatctcccgggttccaacaagcttgtgtacatgcggcaccagcggttcctatgcacaaatcacaagtaccgcaagatgaaggcggagttcgatggcactgaagagacagatcctgcacccaaaccaacctcgggagaaaaggtgtgtgcaatgacagagaaaattgtttgcgagtttggaaaagtgactaagaaaccatcgaaggggacaaagcgcaagaaactcgagaagaatacgaaacaaggggatagtaaaaagcaagatgatagttcgaagccagatgataaactccctcccccattcaagaagcattccatattttttaagtacctcccgtactggaaagatctggaggttcgacatgccatagacgtcatgcatctagagaagaatgtgtttgacaacatagttggaacattgttggacatgccgaacaagactaaagatggtttgcaattaaggatggacctagtcgagatgggaatcagggaagagttacaccctcaagaaggagaaaaaaaatggcaaagtatatcttccaccagcctgtttcacactgacacctgaggagaagaagtcattttgcaactcactccatgatgtcaaagtgcccataggtttctcatcaaacatcagtcgactagtttcaatgaaagatttgtcggtatctggttataattcacacgattgtcatgtcttgctcaccgtgtttcttgcaattgcaataagggccataaaaccggagcatttaaaggttgctatcacaaggttgtgctactttttcaacgcagtgtcacagaaggtcattagtctcgaagagttaggaaatctccgtacattcgcacaggagacacagtgccaacttgagatgtgtttccctccgtcattttttgatatgatagagcacctcattgttcacatagtgccgcagatggttgcgcttggcccattgtacctccatcaaatgtggtcatacgagcgttacatggcggttttgaagggttacgtctgaaatcgtgcacatccagagggatcaatggttgagggttatagtactgaagaggttgtcgagtgctgtatcgattacctcaaagatggatatgcaattggagtacctgtgccccgacacgagggcagattgagtggcaggggaacgataggaaagaagagattcgtcacccatgatcacaaatcattccaagaagctcacttcagcgtgcttcatcagtttgctatcgttgagccgtacatcgatcaacatatcgaactaatacaccaccgagtggataatgaaagaacacaagcgtctcttcgtagattggttgcgagacctagacttacctgagggacaaactaccgataaaataactatgaagcggttggcttgtggtccatcaactacagtaaattcttggcagggatatgacattaatggatactcgtttagtacaagagcccgagataataagacctatacgcaaaacagcggtgtccgtgtggaggcaattgatgaagccggggaaaaacaatcatacttcgggtttattgaagaaatatgggaaatcgactatgggcacacaatgcaattccccatatttaagtgctagtgggtaaaatacccgaacgggatcaatgttgataagttcggtcttaatgttgttgacctggcgagtgtgggtcacaaggatgacccttgggtactcgcaatcgcgtggcacaagtgttttacgtgaaagacccatcaaatttgaagaaagatatagtgctacccgggaaacaaaagatattgggagtggatggggttgaagatgtcgaagattacaatcaatacgatagtataccactttatagtcagtttgtacagaagattaagaatgtcgagacatctactcagaagatcgtgaagcctcacatgcacacggacggtgtgggaaaaaatgttaaagggtaatgattgttgagtcgcatttaagcatctaagaagttagtagttatataattaaatttttagaattgatagtgtgctcaaaattttttaattaattacacattagtaatacactaaatattaaatttgagtggggtcctaggaccccactccacatactgtggatccgcccctgcaacccgacatgtgggtcgcaggtcgttggcaatggcgggccgagtgcggcggggttaagtgccagccagtccttgagaaggccaccgtagttgttggcagcggcgaggagggatgaggtttcttctccccgttgctgggtggtagggccaacagcagtgcgtcgtcggcgtgtaggggcgatgggggaggaccatcctacagcggcgtatgtccccccgctaggcacgacgcaggcaagccaagccggcaggctggactgatgatacctcgccagtcaccatgtgggtcccacatgttgacttagtgagtcaacaacggtcaactaccatattagtagaaaccattttccaaaccaccgaagatttgcactggttttcgaagattggaaaagcattatacccggttttgtggttgagggagaaaattcagtaaggagcaagaattgagggttgcaaataaacttactccatatatggtaggtgttctgggccttaagcgattatgcccaacccatgcgaggccaggcaccttgacacatgctattattttctgcgaatattagcaagtagcaaccattcggtcgtcaattcgtcattcctgcagttttctgaatcaactcctcattcgttttgtctaaagaaaacaaaaaagaaaggtaccaatagttggcctacctcgaatcaccaagagccacaagtgtcaatttacctgaaatgatggtgaaccaagcaatcgttgaaaattgcaatacatagatatagagcagccaaaaaacttggcctttcgttttcacatcttaaattttcttgcacataagtggcactttgccaaccatatatatataatatcacataactttatcaaccatatatacggtatcacatggttccgttttctttgtataaatgtgcatgcgaggatcatatgtgcgtgtatggcgaccttcccaccatattcatcaataactttgccttgcctttcctgatttcaattcaacgccacgcaaatcaccttcatttctactcatctggttatcaaatacatgtcgaattggtacgtgagcttttcaaatttcacttctacttggttacattaaaaaaacattagagtatttttgttatgaaaattcctttatactatgatttgttatacaaataaatgtacaatggagacacgaattttaagcggaaaaccctttgcgggaaaaaaccacaaacgccgaccattaatgatcactattgaggagttggatacaaacgcaaggaatacattgggttgtcgcaccctcgccgtgcggatctaggagttctagtgggcaagacttaagactcacgctaggaaactaatcctaatagtcaagttctatttgaaaacttatctgaatatattacatgcctaaaattcggatcacatatttaacatgattaattatatttttacactatatactaacgacgatgcctcttaaactaatctacataaaatgcagatccatgtccgttccatgcgtgctggtgcgatatgggggccaaatcagctgtaatactaacagttcttctagcccatatattagtgatcttaaatgtctctcagtattacagagaatttatatcctatcacacgacatcaataaaccacactataaatcttgcaaatcacccctttgaacttcatggtaaaaagaaattcaaatctaaatggatagccacatataaaaccaattaaggtgaatatttcctatataaaaagatggtaacacatttaatagaaaatatatatttttatttattttaaataatattattttttattcgtagtaactagtaaagaatggagattgagctagttttctataaaattattgttgcctatggttgtgtacagggatgaaactggtacggatacttttggtacgtccgaacgttttttcgaaatcggataggtttgttcggatagtttcggatatttttggattcagaaacaaattcggattttttttctccgtaacataaacgaatacagtaagggaaatatccgtcggaattgcaaaacggttatccgtgaatatttttcgaatatccacaaacaaggatcaaatttcagaacaaacatgtacatatacataacttttccatacgaagtcagatgaagacaaactttatatcaaaattgtagagctcaacgagatatacaactttattgttaactattttattatctgagatcatttaagggtctaaatattcattataaaatatcatatctatttttacaaaatctcatatctgtaattcaaacgatatcctatagagacgtgttccatatcaaagttgtagagctcaatggaatctaccactttgtagtttataacatttgtatttgaaaatatttaaactataaaacaaacattacaagtttcgaagatgtgaaataaaataaatagcatcttcaatttataaaacaagaccttgataagtgatatggtaagtaagctatacatgaagtaaaaggtatttggactggaaagtgaataaccatattacatgttggtctttttggggaacggttatgaaaatcgattttcacatacggttatgagaccgcctacaaaattaacgatagacatttaaatatgttgacctaaaataacaagcgatatctcttcattgattaaggaagctcaatttgaggagtttttatatcccggcaaatattcgttaccgtatttgtttcgtttcgtatcgctccgtatttgtatttgataatattcaatttaatttccatatccgggtttttgattccgattacgattccggaaataaaaaaatatgaaaatgaatatattaaagctagtttccgatccgttttcatccctagttgtgtacatttaccatgtgcttgtgtttggtgcttccttcatttaaaaatcagtgaaaccctcacacaaacaaacaaaaatgcattgatagatgattttgtgtcaatgctacaaaatatgctccatggtcctatgattaattccactatatttaaatcagggtgatgtcgttatacatgattccctgcatgttctaattcaaggtgagtactaaatgtggtgcattcacacattttaaggagtaattaattgttacattgttgggaggagcagtagttgagagtataataggaaaaaattgaatgaaaggtgataaatggtactccctctgtactcgtaaaggaaggaagtcgttttggacagcgacacaatctccaaaacacaactttgacttcttgtttctataaaaacatttattgaaaactgatatatgtatacttttatgaaagcatttttcaagacaaatctatttatataatttttatattttcaaactcaacaacttgagagttattcatgatttatattcccaaggcttaacttaaacattgtcctaaacgactttctttacaagtaaggagggagtacaagtagtatattagagtgacaagtattttgggacaaatttcaaattctagaaagataactattttaagacggagatagtactctatacttttattttttttaaataaaaactccaatgaaggtgacagtctgccaccccatctacttatattgtagttttacatattatctattgaaattcttaatattacataacacttaaatttaaatggatatatagttacaaataaaattaaactaaagtaactatttattcatttcagttaatatcatggttttttttcttttagctgtagcaattaactgagtaatatgtaacagctatatccatgccaaatgcaaaacggtgacattttgtacataaaaaagacccattagaaaaggaaccgccatccctcatttctggggaataattaattatttgtcacttttacgagtagtgataaaggatttgccactaaacctatatgttacagatagatgagattctacatatcatagataatgagtggtaaataattaattgccacatattaaaagtggcaaaaagttaaattttcctttttcttgaggttcacatctgagccgtccatctgtcaccccagctaagcgaacacaaccttgttttgttgtgttgtgcaactcagttcaaaacaatccaaaaaagctttattggaggtgtttgggggaagagaccactataatgccacgtcactaaatcccatccaacatcaacggcatttgtgtaagtacgtttagcaaattaagatcatctcatctctatccatgtattcattaacactgatgctacatctcaactcctttgatatccctattgttagataaccaattaatcaattttaatgcaataacaaaaccttccgactaacgtttcgcgtatggataataacgatgacaatattatatccaacgtcaacaccagactatatcaatgacttactattatattaataaacacaccatcgtacaccatattttactggctatcatttaccactgcggctaccggtcaccctaaatatatattcgtatgccatatgctagtctctctcggttatttattatttcggagagagttggtaccaatttttatgtagagatctatttatttttccgagagagtttgacaccccccaatttctctctggagatagataatcccacccttctatatccatctatatctatctattactatctatatcttctttatatttgacggtaacacatatggctgtgcgtggctccaccattggaaagaataaatacagcaagctaaccttgggggtttataattataacgcttccttggcccccttcgtctccatcttcttttttttttttctctctcccttctctctctctacaaatctggggctcccagtatagcttaggttgatttaattatggttaacctctcacagtaatccgggtgagaggtgggaagccaaagtgggagaagcaaaaatattctcagggcaggtaaggtaagcgaaggcgagaagagaagagacgagaagagaagagagagaaggtaaactagtctctcttgtacatggtggcttcccttcccttcccttctcttcccatctctctctcctctggttttctcctaccttttcttttgggggaaaaaataatattaattaaggcgcgcgtgcgcggcggcgcggcggcggcggcggcggcggtggaggaggattcagggtggtggtggtggtgatgatgggtttcttctcgtcgtggggtgtgcgcaggggggatgagcgcggcggcggaggaggcggctgcggcggcggcggcggaggaggtggagggggtggaggcggggaagaagggcgtggcggatgcgaaggggaaggggaaggagaaggtggtggtggcggaggaggattctgcggtggcggcgggctccgggggaagcggaggcgggaggaggacgttggtggcgtacccggcgcgggttgcggggtacaaggacgtggtggcggacgcggcggtcttcaggagggcgctcgaggggttgcacgcccagatggggacaaagctcaagtaagggatcccctctctctctctctctcacacacacacacacacacacgcaccaatctgtatctggcatcgccgatccttgcaccatgcagctgccttacgatatagcatttgatgccgttgcgcgcttagaacagttgctgtttgttttgtttctttcaatgcgcaagaattgcaacttgggagataaagtttggggagaaagagaagttttggggagagatagcgaacctaataataatggacgatgcaaatacaggcatttatatatttatatttatttatttggaatccggatacgtccggttttgactaatcaaccccatataaatgttaccctcgaaattatgtggcctatatctgccattgagtcaccgaatttatggatcgaccacatttctggtttcttatctttttgttttccccttcgtttgtgcaaattttgtccacagattgtgatagttggcttgggcctttgttgctgttgctttgcgtagttatccttgttttatgcctcgttcaatggtcaattacttatatgttgttaatgctgaggagcagccctagttgatgatgttatgttcaacacttatgttattgctcatttgtagtttgtagttgccttagaccctagtctaattgagtgtgtgagcctgtcccttgcaaatcaatgtacttgctatagctgtattatatggagagaatgacaggtatgtttgtcaatgttgcttgaatcactactgttaatattatatataagtttaagttgatgaatgatttgcattgcaacatgtttgtgtactgtggtaattagttgatctactctaccaagttatcattgagcatgcttcattttggtgcatttctaacatcatttttgttttcagggtgccaattattggtggaaaagaccttgatcttcatcagctgtttaaggaggtcacttcacgaggtggcattgataaggtgggaattcaataaaatcattcatatttcaattgtcaaatgttccttaagaaagtcttttagccagcgacagtcatgtaagactggccatatatagtaaagcaaatttttattatgcttagaagtttgccaaagaaaagcaaactaaaggcatggcacttgaaatttttgttgttttcatgatcttattattagttgttacctgtcagaatagcaggcaaataactgaaatttatttcacaggtgaagtccgataatagatggagggaagtaacagcatcatttattttccctgctactgcgacaaatgcttcttttatgttgaagaaatactacatgtcactattataccattttgagaggctatacttgtttgaggcacaaggctggtatcaagaaactggtcagtgggatttatagaaattcagtcttctagtttgtctgttgctgtattactagctcataccattttgtttcagcagattccagaagcatttcctgtatagaaatgaaagctgaaggtcaagcttcccggaaaaggaaaagaggaagcaattcttgttcttcaggtcagtttcagttcacttatcttctgtagcagtttgttttgtttaggacttcttctgtggcaggctagcagctcattacaagagaaggaaagattgtaaatgttactcaaaagtttaagtaatagtatgattgtgttaagtgttgtaactgtcaacttacaagatgtcgtaacatttcttcagtcgaagcttgtgagtttgcagcattttgtacattttggcccttgtattcttattctacaaatagaccctccaattaacttagagtggaccctttgttcaacaccattgatgaaggtgccgaggtacaacatcttggcgccaaccatacacttcggttctgagaaaggccaagctggcatgaagtccacatggtccgcgcagaaggtgttggcgctaatgtaatatccaggatgacaagctaacagttttaattaaacaatcgtagaaaaattgtgtggtgataagatgtcccccgtgccatgtcggcgagccgagtttgatccttggctggtctaacttgttttattttcttttttagtggccaaaaggtaccatatatattttttaaaagcaaacattcctcgagtcatgtatgcacgcatacagctgaccattaaaataagagaaataaaagggaaaaactcacagcttgaacactcgaacccaggatgtcgaggaaatcatgaggccatcaaaccactagaccacttatcagcttgttacctattgtaccccacaagccttttaagcttcctatatggtcagcgccaagaggtttgctactggccaactgctcacgtgtacttcatgccagcgtagcaaagttctcagcggcaacagttttttattattttcttttttttagtgaccaacaagcactcctcgattcatgtctgtatatgtagagctgaccattaaaaagagaaaaagagagggggggagggggggttaaggttgaacactcgaacccaggacgttgaggaaagcatgaggccgccaaaccactacaccacttatcagcttgttgcctattatatcccacatttaagcttcatatgtgatcagcgccaagagctttggtgatgaccacctgctcacgtgttcttcgtgcagctcgccaaagttctcagcgccaatgtgtatggcgcttagatattgtaccttggcaccttcatgatggtgttgagcaaagggtccattctcgaaataagtttattggagggtctatttgcatgtatatcaatatataagcccatttataaattcagtaaaaagcgagcatgttctataatggtgctaagataaatggagaacatttataggaagcattattgctgttctcaagcatattctatacggtgttaaactaaatggaaaacatttttatggaaattataattggtgttctttttatacatttaggtaaagttgtttaaatttatatgactaacagttagttcctttgactttgtcagacctagctgcttctttggataatgatgtacaagtgataattgatggtaagtttgaacatggctacatagttaccgttatcatgggctcaaaatcaacgaaagcggtactctataattgcaccgaagaacctgcagtgccaactgcggtgcctcatgttgcaattgacagcgctgagggcatacgtcctcgccgccgccgccgtaggaagaagttaagtacaacagaccccaaccatcctaaaccaaacaggagcggctacaatttcttcttccaagatcagcacaggaagctcaagccagaatatcctggacaagacaggcttatcagcaagatgattggtgaacgatggaacaatttaggccctgaagataaagcagtaagagtagacacggtcttttgaatttcattacttcaaattgataaagtaatcatgcaatatatgtgctttgtaacacttatacatattgtaggtatatcaagaaaaaggtgtagaggacaaggcaaggtaccagagacagttagctctttacagagaacagagaacaggccagccaatcagcaacgcggtgcctatccagcagagacttcctcagaaagaagtgacgattgatgaggtggactctaaagtcagtgaaggtgatatcctgctgtccaaccaaggatacagcagcagtaccagtagcagtgatgaaaccgctgattcgggagaaaaaaatgtggaagatgatgaagagtttaacacagagacatctcctgagccgagcatggaaacaacagattctcatggacagcctgatccttctgctgatggggagcgctttgaactgcgccgcagggagaaccctaagattgatgagaaacgtgacatgccacctaattaacgcttgtgccgagttgaagggaaaatttctgaaggatttttgttgtaggatcagattgctgttttgtttcactttacctttgcatcgtctctagagactgatgcgctatgctagcgcattgaatatcttctttttttatactgttagcaatttgaattgctctttcttaggtgaagtgatcacgggtcacttccgggcatccttgatgtccgataaattagagaaatgatattattttattattcactgtcgtcataggagtactgagtacaccagtttgttgctcacattagaacccattacaactgtaaagactggagtaatatttttaatagttggtagaattggttatatggcatcgaaagttggttatacatgtgaatgacaattctttgatggcggttttgatgacagccactgtcatcccatgataatgacacgtgtgacctattaagtcgatgatatgcgcctaggatggcaatgtctggtctaaagagtggtaaatcatcaaatcccaaagttagttatatgtaattgaacatgagagctatttaaccaagttgagaaacctattactgctgtccaacctaatactaatttatgatgtagtctcattggtatcggttagttgatagttgattataaatcgtaatgcttattagcgtgtaaaaactaatttgtaaataaatttttatatatgttcttaaggtacttaaattccaatgttgaaaaataaatcatgatgaaaaaaccattaatactaactctaaaattaagttttaaaatttaaaatttagttacggttgataagctaaagagcaaacaaaattaaagcggtacagcccgagacataagcaagcaaaacccactcctgcctgtcgaattccttttagacttgatcatatttcttggctgtataaacttacattaggttgcatatggctaaaaattaagtagacattattctgtgtatatatgatttctagaagccagctgttacaaaattaagtttatttaccagggttcgagtttcttgatgtggatcgggggaatttgaaggccacatcaggattaaccgaacaggctcttattgtttctcattaactgatgaggtcgttggcacaccttgatcttactaccggctggttaatgaactgctaccaagtgaaagttgagattgatactgagtgctccattgtcatacccatgaccatgacaagttcatacacaaaaaatctgcacaataaagtagaaacaagtaaaaacaaatccagaattatgcgtcgtagcttaataaacattgactgctggatattatgagaagataaaaaggaatgtgcatttgatttattgatacttcagcaaagagttagagcaaagcgcgcgcacacaccagagcacagcgtacaggtggcactggcaacataattctagatagcattaaaaatgtaaatgaactgggagtgagcaagtattggagaaacacctcttttttcagatatttaggtgtattggctcaaaaggtcccatgtttcttaccaagggaaataacaatactacatattttccgttcctgcatgcaatagtcaatactcaatagacacagttacaccatttatctttatctaacaaaggcgttaattataacagcaaaaccgagtcattatttattggaataaactgtgtcccgtactcaaatacttagagcaaaagagtgagccaaaatgctacacgttatattctgagttgaatcaatgctaaaaaactaagataagcaagaaaaagcggtgattgttctgcaacagtatcggacaacatatacctctggatttttctccaaacttgtaatgagaagttgataacattcattgaagacttgaacatttgaagttctgacagattgacaaaacctaagatcttgcatgttgcactcatattaaggtattcttgtcaagcaacaaaccaaggaactgcaagtctgcaacagcaacaccacggttcccaaatttagcacatggcatttagtaagatagagcacaaatgctatatatatgaaaacaacattcgatcaattcaaatgtgtaatgaaaagcagaagtcaaaacttacatggcatgtgtctcagcccaaaatgggctaaaatatgcttggtctttgtcctacggctgaactatgcactgtaccaagacaatatatggcgtggtactagaaatattagccaaataatttaacaacaaagtactgaaatggaactgtttttcccgaaattagaatattccttgaatgatatacaaaatgctggacaagatctttgctttcatactgctctctaggaatcctgagaagaacaaaaatttaacttgttttgaccaaaacaattcctcaacatgattcctccgaaaatcatttgcagtcattatcatccttcaggaaaccgttttcaatcacccctttcatcccttatcaaaattataagctctcaaattcctcttgcttatttttaaacaaagccttcaatgcggcgtaatagcagaatctgtcagtactgtacagctgtgctgcttcagacttcaggaaatagtccacaaccataggaaaatgtcattggtgagaccagtgtaccactccacgtggaagaagtgttacatacattttacagtcaaccagccctgttaggcataagtaaatgattagcatacttgaatgttacttcatttggagtgcacttattcctaagcatctcagctacaagctcctctgcatcctgccaccgctcagctctacacaaacccttcaatgtagagttataagaaatagcatcaggcttacatgacatggtgctcaataacttgagggcatcgtccaaacggccttgttcagaaaagccattgataagggcgttatatgtaaaaatatcaggtgtacttccatagtttggcatttgctcaagaacctcaattgcacgatcaaccagccctttttggcacaaggaattgattaatatattgaacgttacttcatttgggggacaatcctttccaaccatctcagctataagctccccagcatcttcccatcgtgcagctctgcacaaacccttcaacacagcattgtagctaaagatatcaggcttgcacggcatgcttctaaataactgaatggcaacctctacaagaccttgttcagaaaagccattaagaagactgctgtatgtgacaatgtcaggcgtacatctgtaccttggcatttgctcaaacacttgggttgcatagttgaccagaccattttggcaaagcatgtcaatcagtatattaaaggtcatttcaattagagggcaatcatccctaaacatctgagcaataagctcactagcatcatgccatcgttcagctctacaaaagcccttcaacacagcattaaaaccaagggcatcaggcttacacaccatgctgttcagcaacctgagggcatcatccacgcgccctcgttcagacaaggaattgatgattatattgtaattgacggtgtcaggctcacacccgtacttctccatttgctcaagaacttcgactgcgctgtccactaaattattttggcacaaggaactgatcagcatgctgaatgtagcttcgtttggcgagcaacccttcctaaccatctcagccatcagctcaccgatatcctcccatcgctcggcgatgcataaacccttcaacgcagcattgtagcaaacggtgttgggcttgcatagcatagtgttgagaaggtcgagggcttggtcgacatgcccttgctctgagaatccattgataagggtgctgtaaatgacaacgtcaggagtgcatccgtacctaggcatttggtcgagcagttggacggcgcggtcgagcaacccgttctggcagaaagaacggatctgcgtggcgaatgtcacctcgttgggagggcaacggttcctgatcatctctgccatgagctcctcggcctcctcccacttcttggcgatgcacaagcccttgagcacggtgttgtaggtgtaggtgtcgggcgccacgggcatggaggcgatgaggcggagcgcgtcgtcgaggcggccggagcggcagtacccgtcgatgagcgcggtgtaggtgacgacgttggccgcgccggtcgccctggccgcgccgagcacgcgctccgcgtcggcgaggcggccgtcgcggcagtagcccgcgacgagggtgttgtgcgagacggcgtccgcggcggcggccgccttgagcgcgtcgagcacgcgctccgcgtcggcgaggcggcgggtggcgcagagcttcttgatgagtatgttgcaggagatgagggcggcggcgggggcgggcagcgcgccggggaggaggaggaggcggagcgcggcgtcgaggtccccgagctggacgaggcggcgcagcgtctggccagggcggggcggcgcggccgggttgacccatatggaggagctggccctgcggttcgcccacctggaggaggcggcggcgaggcgggggcgcccgtgttgcttggcgcggcgagggaaagagaaggggtggtgggcggcgggcggcgaggaggaggaggaggtgatggccatggtcgtcggggtggtgaaggatggagaaggcggaggcgataggattcgtgggatggatgaggtggtgcggcggggccgcgggagtgagagtgacgaccaaatgcccgccaattctacttcattccaaccggacttcctcttttttttttcccaagtcctctcttcagtatggtgatgaaattcactgttaactcattctactgcctccaagtctccaaccaaaaaaggttcattttctatagacgaatctagactacgttttgagaagtacatatagaggtttttccctgtgtggtattaaaaaaagatggtgtctgcctctatgccactaaaaagtttgagcctctctctctgccatcgtcgaactttatcgcgccctccatgccatttcatccgttttgggttgtaacggtgggtaacggcagtgcgaaatgacctagttgcccttaggcttgaaatgccatttgatgaagtttgtttccttatgtgccattcggaggcaggcacatgcatgtattttttggcaccaaaggctgtgatgttggtggcaaaggcagggctgttggcgtgtcacgccctggagttccctttccttgtttaaaaaaatcattaaataaatcgaccaaagaaattgtttattttagctcaactaccatgtgcttgcaaaccggctcatctcgacaacagaaaagaacagcaaccgtgcctttcacaagtgcccttattttgcagtttgtgtttcattctctgctcacatattatgtttgggtttttcttttgttgtttgctcacaatgtgttgatggtttggcattcagattggaggatgtcagtattatcagtgggaggatgaaatggtggacactggagtgcaaacacctcatgcccctgctccaattcatacagttcccctacaagcagtggcaccacctggtggtttccctactactccactgcctatcaggcaagatcaagctactggagtggacattagggtgatgcagcagcttaagtggcttgaaaagatggtctatgtttgcatttttcttactttgtatgctattttcaagaagtagttgggtgtgtgtatgagtagtcatggataaatggatgtatggaaggatgaatgaattttcaatcaagaatggtgaaagtataaatggccaggttgaaacaacaccaaatgttagcacataacaacatcaaatgaaacaacataacataactagctatttcatcctttaattagctgtttcatcacataacagcactacatgatagtaccagatgttagcaacagacatgacttagcaaaatacattacttgtttgcatccacataccaacatggcaaagtaagagaccaaaaaaagagtgttttcatcacatggcagatgtttttcactatcatagaacaaaataaaagttttgccatggattaaaagaaccatagaccaaaagaagcacattttactacacctggagcttcttgctcctggtatttctagcagggctgtctgggcttgatgtagtggctgcagcttggggctttctttgggtaagcttccttggggtaagtttcctgctgatgcatatcttcattcttagtgaagcctacggcagtacaatctgcagtggccgggtctcctaggtctcctgttgagtggtctcatcagggcaaggttctaggaacacagattgtagtggtactggatcattggaaccagttgcagaccttgtgctaaaacaaaaacatggtgcattaggtggcatgaagtttttgatgatttgaaggcttgtggtaaagaaaaacatacctgttactcacactgactggttctgagattgtagtagtagtagtagtaatggcatatgccccctttttcttcttgttggcaccagaagaggaagatttcttccttttttttttgtgggatgcattggccattgcttcattggctgggaagaccatctgggagggattagccactaaactggtctctgtgttacatggtacaactttcttcaacctcttctttggtagacccctacatatcaaatgtgttttagttaactaagttattggtgatgtacatgtatatgcaaactaagttatgtacaaagtatacctttccgcctccattgtagctatatcttctaggttgccattcttacatgtataccagtgatggtctaacagatggtagatcgggcactcatgtttctttgacgttttctggctgctacctccctcaagtgatgacttcatcttattcttgtgcctacctccagctatggacttaagcaagggagggcgcatgaagaagtcatgggtagccttgggccacatggtcttgtctggtatggaaggaatataaccctcatatgcagcgctgaatttgttgacagagaagtactcatccacatggttctcaagcttttctccaggaatggatgtaatgtatgctattgcatgcttgcatgggatgtctgagccctgccaacccctacaagaacaggttctatcctttaggctgaccacaaacctgaacccagagccattagtagctttagcgcacagttctgccacaccttctggaggggctgttatcacctcaatatccaggttgtagctctcttctgatccttaagcctctgcaggatgtgaggtagaatttttccattaaacttcttggctaccttcttcctttggttccatttgatcaatattttctgccttatagtgtccagcaagtcatccaagtgctttcccttctctgcctttgtccagttattgaatgactcagccagattgttagtcacataatccatctttgatgcagtcctgtacttgctcctagtccacaacttcttgtgagtttttttgcaaatactttattgcttctggtttggctgcagccattgcttggtagtgcttctcaaatatgtatgggctccatgaatatgaagaagcccataaatgctcatcaaataccttcccactgtacctcttcttgaaattatgtactagatggtacatacattctctatgttcagcagttggaaaaacatcactaacccctttcatgactacctgtccacaatctgtgttgaatgtcaagccatctggggtacctattgcttccttcaatctctccataaaccagaaccagttctcattggtctctgagtcaatcacaccaacagctactggatacatccagttgcgcccatctactacacaagctatgcacaactgtcccctaaacctccctgtcaaaaaagtactatctactgcaagatatggtctacatcctctatgaaatacatcatgctttcagtacgaagaatagcctatgaaatcagatcttcttgtttatggtgtgatgatcaataacaagaaataatccggatttctaagttgaagctactatctgggtccatcctacatatgaacaaggagcacgtaatcattaaaccctaacacggattagtagcaatgggcactaaacatcagtacatcaagggaggcaataaatgtggcctaagacagcgaaatcaaagggggcagcataaaattcacccgtctagaaaccaatccgggcgctcgctggcgccgttccacaccatggctgctcctccccgttcctctcgatgcacggttagatccacgctcccatgctcctccccgccgccgctaggtttcgccaccgtcgccaccgccgctgctagggttttgtcgccatggagagcagggaatcgagagagaagagagtgacacttagggggatgacggtaagcatcggtcaacagacggtccaatatgctagcaattgaaagggaaagagcgacattttccctatccgggcccatatgtgacatgtcagagctgccaaacggttatccccaaatagaatagcgatggaatgatgtggagggcatgataaagttcgacaatggcagagagggaggctcgaactttttagtggcaaagaggcagacagcatcttttttaatgtcacaagaggaaaaacctcacatatagataagtaaccttaaattattgagttattactgttcatccataagatatggaagatcaaaattcctttagagattgtccggcagatgcgcaatagaatttaagcaaattttgctacaggatctcgtgggaatgcggtttcaattgttggacacaggcgtagtaaaatgttgaataaaatcactatgtaaatatggtaatttgctcatggaacccgcttatattattttaatatttttggccatgtgtacaactgaagagaccaaaacactcatccaaccaggttccaaccaaaccaacaacactatcgaaccccatggcagtcgccgccgcaacggtgacgtcgacgatggtgaggaaggcactattcacagcaacttcctctcctcctctgcctctcgtagctggtgtagcctctcccgctccatgcccagtgcttctgccatgccgcacatcgcgctttatccatcggacctactctgatgggtgccccactggcacagacacaatgctcattttgctaccagaagttgtgctaatggctttctcaatcctggttcaattttgggttaattggatccatgccattacaaatatgccgattcagataaataactttataattcgtctattcatatacatgtcattcgaattcgaacaaaattaaaaccatgccatcgccatcgtgttttccatcaccatatagatcaaaatacccctaaacgtgggacccacatgtcagttccatcctcttcctccatcctccctctcttctttcttccccatctctctccatcttgtttcaaatgtgcagccagcaagaagggcacgcctctcatcaccgtcggcatagtcattagcgacgacagcggtagcggggtcattgccgccaccgtcctctcagtccccatgccctcccccctctcattgccactgaggatatgcaagagcgacagacttgctcttaccgactagacacagctgcctgagtgcgcggtggatgcagagccccacctcccagtgccgtcgagctccatggggcatttaaactttttgccactttcagatatggcaattatgaatttgccactcacagtctatgacatgtgggccctcatgtgcatatgacatgtgggtccagtggtaaatccttaattgtcacttgtaatactggcaaatagttaaatatctccctcattgtggctaacacccaccttgcatcctagcacttgctcccctccggctgcaacccaacccaacccagattcaattgaagttgcgcggcatggagcggcggatatagtatataggtatatacagcatataggtagagggagaccccaacaaaattggattggaccccagcctgtctccaaccaaataacttattaaagcccaactaaagaaacaatacatcaaagcttaggttagcccaactagagcccagctattcgtgggaaggtgaaaggaaaaaagtacaccgaaaaaccagatatatgacatccctcaatttacaaaaaccattcactttaggtccttcggtagttttgaccccggttttatcctacgtggcggctgagtcagtgtgagatccacgtggtcaccacatgtcatcgtggccacgtttggcctcctatatctttcccctattctcttcttcctcctctgtctctctctctctcactcttctcttctcttctctaggcaagccggccggcggttggggcggaggccgcccgggcgaggtgggagaggaggaggcggcggcggcggctgcgacgcgggagaaggcgagggctgcggccggtcgcgaatggcatcgacggcgctgcgtcgccgcggtggtgggcacggaggcggaggcagggtcggatgccgcggcggtgggcacagaggtggaggcgtggctgccaggcggagatgccgcagtttcagaatgcgtcggagccggcgaaatggaggtggcgcgcgacggctcccgtggccacgacgaccgtgtcggcgtgcaaggattcggagttcaacgccgacgatgaagattggcgatgctgaaggggcacgaggaggggtcgacggcggtgacagtctcggagaggatcctggtcccgaagcgtacagactgtgcgcagctgtcgctgactggcagcgactgcgggcacgaactggcgggcagttccctccccggccgtcccctcctctccctgcctcttctctctccctctctcacttctctcctcttgggcaggccggccggcgggtggggaggagccgaggagatcctgcgtaacaacgcctagcacgaggcggatgacggtcagcctgatggcgccgtcgttcttggcgaggcggcacgcgaagttgccgacgaaggagacagtgacgagcagcagcactagccatcgaccttgtcgccggcaacaacctcaccgtcccgcgccgctgcgccagcccctcgctgcctcaggtcactgtggtggtggccgcggcgctcgacgcgtgtcacggtatggcctgcctaagaggatagaagtgatagagggagagagaggaggaagggagagagatgacgtggcatcctgatatgtggggcccacatgggtcccacgccgacttagctgccacgtaggataaccggggtcaaaaccactgaaggacctattatgaccggttttgattagttaaggaacgctggatatctgggtttgcggttgggggacaattttgtaactcgatgaccagggaccttccatgtactttttccaaggtgaaacgatgctctgaagtccaaaccgtgtatctcaagactgaattaactgcgtctccggctctccgctccttttcctcgtcagtcgtcggtactcttgacttgagacactgaatcgctgctcttgctcgatccttctccttcgctcaatcactcctctactcagatcaagatcaagtgctgcgcacccgcgcggccgactacacgctgcgtgtaggccacggcgagcgggcattcgcgtacgctcgacttccagtcttccacaagttgcaacttgcaaggtttgtttcctgccattagtccagaattcagattattggattaggccattagttcattcaatattctttagtgctgtcagagtaggagcatcaaatcattttgatttattcaatcattttttttttggttgtccacatgctgcatcgctgcttactgcttgcactagaataactggttggcagtgaccagtgagaagtggttagctaacgttggtgatattgatagtgttcataaccaagcaatgagggattgtgatgctttattgaaaaaagagcagcacattgatgtttctttgaacagccaaagtaatgctgagaaaattgcttattatactcgattaaatggctcaattgatgttactagactcttactgaagcaaggtatgccttttcggggccatgatgagagtgaggaggtctctcaataaaggaaatttcaaggaatttcatgcttataccgcagagcaaaatccagctttacacaattttttttggggaagctttacacaaggttgcaggtaaaaatgctcctggtaatagtaatagtcagtatacatcttcatagattcaaaataacatcatatgttgctttccaaaagaggtactgtgttctattcttgaagaagttgggaatgatgttttctgtttgctggttgattagtcaagggatgtgtcttagaaggaacaaatggcagtggtcctgccttatgttggtaaatgtggcagtgttaaagacagactagttggccttgttcatgttaaggagacgacatctatgtaccttaagtctgctattgatgatttatttgcggagcataagctaagtttgaaacaagtgagagggcaaggatacgatggtgctagcaacatgagaggggagttcaatggtttgcaatcactaattatgagagaaaatagctcagcatattacgttcactgctttgcacaccagcttcagctagtagttgtgaccattgtaaagaagcataaaggaatcgggaactttttttgatatgatttctcttttattaaatgtggttggtggatctttcaaaagaagggatatgattcgagatatatatgcagaacatgtgcatgatgctttagaatgtgggttacttataactagttcagaggtctggagatactcattggagctctcactatgagacactaaagagtttggttcaattgttccctacaatagttaaagttctagagtatatggaagagaatgacagggatgacaaaaaattgtgttttatttgcagcttatgttgaatatcttggcaatcgcaaacaccttgtctgtaactttacaaagaaaggatcaagacattgtcaatgctattaattgtgtaaaatcaactagaaatcgcttggatgagtttaggagttagaggacgattccaactcatcctcccgcctttatatttcccttggccaccatagaacaactcgggttttgtttagatcaaaatttagctttggtatttttccgtgtaatcctgtcatcgattagaacaactcgggtttgcttgttacggaaccccatctgtgatatttttgctgattcaatcctacatctttatttgcaaatcgagttgcctgttcatctttttcttactagttctcgattgcttgcaggaacaaatgccctcgtggttgggctaaccatgcatccgtcgagattcatgactgcctctagagttggtgtaacgattgcaaaggtgtaacgtctctagatagttatagtcggatctccaacgtcgctccattcaatcaaattgtcctctcatcgaaagatcgggacaccctcgtgcgcatcaccttaagttgcattgtgcaaccagcccattaaggcctaatagaggagaaaatatctcatgggcccgaaattctgtgttttacatccaaaagttaggtttacaagtatcctatatattcttctaattatccctaatatctacactaaatgttttatttcatttcttaatgttgttctgtttagctacacaactcacggtcaccgcacaaatatcacggttaccgcatcaaaccgtgcggtaaccgcgaccaaaccatgaaactgcaaaatttggaattcaagtatttgctgatgaaattcacacggttttcggcggttaccttgtgcgataacccccctccaaatggtaagggaaaccctgctcatcactagcaaggcgagagccgcaagacagaatattatagtaggattcagaatttgattacaaataaaacaacaaagggcttgttggcttcattaccaaaaaaacattactaccatttttttaatgctaaagtttagtagtgttttgtttgaggtctttctaaattctaaattctagtataagttttgttagagttgcgttggtaattatatgtttagttgttaccttataattttggtattaacaaaatttaaaatggttgaaaatcattataaggtgaacatgaccgacatgatctacttcatatgtcccaaattaagttaatccaatatggtacgtgatatatctagtactacgaatttagtactagaatatgtcacatttcatacgagattaatttaatttgagacagaattcgaagcaatagcatacgtactatctagctggggcatgttgggctgctcagctcaaacctgggccaactaaaaagcttccatttgcagttgtacgaatttaggaagaagtttatttaggtccctcgtctaaggatcaagtttagaccacatctctaaacagagaaattgggtagaacacattcctcatcttccaaaaccagtgtcgatatagtcccacaggtagtttcggctgacgtagcacccgttgtgcaatcatgaagaccaagtcaacatgtcaagtgggtgccacgttagttgaaattgccatccaaaccgcctttgggctatatttgcactaattttgaaagataagagatgtgttgtatcccttttgcgattaagggacgtgatctgaacttaaaccttacgagagacctaaaatgaactttcttatggatttaaaccaaacacctcatgtgcggatagtgggctgcagtgagaaatgctccaatgtgtaagatttatgataggttaaaattcaaaataggcatcttattatctatataccactttaaaagcttagctattgtcacccacaactgctttcatcgtaaacttttcttagtattaaaaacaactaaatataagtggatagttacatgtaaaatcgaaataaggcaaatatgtcccacaacaaacaatgggcaacacacttcgtgaaaaatacatttatccataccaaagtacgggtagctagtcataattaaaacaagggaaaattccctacgtatccttaaaattttccacaatctcttctatacctctaaattttgcctcatctcctacatgctatgaagttttcattttgatcccctctatccctattatgttagttggccattagtttttcaaaatgacgatattgcccctttgccatacttatttgctactacttcatcataaatctcatgtgaaaatttgcaatttacaataacatcaaattgagacaaaattatttgatgtaaaagttgaaaaaaattcaaacttttgaaaagaatttttttttaattcccatttcttggttctgctggtttgctcattcatttcgaatccgtataagagtttcatctagaaattgaaaaccgaaattattaattttggggttttaaattttagtgaaatgctctacgaattccatgagtcaatttgaaatttattaattttttttaatttatttctaaaatttgtggtgaaataattaattattccgtttgtgttcttacaaataaattctttaacatgagaattgtgttttgtgattaaactagaacataagtttgagagaagggcaatatagtcaatatgaaaaatatttaacggtgaactcatggcaactaacgagatggatataaagaggagattaaaatgaaaacttagaagcaagggatacgagaaatttttgtggacacatagggaatttcctataaaaatatgtaggaagtataaaccaaaaactaggtgtaaacatgaccaaacgtacttctttctaattgtacaatttccattaactatgtgcatgcttagttgatgtagaggttggatatatgtttatagtctactgaatattaaaaaaaatatatgcatttccatcttttaaaatattttggcccaacagttggcaaactatagatgatatgtcaatttttatggactacgttgcgagattttgtgtaaaaactaattacaattgaaaaggagtgcaaattgcactctgggacaaatttcaaaagattttgctttcaaagagtcagcaaacattttttgggatatatagaaaccgcgccaaacgattttcttgcaaacatttgaagacctctcaaatccttgcttggggtaaagaaatggccttgctggccatgtaaattggaccgcccacttgcattatacatatataaaatatatctacaaataaagctcttgttgcattatgactaagactgctatatcccaaaatttcacatataacacaaaaatttacaacaccgaattgggtccgcctaaaaagttatatatgcaatgcactggtatgtgccttcacgttctgaaatatccatacaaacaaatcggctctcttgactgccaactagtcaaggtgagcatgaacctgacaacacctgcaaaacgtaagccaaatgaacaattgtccaatcaatcaatatctattactctccgcgtcccataatataagtgattttgacttgtttgcttcaactgtttgaccattcgtcttattaaaaaaatttaaaattattatttattttatttctgacttactttattatccaaagtactttaagcacaacttctcgttttttatatttgcataatttttttaaataagatgagtggtcaaacaatacaagcaaaaagtcaaaatcccttatattatgggacggagggagtagcagcaaaaaatgagttgcaaatcatttaaagacctctcaaatccttactcttttgggggaaaatttgttaaaccaagaacaaatcccaccagaataaggccaaaaacaaatatcgcaccagaggctcagctcagctgctcttaacgtttggtatatgtccctcttataacattttccttagctttaagagaataatgataggtgtgcccatacctctgcagtcgaagagtagcacggcattgcttgtatcatgctcaagcgcaaatattaattcaaaaataattttctgagacatcatcatgcaagtgtatctagtgtcgatcctttgatgagagcatttgtcatctaaccatatgataagtcctgaacggtacgaccactagtgttgcgaggggcatatggtcttggtaccttccatctcagcaattcctgaagaatgttgacagaacccttcatattaaccaaacgagactagaaaacttgctcaatactgtaacaagtagttagctgaacatgtatacatatccggatgactaaaagaacaaaatgccattcctctgtacaacacggagaccttgataacacaaagctaagccatgttgcacgtgataaaagaacagtacgcatgacatgttattatatgtagaacagtacaagttgccattcacacgctcctactcacaagaagtccatttacctttgttgattttggaccataggccttatacgctccgtcaattgatgagtaaatcagtgtagcttgatcagacccacgattacacttgaccaaccgaacacctccctagaatttgtgggcttagctttcaggtacaaaataagctttgaaggtaaggatcctggagcatcctttttcccatgggtcatttctacagtcaccaaatcatcccacaatacatcccagattacaagcacggatcctttgcaggactgaactttctctgggtcatcattgggacctgaaatacaatcatatgataaatagaatgaacagtacaaaccgtaatgtaactagaatctacgtttgtcttacctgaagcagtagtactcttctgtgagtaattaaaagaattttacccttaggtagcataaaatgatcctcataagcatcagtagatgcaaactttccccggactttgaaaaggtcaacttggccaagaaatgtagcatattcagctaattgtaagatagcctaaaaagcaccgccaaaaaggattaagaataccatttgaaacaaatgagatcgccaccggcttgagggagagaatgctagttacctggccagctgctttatggtcgtcataaggatagagcaagctatcaccaccaatggctcgagggagacgcctacgagccaactgctcctcagccattatagctgatgatattttcattttcacagcatttgcaccttctgtagttttcgacaaaagatcaagaactccactcactggctgagcggctgcaccaattaaaccttttccgacaccttgcacaaagccctcaacaccagaagattttgcaccctcaatgggctttgtcaatatgcctgtaacacctctgaagatgccctttgcgagagccccacctccatctcgtatgacatcaccaaagtcttccactcctttgctatcctggagaaacattacgaaccacaaagtacatgttatcataacatactacttttatacagttcaatacatgcatacgtagaaagaaatgaacctgtctcattcggccctgaatgaatttcttgtccatggataatgctgctatacccttactcatattactcaaagcgctacttgcattgccaagaatgtcaacacccgaaagtaattgaagaggttggctgagaatatctttctgaatgttagacatagcagaactcattagtgcactttgtctcatgcacaattcttcccgatacctttgagctatgcggaccttcattgttaagataaaggaatcagtgcttaaaataattagagtagcgtacatcagcgtatagggacaataatgtaccatggcatgaaagtttttctcaaacatgcataacggtatgaaagtttgcagaagataattgtaatggaaaccaaagagagggagggagatattataaaaaagaaagactagttaacaacatttaactgattccctaccggcatgtgctccatgtttcccagtgccgtcattaaggaagaccagaacccaagaacccctctcggcctctgggtaggggacattgccattgagactctaaatcgtatttcagaaatattaagaagcctgcaacaaaagatttagtaccaacaacagggaaaaaatataagaaaaaaacacaacatgcaatagtgtgcgtacccaatcttcagtatagggtcaactgagacagcagaagactctgaactggatatcctatcaaattttaggttctgaatcatctcatggaggcgccaaataattggctcatggatattaacaaaaaacacacagttctcaggaacctacaagcattacataattattatcgcaacaaatatttaaagacatactccctccgtttcaaaatgtttgacaccattgactttttagcacatgtttaaccgttcgtcttattcaaaaaaaattaatgaaatatgtaaaattatgtgtacatgaaagtatatttaacaatgaatcaaatgatatgaaaagaataaataattacttaaattttttgaataagacgaatggtcaaacacgtactaaaaagtcaacggtgtcaaacattttgaaatggagggaatatatgataacttcatgtacaactaggaaactgtcatgaataaaacccaagcaagaccaagtaaaaaaaaacttactcacacggctgtttgataaagctatgctactcaaaagacaatctcataaggaaaaaacatctatgtgaaaatatctatgttaaaataagatttattaataacccatgtagacagatcacctgcacaccaagatatggataaacacaaaattcgagagaattattggtctgcaatgtcatagagaacttgatgatgtagtctgattgattctccatcctttgaggacaaaaaaggacaggcataagaacgaaaggtaactgattgtccacttgaatccaatgcatctgcattttgagcctgccattaaaagaagcaacaaattgaagtacggaaaaaagtagaaaattttgagcggaaaacagcaacctagcaaataaccaaaaacacatgattgtcacctattgattccagagcccattccagatgagtaggctagtaatagttgctgcactgagaggaaaagaatttcctcaggcatatggtcaattatggaaagtccaaactctgttagctccaaagtaacatgaaattcactatccagatctggagatgactgcccactgtcgacctctgatggctgaaatattggtgataatagcctttctgttgtctgttcccgagttctattatcaggcagccaatcattaatttgggtaacatgaaactttccctccttaagaacagtgacacgcaaagccttcttcaccctgcttgatgcagctagcggttggtgatccatgacaacatcaatgtcatatgtcatggaggttgtagggtcacttccatctactaatacttccaaaagacgccttctgccaatatcctcccaaaagaaggaagccgatgaatttggaggcagactacgccatgaataatcatcaccaccaacctgccgaaaccgtacaggcaagaacatggagcggttctctaccctgcatgtattgtttatattttattttagatatgtacgatttatgataaaataaatttcgtgtaagtatgcttacctgtaagggctggaccagcaagcgagctgaaatacaacttcataacgtgaacattttgttccacttctaacgtttactctcaccaaagcttgatcatttcctgtagtgttgttcatgagcacacacataaccccattagcatcaatgctaaaaggtgtactccatttgtatccctccaaccgcaactgcaagcgtaaagaattgtgaggttgagaagtagaaaagttaataaccaaaaccatttatatgtatgcaggaagtagcagttcagagtataaaagttaacctttaaaagttcgttcccaaattctgatcgccattgaaacgcttgaggaggactacttggatgtaaatgctcttcagtctcactatgatactcagataggataatacttcttccaattctattgataaaaagtgctcgtgggagaaaatttataacctgcattatcagtcaacatttttctgaaaaccttttatgttattacataatttaactaaacatagtgaacaaggacagaatactctttaacaaacaattcgaggtgttgcatattgcattcccttgagcagtaaatgaaaaacttgaaaaatcatatatgtaaaaatttaattgttgtaaatcatatatgtaaaaaatttaattgttgtttcctatctctgaacatgtcctaacacaatattaggattaattgctttacttgcttccattgcaacttgctggaactttgtcaacatgctaagtaatatggtgttttaatctttcaaatactccatagcacagtagtatggtaaatgacctagtttccatctagtaaattcttttgagacaacattcaattgctgaacaactttaattgcgaaaaataatcatgctgaaccaaagtatgaagcaatgaagatgtgaagacacagaatcaaaccttagttctgtctgaagtcatcttcagctgagccgagaaccagtaatatgacccatcagaagtaaatgctttgacatcaacatgctcctgcaccagatgaatgacacttgaagagaagataagcaatagttcaaacgtgtgtaaaaccacaaactataccttgttctcaagatcaaaaagggacactcctatactgtattgtttgcaactgccaacagccacacaaatcgcaactcgtgctgggctggaattgttatcccgagattcaaagcgcacacctgcagagcggttcatgtaatcctgtggcgacaacattacatagtctgtactacaatcttctataacctccaatatgtgcatatttctctgtgccactgggcctcttctgataagagattttgaagaatatctgagggaaaattttgaagatttagctgctctgcttagtgagtctggtctgctaagtgactctgcatctgagttttctgttggttccacctcaacgatgcgatatgatagtggaattgaagaaatattttttatccaatatggaacaaataatctcagtgtcttcggtgcagcatcacttgctcccagatcatgttcaacactaacacgaagtctcctaatatttgacacaagtaaaatgactagaaattatgacatatcaactaacaagaaaacatgaaacagtagatcaactgcactaacactcttttttcaaattgtgtcttaagaaatatatgagattaccatcaataagcctattaaaaccgtatctttcacaaaggcataagtagctaatgaacaagagaattttggaaaaggacccatttttaaattggaataataattaattataacagtagtccctagggccctccttcacctgacgcttttctactacaatcattttgtatgacccctgtaataaatgtatacacttgctcttaactaacattcaccaaaaaaaaaaggtattagagcaactaattttgacccgatcatgcatagagaagaccatgactaggagaggaaagtcctaatagtgaagatcctgaaggtgacaagtcaacagaactacagatagagtgcagtgaaagaaaaaagtagttcagaaaaaatggtggctaaatactagataccaccaatggttcaaatcaaatttgcatagtagtattgtatatgttacagattagaaaatgcagtagggtctattccaaatatgctggtaaaatgagatgggcaaatatgttggacatgactatgttgtttgtttgcactgttctggctgtgtttagaaacttctgtgttgaattgaaattcatatcaattgtttagataaccacactaagcaaatgaaacactaggggtactgttaaagcttacaaacctctggctcctattttgaaccatccagaatgaagtaacatgttccagggacattaagtccagtattaatacagtgtcctaaaatgaaaatgagaaacaaaaggttagagaattaaaacatcattttgtgcgttgagcaactttatgtgagccaaggcaaacatgttcagtcttgccatatagataaagcactctttaattccataagtaatttatgggaacaacacttttcctcagaagataaaacaactagtgatgactatcaaagcagggaagcacaatgtgcattccagcagattcatcacatacgtgtagtctagaactctaggcacattatgataacaggcaccatggttaggcttccaatgtttaagttatattaccttctctataatccagccattttggacaaacatagttaggtaaattggtttccggatatctgctgaatagataaatgcacttccaccagacgagacaataccatgctgcctttcaaccatactaccttccgtggacttctcccagatagcatactcggcttcatatggaagcttattttcgagtctaagaattgagttgaaacaaattttccagtcataaataggcatatttaagtctgtgtgaagaatggaagcatcaattccaacactaagccagaaattttgtttaatgccaacaggaggacagcaatatgaaagcatatcctttttctcaagatcagccagtctaagaactgaattctttgagggcacagatgactgctttaaggtgctttgccttgaaagtgaagattgttgttgcttgggaatgctctcagaacctagtgaaagaacctgactccaactatatgattcctgtgatttttcagaaaaagggcgaacttgcaagcacaaatccatatccttgatcatcgctgtccaaggcaatgcagtagatgcatgaggctccataacagcaattattttcctaggaatttctgcactttgttcttgcattgactgccgtgaacgcacccaccgccttcgcctaacaaagtcatgtggtgatttggaagatttccaggaagatggccagttcaaattttgaaaattggcagcatacgcccatccatcactatccacggaactagatatttcaattttccatggtgacgtccatttccagccaggtggaagacgaggttcaaagaatgccttcaaaataaatcacacatttctctttaggaggcaaccatttatgatatatttaaggatattttgcatcacaaaaagccaaagatatcagcagaaccttttattaatcaagcaaaaagaatttcagtggccaattagtctgaaagaagttaccttagatgagtaagagccgtcctttgtgctccatggccctacatcacaaccctgatcactagcagggttacttccccaccctgaagttggtcggtaccactgattttcaaatacttcatcaataatgcttgtggaactggtggaaccagcatttgacacagagctactatgcatggttacaggacagacagatacttcaagctttatgtcaaaaccatttgcaataatagcaagagcccttaagcttgcatgtttctttccattcctcatggtgacctcaagtgcaaaatggctgttgttaagtgatttggggatggttgacaatggcaaagctgcagtaaaacattcccatggaccatctgggccaagccctatccagaaaccactctttgcattgcttaagctgtctttccagctctggaagttcgtctgcgtagatctttctacgtaacaacttgaaagtactaacataccacagtgtttcacattttcatgattgagtgcttggccctagaagttgaagcaaggagctcagcatatgaagtgacaagcagaattaacccaaagttcagcaatgctatttgctcacaacattgcctatataaattagcagtttaaagaacaaaattaataccttccttgtaagaggacatgttagcacacgcttgacatcagcagcttgctgaatgatcctcatagaagcagctcgtttcaatattgttgcaccccgtccaataggaattgacaatgaaccaagtacttcaccttatgcattgatggaagatgttaagaaaccctaatactattggatcaacaattacaggagataacttaaatactactatattacagtaggtgtatccttcaaataattcaggttctaataactcaagaagttacctttcccagcctttgatgcaagatttgttacctcaatctctaaatgagcggatgcctgcaaagtaaagaaaatgaataatgcaatgctgctaacaattttgcaaaaaaaaaaaacatagagtaaactggaatggtactatgagacgtgaataaaaatggcaggtcaaattacctgctctggcacttcaaatataaaatgttcattccacttagcatgatgtgtctgtgattcacaagttttcaaaggttttacacatcttgtcctggcactctgagggaatatcttgtactggtcagaaacatcacttccaacaagcaagcgcaaagcacagaagtagctgtgatcattgccatcatccataataggcaaaccctacatgagaagaaagcagttagttcatatcaaaagcattgtatttgaaaagcaaaacgcgtatctgagtatgaccttggattcaaagatctgtatgataacataatatcttgattccgtagaattggacagtacacttagtttatcagaaaacctgggaggtggcataaacaatgagacttgattctcatgctgtagcagctcaataatgtcttcattgtcttcaagtttcttaacataaatatcacatcctaatttgttctcaaaaactattctctgaaaatcatcttcatccaaagcagagcaggacaaatcatcagcatttttcacactgtcaactgtatcctgtcaaaagggtacacatgctatcaaccatgaatcatgctgtcaaaaagcacagaaacagaatcatgaataaactggagggataagttgaaacctcattctttattgatgattttttttccagatcgatttgtcttttccatgaaattaaagtttctataagcaaatcaagatttgcagaactcaggttgacatttagaggacttgtggcagcaacacgaatcctcttaccgacttttgaaggagggtgtttactggtatcatatgtctcaaaccttcaattatgattaaacaatgttaagttagtggcataaaaatctagaagataatgcaactttaagttaaaataagcacaacttacttgaatatcccatcaaatggctcaacaaaaggttcccatgcttccaggtgtctattgaatgttgatgcagaaatcgaacagatcaatacagcattcattgtctcaaattttccatgtgttgcaagatttatatttgcgattgtagtgtcaaaaattggcgtgacctaaaattttggaaatatagttggcatgtagatagaaatatttgaatgatatatattctcagtccaaaaaagaataaaatttagcatgcgtacacaccattccacaggaactgtcaagaatgctgactgacaagcatccaaacttcagctcagcagtaatattttcccgcacctttggtttagcatggtctgctattctgtatgccatttgagctggtggttttttcgtatcagatgttgccaggaaagtgcagccctaaaaacacagcaaattgattgggttcctataattacataagttagaatgatgcaggtataatggattacctggtttgaaactttccaaatgctccagcagttaggtcccttcgagctagaggacctggatataggatcctctaagatatttgcatgattcaccagacccatcttcggacagcaaacggaatcattgcttggcatttcatctgtttttgttgcaacacatccaagagaagcatatccaggaggcggcactggataccagaagaataatatttcatcagaaccctttctatcaatctgggctacttttttaaactgagtaggcctttcagaaacaattgcgctgtcgcacttaaaaagaataccaagagtaggtggttcaaacctgaaagaagcatcaagcatattaacaacgtaccacaaagaagtacctatgtgtgtatataaagaaatcattacccttcagttatacaatcaccaactgaggaaaacccaaaacgaggtattggccgccatatagaaaatggtctttttgtatctccacctttgtcccaccatattctttcaaagtgtggagtagacatgcaatagctgcttggccttgacaaatttctaacagcatcccaaccagaagtactcttgcgatgagttaactgatcagcaggctggttactccgaacagaagaatctgcattcaaatctttaacaatatagcagttgggattccggagaagaacatggtgcaaatcaagagcttcaactctagtgggttgttcaatagaattgtgtgcatggaaggaagcaatcacattgtcgacacgccagatgctaaatccaggagttactctgcacaaagaatataaacacgatgaccaactacatgttctcagtgttcataattaaataataactaggcactcgacactttccagggaaagaaaataagaaaaaaaaatattgcacaacaaaacaataaaaggatgttgccatacccaggagtaggtgagagagtgtggatacaatcagaaaaagctgtagaagtcacaagatctgagcgaaggcagtacactacgtgatttgaaggtggttgtcttccaatattgaccacacaccctagagctatgtatccaggtggtggaacaggaatccagatagaacactcattgtcctcagctgcctgagatgaattcatttgctctagagatacaggtaatacatgaacaagcctaaatccaagaggtttccgtacacggccataggtattacttacagcaaccacaacctgagaaggtggcacacacctgacaaggtaaagtatcagctttggcaggacaaaaggatctccgtaaaagagaaacatagttcagcgtatggaaggcggtattaaaaactattcgcattcaattagacgcaagccctagtattcacctgggattccgaacattatacacatgactacatataactgttgcagtagctttaataatactcaaataacagttgacgatataggttctcaagtggcaaaaattaccttgaggacacacaatcacccaaaataacataatttgaaggagcttgtggcctccaaaaggtgagattgtacccaggcaactcacctgtggaatttcatcaaagaaggtaaaaattggtgtacccagaagagcaaacagaaaactactataatacaaaagcagctaagctaagttgcagaaaccatgaaaaatagtaagagttagaggaagtagcacacaagtaccattaggtgatgtccaaactcgcttaaagttaatacaagaaaccaatgggttattattgccaaactgcaatgcagcaagagtttgattttgcagtttgagcaagagagaagccacactcagagaaagatgaatgtatacatcagtagatgcaagtactatgtttgtcttttcactgacagaagtatatttccatgaaacatcaacaggttcaagaacaagaagaccagagccagcttcgatcgtaaggtctttaacaactgatcgagcccatatgtctttttcctttgaggcatacctgttaaaatgcacaacgattttatcaatcaacagagaaaactgacatgtatacaacaataaatcgacatattgatggcttagcagaggtaatgtaatgaagacaaacatgaaactgaaatccatcttggcgcgaagaagcttctcgatgtgcaaggaatcatcaattgataactttgaactgtcgtaaaaggtaaattctggggatacaacctgaatattccagaaatgagaaatgtgagacattcaacaccataaatgtgcataagtccagaatcaatacacttacaattcaacttaataagagcaaccggatgtttgtttttaagtaaagaagaaatgcacataatgtgagtagggaatttattccatgaacaaaacagttggtgaggagaaagaaacttgttaatgcctgtttgtagactaaggaagcaacttggtacactacgggtaattgtccaatttataattatttaactaccttttcttatactcttcctttttcataaaatttccagaagcaaacagtgctaacaaataatgaattaggagttaacgcaacaaacattacacgctttcccaaaacctactgtggtgacataccacaaatcctacaactctgggcactcttccagatagttcatgcaccatgctagttcaccacactcggtcactcaggcttatatccaaggtttcaattgctaaactttttgcaggcttgtaagttttaccgtcttaagaaaaagaacagaaaaaaggtcctaaaattacagaaatttaagcagtatatactatttagcaactctcaaaaatacattagaggagcttgcgtaaaatctaattatgtacctgagcctcaaatgtaaaattcagcatttgggccgagggggtatctgcaccaggctgaagagcattaattctcttatattcttcattttgcgtattatcatcttcattatcatttagagaactttctaatactgaaacttcaacgccatcttcagcagaaattgagtagctgcttccagcattcaaatatacacacctccgcagtaatgcaccgttcttttatgaaacaaatagccaagagatgtgtaagtttggccaaagaataatagtgagactggcaacaggacataaaaccataaaaaaaaatcactgagcagatacctcaatcttaacatttttgaatctaagttttttgccccgccccaaaataattatagtccctgagtataactggcccttcttgtcatattcgtcacataaagatatggtgcctccacagccatcgtaagtgaaatcatcaatatcgcaaccatcaactattagctgcctcccaggagatagttgaataaaattctctctctgaagaaaacaggctcacaaagtatgatgtcatctgacttaataagaggatcattctttggatctagactttcctcccggccggttattgtgcctagatttggaacaaaaaactcaacaacaggcagcagaaaatccaggacaacaagtacacgaggttcctgaattcttataacaaatgactgaaaggaagaacgccatcgataatccaatatcaccatggtgaggttggaaacccccacatcagatgaagggtcctgagtactcagcttagaagtctcagaataagatccaagcataaggcgcatctcggactttgtatctggcggatatcatggatcaagaattttagtatagacaaataaaggtccatctcaaatagtgaagttgtcctataagaaacccataaaccttccagctattaaaaaatgaataaaaaagtgtcagtaataaccaacatgatattaacacacaaaaaaaaaggcacacaaaaagtagtacaaaaatgcagatgacaaaggaatgatatatttatagtaccaaaaataaaaatttgcagaaacatttccctctgcaacagcacaagataactcaccacaagctctgctagaggtgactcagcatctggaccattgcgaagctcaaacaatgcatactggacatccacagtcattactacaacagtacgcgatagtaacaaatggttgttgagattaactttatctgcaagtagacgaattgaatcttttgtccgatttacattatcacggaaacctggggggaggttgggcgcttctgataggtttgtcgaaatgcaacttgtgatgacattgtattccttatctgacatgataccatggagcaaccctatctgcataagaaaaaaaatgataatcatataaaacacttgttttttttgcatttttccactatatatgaagtttatcagcccagttcttttctgacgaatggattaatgggcatgcttcccgagctcctaaacagtgcgaatttttgcaaaaactctctgaatttcttagaagactgttttaaatccattttcaatttttaacagttaattcattcaggtgtactcaatagaagagcttacatttcagatctaatgcaaaaatgaaactgataaactgagtaaatcaaattatttagagtaaattccagaaaaaaaatctgtgttttatgttcaaagttgcacttgcagaaaagcacatatattagaacttgtggcacataatatactcattttttacactgaaccagtaacaaaacctttctggagattgatgctacacagtaaagctattctccacttttaatagagcttttaaatcatggcctttgaagtgaatcattccacagataactaagtccaatctaaagtatgaaacaatggtgataaaaaagtgagataatcagcaatataaaagtactgtcacgtcacaagaaaacacttttaagtataaaaacaaattaatcacctgaaatttcatgcagagcatcgggacccttttgaaaacatcccgcaagctacgtcgcacttctatattgatgccatgaccttctctaatcatactctttcctagaataccattgactccaaccgccatgttgattccattaatctatttcagtatcattgaagcagaagaataagaaaactagataagcatactgagattagtaaagtgaccaattttccattccaatacatacctctgcttgaagaatatcaaggcgtacagcagaaggatcactctcttcacctccacgccagcaaaaaccattcctaactttcagttgtcccagatccagttgtatatagctgcagcatgatatgaaggtgatgtcaagctttctaagtattattaaatcaccattatgcttcactaaacttgcccacaatcaaaataaaaaagtgcggactaaaatgaacaaattagtatatgtagacacaggtataagaaatgtgcacacaaaatgcaaaaccatgtgcctttctccactatgattcagaattgcacacctacaatatatggtgtagatttagactacaaacaggaaatttcttatctacctgatcctaaagaactaaatcaactaataaaaccaaaaccaaacacatgtactggaaaattgaaataagggcatactctttgctctgggagttctttggaacaataattatgggtgtgtcaagtgaaagatccagctttatagcagaagcaccatctatttcatatttctgaatcaaccactcgaaacctccaactttgtcgatgaacttgattgcttcttcagtgtgaggggtggcaagctccatgaagtaagaggtgaactgcaaaatagaaggcactttcagaaagatgtacatggtcatggataacaagaacaaacagcttgcaagtgtaacacatacctcctgaacaaaacgataaaggaatacaattcgcacagcagaaagttgcccaatcagactatagttgtaaccttcatagtcatcatcgtcaacgctgtaagactggaacgcaaactgcaacagagaggaaacattaagatttcagtattttgtcggccacaacacaagatagtcttgtttagtttgactgccacaaccaaataaattatagttagctcttaagaagattaaaatggtaaattagtttgcatagagtacaaagtttgagatggaaatctgatgcactgtcgataaagagagaatcaaggttaaaacagaggataatcaaccattctaggcagattcactgatgaggtaaaaacccaggtacttgaacagatgatggaacacgagtagggataggtgacgaaatcaatgtgctattaaacaattaaatatatatggtcatgttggaaaactattttaatacgaagttagttaattggttgaaagcctttctttttcaatatcaatggacaaaagctctttgataatctagtcaaatctactatttgaatctcaaggcagcaaatatgattatacatgtccgcatcatactcttcatcttgctaacctttacaaaacaaaaagtaagcatcaatatacatatttgatagtaaaatggcatacctgacagcctacaatgtactaaagtattgaagagatgaactatgactactctattggtgcagctgtctgggaatgaacaactgacacctgtataaaggattgcaaaccaatgtcaataatacctttataagagattcaacacctggtttccgtatatcacatagccaaccccaacgatgttctggcccaagagacatgtcacaaaatctcatattacccagcataccatcaattgaaaatgaacctggatgaacctgatatataaaaaatcagaagaaacaatataaaaacacatatgcatgcagcttaacaatgaataaaaagaaaagacgcacaataaaattctaacaggcaagtaatcaacctaaaattttaaatgcaacaacatagcgatcttgtcctagattgctgccttcatggatgattttggggggaacatcatagttttaattactttagtaataatttataaattgaacctttcatcaactaattacatatgctatcaccatatcctagataatgtcctagattgccacgttcatggaaggttttctagggaatttcatagttcttgaattactttaataatattgtatacattacacctttcattaactaattacatattccatcaccagatagatgttctagtatattactttgataatttcattatttagtccaaatacattaacctcaccttcagatcaaacagaaatttctcctgcacaaacatcgcaagctgagaaccatcttccttgttaagaaacatagatacccgatccacatccatcttcatgttgaagatagttcggcgttttccatagcctagcaaacctttaacaaaattgcgagcattatcttccatccctgtaggtttgacgttgcgtactgcaggtgttgtatcagagtcaccctttggggcagaattaaccatgctaagatcaaatccaaactcaatcagagcaacaagagttggtctgttacagtagaattccagtgcagacatacggatacacatctgtaaaaagcaagatacaaaaataatcaaacttcacagagagatttacaatctaggaagttaaacatatcaacaagatgtacattttgtgattttaggactagatatattgcttctatagttctcgcttggaataaatctatgtaacagtaaaagatgaatatattaaattacctgcgaatctataccatcataaagacaagaatcaggagtcctggtcaaaaatgtaaggacaacaaaatcgttaatattattgtcttgtgcctcgtaaaatacttccgtaggcttcactttctgctgatccccatcaaagcttaaaccatctttcgaacttaattgagtatgcccatctggatcaaatattgagttggaaggaatttccaaatcttgaagatttggactttggtcaggagtgaaatctgtcagcgcatccatgaaagaatcttcctcaacagagaaggattttcgatgatcctcctcatcaggtgaactagaatctacagtttccaaattgtcattgataacagagcatgctagataatttgaagacatagagagacgaccctgaagctcatcctttatcttcaaagaatgcagttttgtttttacactcaaaccacgagaagattgaacaacattaacctgcaacattatatgaaatataagtgatggataaaaagaaatgaagacaagacccagtaatctagatctataacaagcactgaaacaaaaagctgtgaaataaaatctatcatcaatgcacagatctagaaaacaagcatcacattcatttgatagaaggaaaataactctgctcttgtatctgttgaattgcatgtgccagcccagtggtcccagccagttcaacccaaaagcttaagctgatgagcaaaggtgcgattcacttatacttcaacactccccacgtggaagctccctcaggcctcagacatgcaatagaagtggactacattttttttatttaattgtgtcatccaacattcaaactcgagacctctagctctgataccatattgagttgcaagccagttcaacccacaagcttaagttgatgagtgatgaagcacgcaggcaatcacctatacctcaatataagcatatgaaggcacaccagactgaagttaacgagaagagcaagcaggcaggactatgttgtgagtctgccacaacaagaaggcgagaaggcgaaagaaggcgaaacatcagtccacctatacagaaggcgaaagaagactcacaagaaatgcagcatgccaatctagcagcaataaagaagtctgtctgaaaggcaatgtcacaactaaacactaactgcaagagatgaaaaacaccgaattatggcaaaccgtctggcgcctttgctccctggtatggtttctgtgaaccaaagcgcttttgttaagcgtagaagcatacatgacaattttttgcttgtccaacaaatggctagaaggctgtacagtaagaaagaagcccatgttatgcttaaacttgatatttcgaaggcttttgattcggtcgactggtcctttcttcttgaagttttgtgccatttgggttttgggagacgatggtgtaatttgctttgccttttgctgtcaacctcctccacaagagttttggtgaatggagagcccggcaaggatattgctctttgtagaggcctccggcaaggtgaccccttgtctcctttgctttttatcttggttatggacgtgctgaactcagttgtagtgcatgcggatcatggaaatctactagaacctcttgctgtcccgcagacagcacaccgggtttctctgtatgcggatgatgtggtcatgttcttgcgtcctacaagcggggacctatctcttatcaagcagattttggaggtttttggtcaaatttctggactaagaaccaatatgacaaagagctcatgcactcctattcactgcttggaagatgatctagaagtgatttctaatgagttgtcttgtgaagtgaagaatttcccttgctcttatctcggacttcctcttacagtccgaaaaccaaccaagacagatttgttgccccttgtggacaaagtggcagataatttaccgggttggaaagcctctttaatgaacaaggcaggtcggcttataacagttagggtggtcctcttggctattcctatttatgcaatgatttcgttggatcttcctaagtgggtggtcaaggctatagataaaaggcgccgcggcttcttatggaagggaagagaaaatactaatggaggaaattgcttgatatcttgggaccgtgtgtgtcggcctttgtcctatggaggccttggtatccttaaccttgaaaagatgggatgggcactacgcatgagatggttatggcttcaaaaaactgattttgctaggccttgggccagtttgtctattcatgtgcctcagaatgtccattctcttttcaatgtggctgtcaaaactgtggttggaaatggagaaaataccatgttttggagtgataggtggctgcaaggtaaaacagtagcagagctggcccctaatctctttgcctcgatctccaagagggcaaggaagcaatgtactgtggcgcaggctttggaaaacagaagatgggtggctgacatacatgggggactatctgttcaggtcctttatgagtacttgaccatttggtctttggtagacacaggtggttctgctacaagatgtacaagaccagcatgtttggaagctaaccgccgatgggatgtatacttgtaaatctacctatgaagcttatatttcctgggatcgatcaagtttgctccttggaaacgcatttggaagagttgggctcctcttcgctgtaagttcctctggttggccatcaataatagatgttggacagccgacaggcttgcgaagtgcagactgcagcaccccgcggccggtcccctttgtgatcaaagtgaagaatccatccaacacattttgatctcttgtgtcttttcccgccaagtgtggacacctctgttcttgaagctagggatctctggtatagtgcctcaaccttcatccgattgttttttgaggtggtggagccaatctacaaaataccggccaaaggacgtgcgaaaagggctcaactccttggttatcttagtggcttgggagatttggaagcatcgcaatgactgtgttttcaatggcactaagtcctaatgttgcgacggtcttgcaggtggtcgagaacgagggtaatctttggtgtttagcgtgggcgtctgccctccaaagtttcttagtggttcagcaaacctaggcacctaattggccggggttggccggggcgtgggtgtgtaggaaggttttggtatctcctactttttttttcctttatttttcttccccttaatgaaatgaaatgaaatgcaattctcttgcgttttcgagaaaaaaaacaaatattaacaactccatagttttcgagaatgctttggcacactaggccactatccattgacaagagagtaaactgggctgcaggtacttattcttggtgactgggtatgatatatacaatgcaaattgcaaactgggctggtggagaaacttgacaagtgtgtttttagccacatgatgtgtcatcagaaattatgggctacattaactgaccacctgggcaagaggcacacgtgaagcttgccttgtccacatcgcaaatactcagctattgcagcaaacctagcacaacccactgacttgctttgcaacttcttgtactaaattgcaccaactagcttggcaaattattggaccaaatcacacatactcagctcataaactgtcttatccaccacaacgctaaccaatttgccattaacatggaaaaataaagaggaaaaaaaacacctatcaaacaagatcaaaatgttattcagaacttagcaagagtgagtaattcataactagatacaagcgcaaaaatatctacgaagtacacatactagatatctatctatctatactttcaataaagttacaacccacttgatggaataagtcttagtctagtctttgcattccttttttgctttttccagcttttaggatgtcatagcttttcagcttttagtcggtgttagaggacagcatcctcactttctgttttagaggacagcatcttcactttctgttttagaggacaacatcttgactggatgccctagactagctgcagccagctagctactactataaatatgtatccaagaaaatagacagaaaattgccccaactctcctagtgccatcctctcaatgagagtaaagattttgctactaacaccactaactctaaagctacatgcaaacatgccacatcatcacccactagcagtaattacatatttaacttcatgcaagcatgcaacatcatctacaatctatttaattctacaaatcaacatgcaagcacatccaatcatcacccctcacatcatttccataatattttaacaaatctatctatcatttttataatatttaacatatacttatcaatatgttccacattacagcacgggtatcatttgtttatttcatgataagtactaatgaactctaatgtttcattattatttttctatttactcctagctcgattgtcgaaaaaaagtatatagaaaattgcttagtaattcctgtagcaaagcacagggaatcacctaaatggaaaagatgtacggataagtttaggatagtgagatgcataaagccttccgttactttttgctataaaaaagaaacaaaagaaagtgaatagaaactctacttttggaggggaagttggggggagggcagagtttcatttcaacaaaggtgtggcaaacattgtttcaacccagtctggtatcttaaccaataccacatcaaaacttgtgctgggtcaacctgttttgggaacctgacctactcttccaagcctagggtggattgcaactgacgaatatcccaacatctcacgatatagaaccatttcctagggaactacagtttcaccaagtaagtttattcaggaatcaggtttagttaccaagtgttcccctcgtttgtctatgcacatgttagcttttgaacttatagtgcaaaatggaggtgtaatgttcaattccttttctgtttttttgttgaatgcaaacaaaaatagaattgaagcaaatcaccttgcctccacttccaaggagctctaacattacaacctcttctggatctttcttcttcctgtccaactgaaagaaatgcatagataacaagaagtcaatgaaacaataagcattagaatgactagaacatgacaagtccagtaagaacaaactatctcatgaacaaataagatgtcaagatggcaattcaaaacaaattagaagtatacctttgcatacagcgaaagcttcgtttcaaccacagaaccattcacaagaagatccactgatcccaagctgctcagccttggagtgcttggttctgttgtactgacagggtctcctagtatgttcacttcaggaggggcctacaagaaagtggagaaataccatcagacaaactatatacaaacttcaggtcctatgttaaacattataaagtaaaggaacgcttacagaagcttgatatgttgcttggacaagcgctttcatccaattggccttctcgatttcattatggtattcaattatcagtgtgctagttgattccagcgcctgcaaatggaacaatgctcagatcaaaaagggaataaaaaacaagttatacggcaacacttcaaaagaactaagtattccttcagtagattttgtcaagacaatggtaccccaacccgagcttttgactgttaaacttccttaggtgtagcgctagctataacatggcccacctgatccaactcatcatcttcttcttgctactaaaactgatataccatggtgagaacgtcttctttgactgattttgttgtttctgcttcctcgtctccattgttggcacatggcctacttgactcataattgccaggatcagatgtgcacttctctgcacgatggtttatcaacttcttcctggcacttcagttctacattccactgctcggcactacagggatctccagatgggcgtgactcatcactgtatgacatcgttgttaaatctggcagttttagaacttgatcaagaactagtaggaagtagctattgattttaccatcttctctcgtttactagttcattggatctcattgtacccaccacccagacaagaggagagaacggacaggtcgctagacttaatcactaacattactacatactccatccgaccgaaaatataaggacttttggagttagacgcaagttaaggagaaagataaaacaaaatgaggtgagatgagaaagtaatgaaggagaaagataaaataaaatgaggtgagatgagaaagtaagtggagaaattaaatgagaaatggttgtgattagttgagatgaggaagtaggtggagaagtactccctctgtcccaaaatataacaactttgccctcaggatttgtcccaaa

SEQ ID NO: 754 - DNA, 2789 bp, Oryza sativa
catcgcccgagagcgaacggccgtctgccatgtcactttcgccgccctctgggatggcgatttttaaaaatcgccctcccagagggcggtaggcgaccacttctgtcaattttcaaaatgaaaaattatttttataaaacttttaataaaaaaattaaaaataaaaaaaattcgagaatatacggtattgggctgcgaggctttccggctgttttggtgtccttggcccatgtactaacactggcaggctaccagcccacgtggtagctgcacctgcacgtcagcttcgctttttatttaggagtatttgtttatttttggaatggctaagatttcagttacctgaaattcttaaaatttcagctgaacttacttgctgtcttgtccacattaagattcatgctccggcgatggcaatagagtctttctctaggtttagaatttaggtttcaaggtgagggttgagatgggagggggagagaaggggggatggttttggtgttagagcgatggctatggacggaggccaaaccaacgatgtgtggcgaacaatgcgagcagcaaggtcgatgccgctgacgaatcaaatgtataatgtatatataagagaaacgactagtgatgtcttggcggcgcaagccactgaaggtgaaaaagacagatggtgctaaggtatctcaccatcgctcaagcatagaaaagagaactagtgaacaggagggggagggagggaggaggccggtctagtagagaacacacataacttttacttagggatagcgtctaaaggcatcaaactaggtttagactgagtttgacagcgtcggttgggagcctgtggttgtggttggtagcaagtgcgcactgttcatgtactgttcatagaaatcgtgggcctcccaaacggcgtcgtgcgcggctttacttccgtccaacatctacagtatgtcaaaagcacgtgagcaatccgaacggattaccaacctcaccatcccgctcccaacgggcgctgtcgaactcagatttattccatactagcttgtagaaaggaaagtacactagtacagtactattgtacagaatatacccttgaaatacattgatattctttattttcgcagacaaagatgtaagtgctttttttccataccatcaataatagctaggcaagtcagggtgtgtttagttctttggatgtaaagtttttgaagtatacggacatatatttgaagtattaaatgtaaaacgtagactaataacaaaacaaattacagattccaactgtaaattgcgagacgaatttattaagcctaattaatccgttattggcaaatgtttattgtagcatcacattgtcaaatcatggcgtaattaggctcaaaagattcgtctcgcaatttatatgcaaactgtacaattggtttttttcccacatttagagtctcatgcatgtgtccaaacatttgatatgatgtttttgaccaatattttttgaaatctaaataaggcctcggtaggaaaaatgaaatgtcgcctacgagttttcgcagaaaaaggacagaccacaatatcttatgtgtcctcgaggtccatacagcagcagcagtgaaaaggatttggagaatctgccccatgtggtgcgtgttgtgttgtccacactccccttggacctcactccttgctgaaattgttctgcacaaatggtacacatgaacccaagctgtccaccacccaaaacacacggctagtttgcctgagatatcgacacacaaagatgtacctcggaaatggcatatttttgtttctccatctgaagaacggatcatcgtatcatgggcttgttgttcatatctttagtcctttttttcctattaattttatgtataaacgtgtgatgtaaacttgcgaacaattaagagatcaactaaaaaaacttcgaaatatcacccacggctttgaactctcagaggtctcgctgagacaatcgagttgtcaaatttagatgatttctcatgtaaaaaaactgcgaaatattttttaaaaatgaaaaatagagtttaagctatcagccacacaagatttaggatctattcagattacttttaaaataaacctttttaggcccctttgattcaaaggaaattcatagaaatttttagaggatttcattcctataggaatttttcctacgaagccctttgaatcaaaggaatgaaccctatggaatcttatgaaattcctataaaatgcctcttcccatacaagttttggaggaattttaacaagagctagaacctcatggaagaaatcctttgagggccactttgaatcacatgaatggaaaaacagaggaataggaaaaacatagaattctgacaggaatgtaagtgtaaaacagatgattgcaaaacacaggaaaaacgtagaaatgatcatttgattggaccacaggaaaaacacaagaatttgaggagagataaagactcaaaagattttttttccatgaggttttacctcttgttaaaattcctccaaaacttgtatgggaagaggcattccatattaattttataggattccatagggttcattcctttgattcaaaaggctttgtaggaaaaattcctatatgaatgaaatactctaaaattcccatgaatttcctttgaatcaaatagggcctgagtctttatctctccttaaattcctgtgtttttcctgtggtccaatcaaatgatcatttctacgtttttcctgtgttttgcaatcatctgttttacacttacatt

SEQ ID NO: 755 - DNA, 1112 bp, Oryza sativa
agactggaggaacaatccattagggttacctaaatggtccgagcgtccaaagtgtgggtgcagagatcgctggcaggtggctacatcctttgctgaacaaacatttcgaaggagatattttgtctgccccaatgtagacaacgatttcgttgtatgtctaaccatttacaaaatccgctatgatttgcacaaaattactacccaaactgaataacattactatttttacagggcaatccaaggatgggtggatttactcgatggatcgacaatgtcactccatcatatcatggccagaagataacagagtcagaaacacaagtagagtatcaacgattgaaggaccacgagaatgcaatgcattctgaccgacctagaaggggccgataggttaccgcatgcttgattcgtcggaatcgacaaatttgtaccgtgtatcgatggcacttcttatctatcttatcattacaatgtttaattatggtggtgattttttgtatgcgtaagactaagggcctatttggattgctaccaaaaacatgccctaccaatattttggtaatttgaatagtacttgtgtttgatttcgattgaagcctattcattggtaatacgtaatctagatttgagattatgtagaacattcttcactacaattttacattttggcagcaaaccaaatatgatcaaatgcaattttaccttaccaaatatttggtagtgccaaaacttgcttatattttggcactaacaaaatatttgtacggtaacattctaaataggccctaaaaaataataaaattgtattttaccagtcttggagattttaatcttgtatagttttcaatataaaaagatttgataactattgatatttatacaaaaatataaagcacagtataaaatcgccctcccccagggcggcaagggggccgcctgcaaaattccaggccccccgccgcccatttgcaggcggcccccctgccgccccgggggcgggcgatctgatgccgtgcagggggccgtcggctaattatcatgagtgctctcgtccgagagcgaagggaactatgccagattaatttctccgcgactggtgatgtgcattttta

SEQ ID NO: 756 - DNA, 960 bp, Oryza sativa
ccaaaggataaagcatacatcggctagaggtccgatgtcataaaatccataagattagattgaacagtgaaatctttattgcaatcggctaaatccaaattgtatgtaatccttgtaagccgatacaacgtccagatacctcatcggctaaagccccgatgaaacccttattggcagtcaacaagcatgctagatattacgattctaagcatgacttaatagatcaaatttagttgatgcaacactaaatatgaaaagaaacataatatctggacaatcaagcctatggctgattttaagggtggtagatgtctaagttaatctaatctagcaacacaatttagccgatgccggcagaaaccctaaaacgagaagcagccaatagagctaaattgatatgctaagactagattaacagagacatctgataaataggtaggcaaatatatcatccaaactagagcaattcaagaggtcgaatgtactgatgcagccttgaacgatgccgacgtagacgagacaattgcctaggccggtggaacgttggacttatcccttcgctagagatcgaactgaactaatgcagccccgtgtcaggtgccaaattccactggaggataagtaaaaacctcggtaaagagggtggcgatgcgcttagagtagtattattgatcgtggagataatttacaatgacctgggtgtacatatttatacccatggggagtgttcgcggtatgtcatgagtcccttcgaccagacctaccgaaaccatgcaaccagcgaggattcaggcccaggacgctaagatcatttgggcgaagtcccatggcgaagactatgaagtagaaatcgcgaaggccgaagaatcgcgctggtatccggcaagaccaaatgcatcattgggcgaagggtgtatgccggaagatggggtcttcgccataacaagcccaactttgaag

SEQ ID NO: 757 - DNA, 645 bp, Oryza sativa
tagtagatccgatgcttctcatagtccaaacacaccaaaacgtacagctgatcgagaaaatcaatggagaacatcatggacggggtctgaagagtcgatctcaacaaacccgtcgcagagagatgcacaaagtgaatatggaagactagagagttctacagaagatgtaagaccttttttagatatgctatttgtctaattgtagtgttgtttctaactaatggttatcttccagaatgaccaatctataagtgggtctggaactgttgtactgcgctcgccaagagcatctcaggtgtaccctgcagctactaaccacagttccaaggtgtgttttagattcctaatatgaatgtcatagttttcccccaaaacaagacagataagtatgtcctcccaatccgattctgaatataggtcattttagccttcacaattcttttctaaatgtatgttgttttggtacttttaagcactttttcatcttttactagcctagaggccatgcgttgcaacagaaaacaaattgagtttctagcttattaaatcaattataagcacttatttagtccaagtactactattatttttcttattgaacaagtaggattttgaaacataggggaagctaatagtgaaatgggg

SEQ ID NO: 758 - DNA, 567 bp, Oryza sativa
gaggccacccacgacgaggccgcgggcgcgccgctcggacccgacccttcgggcgacgttcgggacgagccagcctcgggggacgcccctgagtccggcacgtcgattggcgggccgagccgcacagcgcccacaccaaggcagctctcccctctgccttccaccgccccactgaacacagagcccctcctgcaggccctggccgccgcgaacacgacggtgctggacgggttaggtgcccagatggaggtcctgcaagcagagcgggcggaactcgacgcggcgtgggcgcgcgtcgaagaggggcggcgctcggtggaggccatggtggaggcgggccgcaaggcataccgccggcacgcctcagagctcgaggcccgtcggtgggagctggcggagatcgccagggaggtggaggaggagcgggagactgccctcatcgccaccgccgtgctcaacgaggcgcgggacgatctccgccttcaatacgggagccgggtggcggagctagagaagaaactcgacgccgcccggggagtccttgacgccgccactgcacgggaacgg

SEQ ID NO: 759 - DNA, 683 bp, Oryza sativa
atttaccgagaaagcaatatctggcctcgtactatttgcaaggtacataagtgcaccaatagcactaagatatggaaaatctggtccaagcacatcctcaccataggggttttggaaggatatgacttgtccatattaaatttctacaaaattttctaggtatatgcaccttggtgcacaaggattccagaagataaatgctcaagttgtagacctaagcaaaatttggtttgacccaaatccttcatctcaaattccgtctttaaatgatgacgtgcttcattaatatcttgtgtattgccaataatgttgagatcatcgacatataccgagataatacaaaatcctgtggggtctttttgataatgacgcacgggcaatcatcatttttagtgtatccctttagtgaaaggaattcacttaatcggttgtaccacatcctgaccgattgttttaagccataaagtcacttctgcaacttaacacaatacatgttacgatttaccttctgattcgggatgtcgatgccgtcaggaaccttcatgtaaatatcagaatcaagtgacccataaagatatgcagtcactacgtccatcaactgcataaatagacgattttgtactgccagtgatattcaatatcggaaagttataccactcataactggagagtaagtttcgttg

SEQ ID NO: 760 - DNA, 564 bp, Oryza sativa
aaatgatgttcagactggatgttttgaagcacaatgcaatcaatgtatcaaatgtacaagcttcaagaagataaggagacctttttgttcagtggctttgccttgaacttgggagccttttctaattcttctagttccaattcctgagaacttttcaccctgcagaaagatgatgttagagtaatcgaaaataatcaataacataaaatggcttgttttctgaatgatgcaagtggcaaagggaaaccttggtggtctactcgtaatgctgtctcaagttggggtggttttggcgctgtcaaggtcagtggcttactgctctgactctgcaagatttgattaaactttcagtaatgccaagaattttaatttttaggagactaataagaagaagaatttacatactgatattaacaaccaagttaagtgaaaggagcttaccctgatagtccccacggaagaagcttcggaacaggtgtctgcatgtcgtgtagctctctccatcgttttaagaagaaactcctgtaggtgttggaaaggaataactgaatcagccaaacaaag

SEQ ID NO: 761 - DNA, 592 bp, Oryza sativa
acgggtttgttgagatcgactcttcagaccccgtccatgatgttctccattgattttctcgatcagctgtacgttttggtgtgtttggactatgagaagcatcggatctactatccttggtggaggtgacttgtgatggctttaaaccacctcgaacagttcctgtgccctctgatctgtctggaagattccagccagcagctttcctaacagttccttgactaaaatagaatcccaaaaaaataataataataaggcacaggaagacaaacacgataacgcttacaagttattttctaaattcaccttgaaggagagactacatcccttgtagccctctcaaccttgatagtaccagtaccatcatcttcttcaacatgtgttcgaccattttgtgtggcatccgcactgctttttactggaaacttcggtcgctctctgccaataacagcaattgaggaacaagggaatcagataggtgttgagatgtctcaattatcagcaaaagactgcttttaactcttctctctgttatgaacagaagtactataccacataccttattctatccagaagctttggagattttcta

SEQ ID NO: 762 - DNA, 601 bp, Oryza sativa
cttgcacatgtgttctattgcttcgactcttatcccttcaaggagttcgagcaacaactcgtgcgcatcttcgcctccaaagaacatcacccttggcgaattagctcctagttctattagggtcattgcttcgtcgccatagagaagcatgaacgggctgaacttggttggcctagtgggggtcatccgaagggcccagagaacagatagcatttcgtctagccatttaccctttgccgccccctcaagccttttcttgagcgccatttgcacgttcggccgccccatttgactgtgggtgcgcgaccgaagcgaacctgatttccaggtttatcccctcgcacatctctctgaacttgtcagagtcgaattgcttgccattgtcagtgatgaattccttcggcactccgaaatgacaaacaatgttcttccatacaaatttctgtactgctaccaaagtgatcgcaccaagtggttcggcttcgatccaacgggagaaatattcgattgctacaattgcaaacttgtacccatttcgcgctaccgggaaagggccgattatgtttagcccccatatggcggaaggctagaccggagcgat

SEQ ID NO: 763 - DNA, 584 bp, Oryza sativa
tgctgcccgactgcttggatgcgatgacggcgtcttcggctttggcatactcattggctttttcaaacatctacttgaccgtcttgggaggcttgcggccaaacttgctgactaagagttcatggcgaaagcccttggtgaaggtggcgatgataacgtcgccggtgatgtccgagatctgttacattgcttagaaaaacatcggatgtaatctcgaagggattctccggacttctggatgacgttgtaaagatcaaactaggtaccagggcattcaaaagtaccctggaagttggcgatgaaatggtcgcgaagctccgcccagaacccgatcatgccacggggtagcccgtgaagccaagatcgggcatagtccgctaaggccacgggcagataattagccatggctttgctatctcctcctgctgcgcgaattgcgaggcctttgacggtaagccaagactcaggatttgtcgtgccgtcgtacttctcgatcccagttggtttgaagccggccggccaatccactcgacgcaggtcacttgtgaaggcagcaactccatccacgtcgtcgtcgtaacgat

SEQ ID NO: 764 - DNA, 692 bp, Oryza sativa
attcctgcaccccgttcataaagatgttcaacaaacacatcggaaggagctggttctcgtttcgaaccgaaattggccagtctgtcggctacctcattgttatgtcgaagaacatgggctagctcgaggccatcaaacttatcttctaacttgcatacctcctgccgataagcagccatattatcatcaagacaggaacactctttcatgacttgattaacaactagctgagaatctccacgaactatcaaacgccggatccccaaagatattgcgatccttaatccatgaagaagcgtctcatattttgccacgttatgggacgcagaaaaatctatccacaatacgtagctcagtctttctccagtcggggaaatcaggacaactcttgctccggtgcctgaaagcctttttgacccgtcaaaatgcatagtccaatactccatcttctccatacgcgtgtcttcctagcactcagtccactcagcgacaaagtctgtcaaggcttgggacttgatcgaagttcgcggcttgaaggatgtatccaaagaaatcaattctaaggcccactttgcaatccgtccacttgcctcgcgattatgaagtatgtccccgagtggaaacgatgtgaccaccgtaaccgagtggccttgaaaatagtgagataatttcctaacggtaattagaacacc

SEQ ID NO: 765 - DNA, 924 bp, Oryza sativa
tgtatggtatgccttttggggggggagagatgtaatttatacccttgataaatcatccaaagcctaaaaacaatttagataatgcgaagaggtgcaatttacacccttgatgaatcatccaatgtgacggagcgtggggctcctcaccgggagaccgcacgggcccccctttgccggttcggccgggggctcagggtgagatcccaagctctctgtgtatgtggaaagatcgcgacctattgaaagagcatgaagcacaagcgatgtatacaggttcgggccgctgagaagcgtaacaccctactcctgtgttttggtggatctgtgtatcaaggagctacaaagtgtgagccaacctctcccttttcttctagctactgaatctggaaaaagtcatcccccttccctatgggcaaggtcctccttttatacttcaaggggataccacatgcacccctctctttccaaactggacttttcttctcttcataaatggacggagatttgcacggttgtcctccgaacatccttctgacgggacggcacacacctacctccacttctgccggaggcaggcgcgtcgtgggaacgtggctgtgtgctgacgacatgagcagtgtcagaccgatcacaaatcggtcattcttgtccaccacgcgtcagcttagcaacgtgcatgtttgcccttcttcacacaacatcttgcctgtaatggttaggatgaagcctggcatatatcgaccggggctaacgtgccatctctgggatgtaacacgctaactccagctggggacgagtgcctagaagctctcgtcttgacgggatggggcgaagcgtgcgtcagaccgcctgtcgccacctaacccgcgatttgaccggtctgtgactggtcacagaccggataaacgagtggagtgcactgta

SEQ ID NO: 766 - DNA, 672 bp, Oryza sativa
cccgtagctgttaataaggatatctcatgtaaattctttagagatatgtttgggcaaaagtctgccgcaaagacttatggtatcttagagtttgttagagataagaatcgtgtccggcaaggacatatcttgtaatctcggatataaatatgacccgagcctatgtaatcaaataacacacattcaataacactttcggcgcatcgccacccttttattctatttcgacgagttcttgctttcgggttgagctgcattgattcgatcttcaactagaggtaaacttgtcaaggcggtttgcgttctcgggattagtgcttccatctttatgacactctaatcttgtttatgtaattcgtcgagttatcatatatactttacaatctttgttagttgtgctatataacttgtcatcggctagttcttgctgttaagaagtaaccgatagggctatgttttgttgttaacttggattgtatcgggtatctaccatctcttagaagttttcatcatcttgtttagatcctacagttatctttatgcttaatgctgcatcggttaagtttgagttcgatctattaagttctatctataattgtgatatctagcctgttttataataattaatagagatagtatcggggttcagccgatcttacctgatttagctac

SEQ ID NO: 767 - DNA, 697 bp, Oryza sativa
cagaagtaaggggctactgtcagggttacgggtaaggtataccctctacccttcgatatacgtcacatatcggtacggtatacctgcgcgtatacggacgttttctacatacattaaggaaattcatcacggagttcatagatggaaggagtcctactcggacaggactgggtcgtcactgtatcgtgcagggtctgatgtctccgagttctacttggaaaccgcctgacctgcgatataaaagggaccccccgagaggacctaaggcatcgaatctcatagccaacacatccaccacagcctacgaagtcggagtctacaggagccaagtcgccgggagatctagtcgaaccagctcgattacgatctcgccggtaccatcgaattccactgttccctttgtaatctatgatttccatcatataatcccatatcaactggattagggctattacctatcaaggggcctgaaccagtataatctctgttttctgtctgcttgatgtcgtattacgtagatccttgtaccagcgtatcccccgtcgacaatactaaaagtccattaaacttcctacaaacgctcctaagttgccaagtggcagtctaaatctaaccgttgattttcctttaaattggtaggcccaatattaccaaccattagatcaaataaaaaaaataaaatcctcctctccacacc

SEQ ID NO: 768 - DNA, 1280 bp, Oryza sativa
ctccccctctccccgggccatctcctctcccccggagagctccgctccccccccccccccgctcagctccgctccgcctcgcccgcgcgccgcgcgcgcgtgcgcgaagaaccgcgccgagtgctcctcctcctccgctccgcccgcgcgcgtgcgcgtgatccaccgcgccgagcgcccccttcccctctcctgtctgtgccgcgcctgcgtaagccgcccgcgccgagacaagtcctccctctccgctccctcgctgccacttcccgcgcgccgtgttcgcgtgcgcacgcccgcgcggacgccgcccgttgcaagccgcgcgcgcgtgccgagtggccgaccgcccggtcgccgccgccgtcagcctttgcacgcgtctgtcgcccgtgttgtcgcgccgctccaaaccgcccgccgtcatcgctgtcgtcaccgcccggcccagccactccgcgcgcaagccgccaagggacggaggcagcgcccctcctccctctgccgcgtcgcccccgctcccctcctcctttttcctgaatcggcaaaagggcaagcccctttcccccccccccctcctttttccccttttcccccgccggcgtcatcctccctgtcgccgctttggccgcgaccgccgagcgccagctcgcgccttgaccgccctaagtcggttcccaaaccgacattgccacccccctttaaaccccagctccttcccctccaatctccctcgttttcgcctcctcgccatagctgccgcccccgtgctctgttcgccgtcgccgttcgttgttgcgcgtgtcggaggagtcggcacgagcaaggacgcggaaggggacttcggccgcgccctctccttcctcttccccggcccgaggccggagagattactcccgcgccgtcggcctctcgtcacagcgcccctcctcatctcggtgatgcctccctccgttcttcctcctcgctccatctcctccccctagctttcggtagtagctcgagtagactccccgtagttagccggcgccgccccgaccgttgtcgtcgctcgccgcgtgctcgccgccgtcgccgctcgagctccgtagcacccgctcgtcgccagcctcgctcggcgtagttccgtccaatccgacgctagcatcgagttcccgaaaccgcgtagatgctctcaccgccgggaatcgacccctcgtggcctagccgctgtttccctcttccctccccaccggttgacgccaccgcgattcgccgccgtcgagcttcctctggcaaatccg

SEQ ID NO: 769 - DNA, 1740 bp, Oryza sativa
cgcgtgcccgagccgcgccgctcaaatcgccgcgccgcccattgcttcccgcgcgcgcgtgccgtggtggccgaccgcctggtcgctgccgccgtcagcctctgtcgcgcctgtcgcttgtgtcgccgctccgctccacaccgccccgccgtcatcgccgtcgtcatcgcctccggccctggcctctccgcgcgcaaagccgccaaggggacagagagcagagccctcctcctctcttgccgcgacagcccccgctccccttcctccttttcccaaagaagcaaggggcgagccccctttctctccccctttttcctcctttttccctctcgccggcgtcatcctcctgccgccgttttggctgctagccggagcgccagctcgcgccttgaccgttcaatgtcggtttccctcgcccaaaccgacattgccgcccatttaagcccaagccctccccctccaaactctctcattttcgcctccgcgccattgccgccctctgtttcgccgtcgccgatcgtcgttgcgcgtgtcggaggagccggcacgagcaaggacgcggaagaggacttcggccgcgccctcttcttcctcttccccggcccgaggccggagagattactcccgcgccgtcggcctctcgtcacagcgccccgtcccgcacggtagtgcctccctccgttcttcctcctcgctccatctcctccccttagatttcggtagtagctcgagtagcctccccgtagttagccggcgccgccctggccgttgccgtcgctcgccgtgtgctcgccgccgtcgccgcccgagctcggaagcgcgtcgtcgccggcctcgctcggcgtagttccgcccaattcgacgctagcatcggattcccgtagccacgtagatgctctcgccgccgggaatcggcccctcgtgacctcgtcgtcgtttcccccttctcccgccgccggttgccgccgccgcgattcgccgccgtcaagctccctccggcgaatccgagccgttggctcgtctcccctcgtcacgtgcaaccacccggtgtgctcgcttttgcctgtatcgccgtggttcgctccgccgctcgccgccgtcgtccgccgtccgttcaggccggcgtcgtcgtctacctcccgccggcccgcgtggcagccacttaggcgccacgtcggcgccagctcagccaagactgggtcgagccgaccccggtcagcccctccccgtgcgcgcgttccaccgcgaggcgtgaggctgcgcgtgggcccgccgcatccgcatccaccgcgaaccgcgcgcgtgcaccgcgtccctcccccaccctagcgccgcgccgcgtgctccctccgcacggtgagccgagccgctgacaagcgggtcccacccgggaccgcgcgtggtgagcccggtccaccggctctctctctcctccctcccgcgcgcgcgcgtcttgggccgctctgggccgccttcttgggccggccggcccgttaagctcggccgacccgccctttctctcgggccgcgccctagccacccgagaaaagtctatattccctccctcctttcttttctttttcttttccaaaaaggatttaattaaatcctttttccgttagaccaaaaatccaataatcttagaaattcaatatcttcccaaccgtaaatcgtttgactccgttcaacttccaaaattcctcaaatctcgagatccatctaatggcatgcttagaggtc

SEQ ID NO: 770 - DNA, 11512 bp, Oryza sativa
tccatttttacctgatttttccatagcaggcagcatctattatatatattcttttgctgagatacctagcagtatttaagtataacgaaaaaaaaagtattcgtagttgggaatgaaatggctagatacaatctgaatccatatttcttaaattgatgttgataaatttaaagtaaaatctagtgaaaggtggtgcaacatatctacagctctcctgtgtattattttgttggaaactctgaatagatccaagggacaccgacataacgttatagactctacagtcggagcagattgatatcggctttaaacttctttttcttattgtaaaacaataaaagtttagcttaattggatccaagagatgtaccaacatatgcctaaagtccatgcatcttgttagaatggatttaagagatatcattactgattgaataactcctcaatttataccatgtcagagcggattgatattgttttaaagctttccttttcttattgtaaaagaataaaagtttagcttaattggatccaagggatgtactgacataccgttatagagactaaagtctgtgcatcttgtcgaaatgtatttaagagatatcgttactgatcgaataactccttaatttatatcatgtcggagcggattgatatcattgtaaaaaaatgtctccttttattattgtaaaacaataaaagcttagctttattggatcaaaaggatgtatcgacataccgttataaaatctaaagtttacacattttttacgaaatggatataagagataccgttactaatcgaataactcctcaatttatatcacggcggagcggattgatatcattttaaagatttccttttcttattgtaaaacaataaaagttttagcttaactagatccaagggatgtaccaacataccattatagactaaattttgtgcgtcttgttggactgcatttaagagatatcgttactgatcgaataactccccaacttatgtcatgtcggagcgaattgatatagtttttttttaaaaaaaaacctttccttttttattgtgaaacaataaaagtttagctttattggatccaaggaatgtaccgacatactgttatagtctaaaatccgcgcaatttgatggaacggatttaagagacacaattatcgatcgaataactcagtttatgtcatgtcggagtagattgatatcgttttaatgctttccttatttattgtaaaacaataaaagtttagtttatttggacccaagggatataccgacataccattatagactaaagtcggcacatcttgtcgaaatggatttaagagatatcgttactgatcgaataactcctcaatttatatcatgtcggagcggattgatattgttttaaaaaacctttccttttttattgtaaaacaataaaagtttaacattattggatccaagggatgtatcgacatatcgttatagagtttaaagtccacgcattttgacggaatagatttaagagacagttctcgatcgagtaactcctcaatttatatcatgtcagagtggatagatatggtttcaaagctttccttttcttattgtaaaccaataaaagtttacctttatatattttttccaactagctgctgcattttatcaataaatgtaaatttatttgtataatcagctgccagtacatactgggaagtggacaacgaacttaagcacccattccttcgttttaggcggagcaagaatttaaattatggctttagtgccacgctgtactgtagtaggacactaggacagaactactgacagaatcgctctagaaccaaaatgcatggtttggtggcctactgttaattctagctgtagctagccttgcataattcaaccttattgatcgtccatgttttccggtgaattaaacccacatgcaaacgtagtaggttttttatctctctcggttcacaaatttggacccctgaattccgatcctctgtaataagctgagtagtttgtgcaaattacgtgaaagcctgtcgtttccgtggcccacatgaactggcccccatgcttgctgactcagactccgatcacttcgcccggccaatgctccgctataaaaccctccctttttttggcaaggagttcccaccgtgagatcgagatcgcctcctctctccgtttccttttatttcccgattcgctcggcgtctcggcggcgaccttgcgcgagcgcgcgatgcggtgaaaaaaaaatcatcgcccgcgacagagtacatctgtcccttccgcataaggcaacgtcgctataaatactgccagcctcttcgttcgtttccatttttcctcgtccgctcgctctcgttcatgtacaaataggagggcgcatgcaccttgtttgccattagctctcgacgtagcctagagcgcaagcagcagcagcagctagattggttggttgccaatgatcccggccatctccccgatgatggacggcgccgcgcctctgcttcccgagacgagccccgagagccgccagcaacgtgatccggagagggggaagaggcggacgccggtcctcccggccgtcgtcgcgtccgccgtggtccttctcggcctcgcggcgctcttcctggtgtatggatttcacgacggtggagacgggagggcggccgtactcgcgcccggcaccgtggaggtcgcggcctcgtcgtcccgcggcgtcgtggagggcgtctcggagaagtccaccaccccggcgctgcgcctcggcggcggcgcggtccgggactacgcctggaccaactcgatgctgtcctggcagcgcacggcgttccacttccagccccccaacaattggatgaacggtatgtatacacgttgccatcgttcccgtggtttcatctaggccgttggatctgtaatcgcacggctccgattcaccggttatacaatgttttctcgtttctaatcttgttccctttccgtttcttttccacggacgtctcgtgcgcatggccgtgctgctcgtctttttctcggcatctacagatccgaacggtaagttgctggcgctgattgtcaatgcacggcgcaatcttgtacttgtcacgcattgacatcgatgtcgcgagacgtgacactttttttttgcacgcactgaccgggccgtcgatggatcgatctgcaggtccactgtactacaagggatggtaccatctgttctaccaatggaacccggactcggccgtgtgggggaacatcacctggggccatgccgtgtcgcgcgatctcatccactggctgcacctgccgctcgccatggtgcccgaccactggtacgacatcaacggcgtctggaccggctcggcgacgcagctgcccgacggccggatcgtcatgctctacaccggcgccacggaggagtcggtgcaggtgcagaacctggccgagccggccgacccgaacgacccgctgctgcgggaatggagcaaggcggaggcgaacccggtgctggtgccgccgccgggcatcgggctgacggacttccgcgacccgacgacggcgtggcgcaacccggccgactcggcgtggcggatcaccatcgggtccaaggaccgcgaccacgcggggctggcgctcgtgtacaagacggaggacttcctgcactacgacctgctgcccacgctgctgcacgtcgtcaagggcaccggcatgtgggagtgcgtggacttgtacccggtgtccacctcgccggccgtcgaggacgggctcgagacgtccaccccgccggggcccggcgtgaagcacgtactcaaggccagcctcgacgacgacagaaacgactactacgccatcggcacctacgacggcgagaccgatacctggacgccggacaacgccgacatcgacgtcgggatcgggctccggtacgactacggcaagttctacgcgtccaagacgttctacgaccccgtcgggcggcgtcgcgtgctatgggggtggatcggcgagaccgacagcgagcgggctgacatactcaagggctgggcctcccttcaggtaacgtacattgatcgacaacccccataaccttggtttcatatttctgataggctatagaattagtagtagttacgtataaacaaactttttttatttaattttgacaatggattgaacgagacacggatagagatacgaacccgtcaaatttctttgtgaagcatcataactgaacataattacaaaaatataaaaataacaagttatattaatctcaaatgacgtaggaaaactattataaagctgtctgaaaagccatattgatctgtgatataattcattgcaaaactaattagtcttttttttttgcgatgacatgaacaagatacttaattaagatttttaggtaactgggtatgtactatctcaattggcacagaacgagttactattaaaatctgaaaagccgtactgatttggtataattcatatatattgtaattaatttaacttgccgtatacatccctttttcccaatcatgtactgtactccattaattactgtgtcaaaaacatttagctcatactatttgaatcgctagagcaaaaaagtaaagtgactaggacgatataaactcatggaaatccattaaaaccttatgaaaataacgcccctagctaagccagctagctgctagccagctggatatgatgatcatgctgatctggctagttaaccatggatggctagctaggacccggtcattatgtagttatacacttgcatataccatttctagaccacaattccgcccactaagatataatgcaaaacgtctttacctgtgcaccacgagaggcatgcaggcgtgcggctttcttgttgcgccggccggtcgatccagaagaaaacgtgcatgaacatagttggaccagtagtatatgcagtagtccaggtctgggcgggccccacggggatcacgtccttttttttattattttttgaaaaccggatcacgtccttctaccggtctacccaaacgagttgcacgatgccgacttgattaatcggtccgagtcacgcccgcccaaccaccagaggtagccgggcccggcgagatttgcaggctgccaatagactcgcggggatttgcatgcagcagcggcgccatgacatcggactggatcggccggcgttttctggtgcccgaccgtgacttgtctccggttggccgcgagagcacgagagccgtacgtctaagcaaactagttgtcaccacgtcttagtgtggagaagtattagtactctattaattagctaaggctagagttagattaatcctcaaattgcgaagggttttttttatgcgtccataacgtgtcttgcattggcgcatagctagagattagctaggacatttacttgacgaaagggggatttgagtaaatttctgatttgctagagtttggaattccaaacaggactattcaaaggggttgttccaacgaagcagcacgtggataatgacttgcttagcatcaggaaatttaataccctgacctgtcgctgcaatcgtgttgtttttttaataatccgtaatcatttgaataacttagtaatttcgcggtatatgtacatgtcattcttgtggcaagcgtgaaagtgagttcttgagtggccggttcgactcctaggggaattaacttcgtttttgagaaatttgttttacgttatttttggaactaaaatgtttggcaatttattttaatcgatgatgaaatcaatggtttttgtgaaatgaaaaaaaaaatccactcatagttattctaaagatgaaattgaggagttttcgatatttgtactatactataatataaaaaaggaaatcaacaaacgtctcctttctcagttggttaggcaagttgttgtgatgctaataggctacacaagtctaaccgtgttatctaagttgtaaagatacttgagatgtattttaaaaaatatatggaaatggtaattgagtgagtgtgttcaaacttgaacgcggtccactaggtttctaattctaaactttaccaactgcgcaaggtggagttatcgaaattaggtgatagattaataagtaaatgcactttcttggtggtaaagatacttgagatgtattttaaaaaatatatggaaagggtaattgagtgagtgtgttcaaactcgaacgcggtccactaggtttctaattctaaactttaccaactgcgctaggtggagttatcgaaattaggtgatagattaataagtaaatgcactttcttggtggccagttaagttgtaaaaatacttgagatgcatttgaaaaaaaaagcaccatggtggaaagggtggctgttggcgagtgttttaaaactcgaacgcggcccgctaggttcctaattctaacctttgccaactgcgctaggtggagttatcaaaattaggtgatacacaaatttataaatgcactttcttggtgaccagttatgcaaatacactagacttctattaaaaaattatggtggaaaaaggtgagcatgataatttttatattaaacgcaaacgaaaacaagggtgaaaaggtgagtgtgctaaaactcaaacacaataaacaagggtgaaaaggtgagctgctaaaactcgaacacggtccgctagtctgtctaactatagactttgccaactacactaggcagggcttcttaaaaaagcagtggactttgagtaaatatacttccttggttagatggccgggtatgaaaatatcctagaattgtatcaaaaagaatttgggtgggaagtgagcgtgttaagactcgaacccgggctgttatattttacaactctactatttgccattggcgctaggcgagtttatcagaattaggtgataggttaaccaataaatgcattggccttttgttaaattgcgaactatacaaacttactaaaattgcatctttttttaatcatgctaaaattatgtatttttatctgaatgactgtaaaaacttgctaaaattgtatatttttaaaatcatgctacaattttgtattttgtctgaatgactataaaaaaaactaaactgctactaccatctctaaataaatgtaattttaggtgatccactagaccattttaatactagtttatcttttttttttcgttttctccaccacaaggacatcgtagttttttaatctcttgcttaataatatatctttaactagttaaaactatacatttttagagtcggagggagtagatccttaactgtctctccttcaatcattcatgtcattgtccctttttctttaaatcttatttttttcctgttttaaattgttgttgaattcaatgtgcccttgatgggccttgaccgaggcccatccaaacaaggcatttccctttatttaaattaaccttttattattattattatttgcagtcaattccgaggacagttatgctggacacgaagactggcagcaacctgctccagtggccggtggtggaggtggagaacctccgtatgcgcggcaagagcttcgacggcctcgacgtctctcccggctccgtcgtgccgttggacgtcggcaaagcaacacaggtacgtacgcgtgattttgacacatgaacacaaaatgtgtcatacatttataaaaaaaaagtgtgccatacacatacacaacaactgctatatatccgacccgagaaactgacgtgcaagtgtggttctggtgtgcgtgcggttgtacagctggacatcgaggccgtgttcgaggtggacacttcggcagccgacggtgtcgtcacggaggctggagcagcagcatacagctgcggcacgggcgacggtgcggttggccgtggcttgatgggcccgttcgggcttctcgtgctggccgatgatcagttgtcggagcggacggctgtcttcttctacctggtcaagggagtcgacggcaaccttacaaccttcttctgccaagacgagctcaggtgtgtgtggtacacattttccagtatatgcgtgcatgtcttcctctgtgtgcacatatttttgcaaccaaatattcacacttgatcttgttattagaggatgtattttttttcgatacttcaatttgtggacagaggatgtgtgctgtcgtgtgtagaactccttgtgtatatataaaggaggcttaaattttgctttaatcgagtcaagatgtaaattttaatgcattttaaatcttgtttttttttcaggtcatcaaaagcaaacgatctagttaagagagtctatggcagcttggtacctgtgctagatggcgaaaacctgtcaataaggattttggtaagtctttctagcaaatgttgagtacatgcatattcatatgccacaacgcatatattttaatacgtcgtaacctacctttttgtgtgaattttctttcaataggttgatcactccatagttgagggcttcgctcaaggagggaggacatgcattacctggcgtgtgtatcccaccaaacccatctacgagtaggccaaaatctttcttttcaccaatcccacaaatgtgaaagtcactgccaaatcgataaaaatttgggagctgaactctgcttacatccgtccatatgtagactagatcatttttaatgtaatgggaatgaatgatttgtatacatttgttagttatgtttttatagactaatttatcttttttgcttccttctttatgtcaaactacaactatgacatattactagcagttgaaataaaacataatcaatcatattgttttgcctcaattttgttattgtgtgtgcgcatgcgcacacgtacgtgcacatgtgcgtatgctatcactctacccctgatgttattattagccatcaccgtaatgttgtcgtaagccaattgtgtcatgtttatcctacataaacaatatacgactttgcgaacattcctcttcaacaatgccacaaatttagggcccctagaaaatcactcaagattttggagctaaactctacttaagttcatcaatatataaactacatccttttaaatgcaatggtagtgtggtatgtttagattcattagttgtatctctatagtcaaatttgtttgtcttcatctttctacctatcaaaccacaactgaaaatttttagtcaaatatgtttgtttgctttcttcttcttatcaaaccacaattgtaaaatgtaactacaccttgaaagacacaaaattaatcacatatttctattttgtaatctaatttgtttgtttgctcttctctttctatcaaactccaactagaaattgttagtacacaatttaaagacactaaaaccaatcacatttttgccacagtatttataattgtgtgtgttacatttgtgtgtgtgtgtgtgttacatttttgtgcatgtgcattatatttgtgtgtctctgtgtgtgtgcgcgcgcccgcacccctactctggctatgttatcctcactcctcaccaatagccataaataaagtagtacaagtcatgccattcaaccagtcaatcgcgagacttcatctatacctaacatctacctagtggttgttagcaagtggggaaatgggtgagctcgtagcctcgtcatctccggttcaactatggacttattcggctaacagtttctgtggctgcatggcagctagctgtaggagcaaaaggcaaaactgtcctcgcacaacacaagcgctgcaaatcgcaggaatgacttccgaacgtgtcctatgtcttctaggacctctaaaaagtccttcccactttgatgtttgtttggatggccttattttcaattggaatcatttgatataaccaaaataataatcctttatatatggtttctctctaccatgtatcttgtttgaatccaatttatcactagattttaagaatcgttgacatcattatactagataatgattattaggagaagattcttacagcctgaccaacattaatcatgccatatacatacaacttgaaactatcaaaaccaatattatgacaccatacttcataacttgaagacaaattaacaacaatcacaatgatgccaattacctatcacactccatagagcctatagtcatgcgcaaaaactcacaccaaggcttcataaggtgtttgttccaatcagatgagactatatcagatatggcatgttaactgtcttttcctccccataccatcattttttgtaaaattatccatgaacaaattagtttgtgaaatttgaactatagtcagctgttgccggggtattatttttttatataagaacaagaagaagatgccttatttcaaggaaaaatgagaccaaaatttgcggtgcataattaattatacaaaactaagcaaaaaccgcaactacaacacattcgtagccaactaacctaaactaccacaactagaagtaagacaactaagctcaacactcaaactctgttggccacaaggcattattgccacacgttgttgatataggtgttgtagctacgagaaacaaactgaaagcatagacccccacacgttggcaatgacatgtcactgtcatcataccatcgcccacacgatcaagtgacccctaattcgctaggaagcaccatagcaagaactatacaacttgctactctacaccgaagtgaaacacgattgacaggtccgacatgagtcgtcattgccgagttcacatccacgcagcagcttcaactttcctaggagacaacagccaaacgcctctcccaacttgtcatggttacggataagacataccttctatcctacgacttataaaatatacggatatgtcatacttttgtatgtacgatacgtttttgtgtatgataaggaaatcgacaagagattatggaaataaacctcacgggcaagtaacgtggtagagttctactcagagaaggttgggattataccatatcgtgtaggatacagagtctcccagtagacgttctacttggagacaaaggggtccaaggtataaatagccaccccctggccgggggggggggggagccaacaccaccaccatagcctacaatctggaggacttgaagcctactcgttgggagatctcgtcgaaaccatctcgacaaggatctcgctagtaatctcgggattgactgttctctattgtaacatgtgattttctatatcaatctcatataaactggattagggctattaccttacgagctaggggcctgaaccagttgtagcgcccgttccgtcgtggcgcctagcggaaaaattatctcttaaaaaccctaattgcgaaatttgtttcttcgcttgttgtctagtgtccgtgccatctcaagatctcaaatccccgatctatcgtcaagttcaattccgaatccaaatccttccaaatcatatccatccccaaaagtctattttgcc

SEQ ID NO: 771 - DNA, 20622 bp, Oryza sativa
tagtttatatataaaatagtatatcttgtcaaatacaaagtacattgataatataaagcaattgtctaacttgacagctattaagacatattgggcatcctatttcaaagggtaggtagtggattacgtaaataaatggttaaagttaaacacgtcctgcaaccaaataataaattgggtttttctcctagtgttattgtagtccgatagaacacaagtagttaactcaactcggttttagaccaaggtttagatctgacaaacacaacttaaaatgtgagagtggaacaattgttcaccccgtatatttataatagcaaagaccatttgcaaatacccctaaaaaaagagctgcccaaggttcggcataggcttttccccaaataagtcacgcatattaccaagattgggacttaaatctctcaaagtgaaggtcagaaaggatttcaagagggtaacagcatgcagaacaagaacatgggtattttatagagtagagctggcgaacaagagactctgcatatgttcttctcccatgcatattgcaacagaaagtctcaaatccaccaagtatgaaatgaatatcagaaaaagaatacacaagggcaacagaaaagaattgcaagttagcgctagaccgcttcttattcatatcagtaaattactagaaatcgattgcaactccaatcaaccacagatgaagaatagcataaacgaattaaaaagggcagttgcatacaccgtccgtccccaaaaaagaaaaattacttctggctatgtatctagacatagcctaaataggtaggcaaaagttttttttttttggaacggagggagtagatcaagaacaaaaatcccccttttgcacgcatgggaaatagaataaggatacatgaaagaaagggggaaaatcaataggcgtaacaaatgttaaactactgataataaactatgggtaaacaaaagaccaaactttatggctattacagattactttcatctcaaacccactaaatctcaaaagctggaatcattcttgcaagttagaaggaaaagagttcagccagctgtttgggacaggagaagggaagaaagaaggcggtttcgtgagatttcgtccagcgtgcaatgtgttactctcgagattccatgagatttcttccatagttcaatgttttaggttagaagcacaagaaaagctaacatacaagccttttcaccaacagccatcacatatggacatttcactcccgaaatctcaaaatgtgttactaatatacctagcaacccaagtaaccttgtgagagaatgggaatacccacaagcaagccaaaggtttctaaagagtctacagaaatgaaagaaatatgctctaccaagccaaagcatgttgacacaggttgtatcatttgtccaaatcttactattaagataagtccattctcatcctatccctttcctctattggcccagctaatcccttctctccttgcaactcttggttctttttctagactcgataaaccatagccatcattgacaacaaaatatatgatgcagccccataatcaaaagccttgtcctgttgtccatctataatgctacaatttgatgcataatcaggtctaccacattcacacacatacatggacagagataagtaccaaaagccatcaaatttgtataaagtgaattatccttctttcctcatcgaacttagacttttggattgaactggtcggtgcatgtaactcaatatggtatcaaagaagaggccttgagttcaaatcctgactggcatgcaattaaataaaaaaatacagcccacttctaaatattccacgctagagacttgaggttgtctcgtgtgaaggggagtattggaatacaaagtgaattatccatcttttctcatcatttagtttttgagttgaactggtcggtgcatgcaactcattacatcaaatctaaatgagttcatccatgaacaacataatctgagattaggagtatacctcagttttgggaggcgttggggaggggaaatcgatgtcgatgcaaacttgtgcgccgaatctagctgtcctatcctcgccgccacctactcgctgcgtgagccaacctgtgctcgtttgtcgaccggccgccgcctccctgctcgccgcacccgtcaatcgcttgccgcctacctgctcgccccttgtgctagcctgtgctcgctcttctgccggccgtcgaccccctgctcgcccttgcgtcggcctgagttcgctctggcttccgccccctgctcgctgcaaccgtcaaccgaacggcgtgattttttaatattttctaaaccttttgaatatataatattttaataatagatcctattagattttattgtcacatctgaatttggaccacgtcgagaatacttgcgttaccaaataaccgtaccacatcacatgcataggcatggcagaacacgccacagccacgtggaagagtgtgataccaaaatgccctacctcatcggcttcgttgccatcggctagtgggatgccgtggcacgggggcggccactggacgctgatgtggtgtgggcttgagcggtgctagaagctcctgatcgtcaggtgatgcaacaatcttgcaatgcttccacccatgcagcaccaccgccccgcagcgccaccgcctcctcctctgccttcaaccgcaccagcatcaccgcccccttctatcccttcccttccctcacccccttctcgtccagcttcctcttcacagaccgccggcacatcacgaccgcgcacatcatcaagcaacacgagcacgagctaccctctgccatcgccattgtcacgcccgaaaattcacaagtaatttccgaactaatttgtgcattaaaccctcgtccagaaatcagccaaagtacacaaactgacaatttaaaatgcagattcatcataataactaaagcgcttaaatacttacataagagacacttagtcatcaccacgaagaaaactgcagcggaaaaacttacataagagacacttagtcctcaccacgaagaaaactgcagcggaaaagaaaatctagcaaagcttcagctccactcccacaggtagctcaattgggatataagccaaagatcttctccttatggatcctttttctccaactgagatttgatgattattgcaaggcgattatatggaataatccgcaagccacacaacaagtatgcaagtgcacagggataacataggatggcataatgttgggttcatttgcgaaagcagcatatggcaaagagttgtgaatttgtaaaatagtagagtaattaattaaacagtattaatgcaacactatacaacatactcgttgcataggcccaaccatatctgtacaaccatgcccggttgaacagacccaatcttcaaccaggaattaaccatttcaaaccaggagctaaaccaaagtatcatcatttatcacaaaaaaattgctatgctcgtccatgaccgcgggcacggctattcgaatagttttacacaacaagtatgtaagtgcacagggataacataggatggcataatgttgggttcatttgcgaaaacagcatatggcaaagagttgtgaatttgtaaaattgtagagtaattaattaaacagtattaatgcaacactatacaacatactcgttgcataggcccaaccatatctgtacaaccatgcccggttgaacagacccaatcttcaaaccaggaattaaccattccaaaccaggagctaaaccaaagtatcatcatttatcacaaaaaaattgctatgctcgtccatgaccgcgggcacggctattcgaatattttaatatggccagaggtgtaccactgtacccacaagacacaaccccataacatgttaacatgccctcagtaccaccatggtacctcgaaacgggactatgacaaggcacctcgcataaagcaattcaaagcaatgcaccattcccagatcatagtcaccccctttagagcaaggtatagactccccagcgacccccatgggattatctccgccacttctcagtctagcactccacaatgaaccatgctatacatcgcatccagttgctgcccatgctggcttatggttagtacggttaatgcttcacaacagtagctcgccaaccggttcttaattatcatgagtacgaccttcaaaaccatgtactcataacccaccattatcaggttttagttggcaaattaattaattaaccaatcacgattaaccattatgagctatcactaaatattcatcattaagtaatagtgaaacattagttatgccaatactatgctaatgtttctaaacatggctaagcaattatatcaaatatctaatataacgcccaagctagtcaaataataacccatagaataataaagtcatcttcggccataatataaggaaaaggctcacaacagctaatgacatttgaaaataaatgtatatttgaatgaaatagagaatttaaacataggttcaacatgctcagaggaattatgtttgggatctgtatgacttgccttgcaatcaaacatcttcaatccatcttcaggagcttatccaacgaacgaacggtcctccaaaacgacagaaaactaaacctggaacacaaaatgaggaaaaacactaataaaaaccaaataaacaatacaattaaagttcataaatgggtagagattgaatttatatgaattacgagacttgaacgacctcattccaagtttgtatgaattagttatgaattaatgaagttttaattgattaaaacctataaagaaaacaacctaaatgatttattgcatcatatttaattattttataactgaaaaggaggaatatgacatcagcactaggatagaagagtgaaaggactggggacgagtgggacccacttgtcatagagacaagcggtagaccgggtctaccatgacccaactccacaaaggtggtccacgggtccacgggatggacggctcagatcgagttgaccaagatccaacggacgagattagttctggtctaggttttgaggtggatgccatgcggatagaggtgtgacatacaataaggccatggcctacgctccagcgtggagcgtggtctcaccccgcccgaggggaatattcccgccagctcagacgggaccacacctcagcagaggtgcgcgaccccagcagaggtttgcgtggatttgtcagagtggggcgaggaacgggcgaggagccatgttgagaggcctcgtcccgtaacgtcaccccggacgctgcggacaactacctctcgcgccaaggacgaagatggcgccgccgcggcccaatctgccaccgacgcctccatccgtcgccgttgccactcgatccggcgccgctgcatcgatccgcccccgccgccgcttgatacgccgttgccgcctccatccgacaccgccgccgccggggaggagagcgccggggaagggagaggtggagagaaaggaggcacagagagatatggtgatgagaggaggggtcggtgtttatatatgtttgtgatttttagggggtatactgcaaatattggacttatatgcgaataaaactaatctaagggtttaatgcaaaatgtgaccgacagataggtattgaattgcaaaaataagatggaggcatggcttacactatgaggcatatccctagccgggtctttattcacttttgctcacgtggatgttgggggtgctccctgcgttggcgatggcctaaggtgtcagctgacgtggacgcacgcgggatagacgtcgacggcatggtacgacaaccacgacggcaaacggcggcggaaaccgagagcacggggaggaagaggagaccgaggccatccttaccagtacttacaagacgacagacggtgaacggagacggccggctgcgagctcgggtcggcggctttctggcgacgacgggcggcggcaacggaggggtagacgggcttctcctcggcgctggcgatgccgaggatggcgatggggggaacaacggtgggtcacggctggaggtcgatgggaggcagaggcgctcgggttcgcatcagcgagcagcttcctgcggtcttcggtacaagcgaaccggcggccgaggtagccctcgcccttgtggagccgaaggaggcaacggcgcaaggcggcgtcgaccagagaggcggcgcgacgcggccggagttggcggcggtggcggacagagaggaaactcgcgggaagaggtggctaggccacggcggctcggggacaggaggggaaaccgaagaggagacccgggcatcatttatataggcggaggaggaagagatccatgcggatttggggtttcggcggtgggaaataagggttcccgagttcatcgggataagaatggggccgaaatccagcgcgaatttgttgggggctttcttgtggcgaacgtagaggtgatcgagggaattccgtttccgcggagcaacgacgaggccgaatttggtggaggtggcggcgttgatgtgcacgggcacggccgcacgggagaggcggctgggggaggaagacggcagtcacggcactgtagccgggtgggccctaggcgtcaggagaatgaaggaagagggacgcacagaggacttcggacgagaaagacgggcgcgggctgcgggctgaggaaggagagaggagattagtgggatggattcgttccaaaactcagggaaggaattttagttgattttctatttcaagtaattactgacatgttatttcatttattaaaaatacttaccatactcaaataattccaaaaaaatcctgaaaatacttaggatactcaaagtatttaataaatttttatctagctcaatttaatgttcgaattttttatagattttattcaaacacttactttcattattaaataatttctgaaattttctttttcaccacaatttataatttagctattgttagggtgtgacagctgtcactgctgctccagccagtgggttgtggtcctcgtccatggccgctcctagcgcgtttggggcatttttgttccatcaccattagagatggcaatggggacccgatcactgattccctacggtgaattcacatattaggggatggttaatatctattctccatggggaatcaaatggtcccaaactaatcaccatcggtgaggacggtgaaccattcgccgtccccgcctcccgcggtgacacttcttcagacgtttcgacccataatattgaagcccaattaacatgtatatgtacatctaaccctaatcaactagtcaacctccacatcttccagatccacacttccacaaactccacaccaggcgcgcgcgcgccgccacctcctattgcgcgggctctgtctagccccagctgtcgacgcgggcgcacgtctgcagccgtcgcatcgcccgaagccgctgctcgaagccgtcgccgccgtcgccccgcccggagcccgctgtcatcgtcgcgctgttcgtctgccatccgtcaccagcgccctctgtcccagtcgtcgacgcaggcgcgcgcttgtagccgtcatgccgctcgaagctaccgccatcgcaccgctcgaagccgccgcccggagcccgccgtcgtcgtcgcgctgtccatccgccatcctccaccagcgccctccgtcgctagcacaccgtccgtcgccaacgcccttcgtcgccagtatgctgtccgctgccaccgtttctctgccggctgctgagtgctgactaccgcaggacgggggtaaccgtgggggaaattcaccgcgtggggatcgaggctggagaaaatgtagccccgttatggttgacgggggcgaggacggtgaaattttatcaccgtggggacggggacgcggatgtgacccccgacggtgaattcaccgttgccatctctaatcaccatgtagaattgcgaaaaataatttaaaaatcaatggaaccaaaaaataattactgttttgatactgttcatgggttgattccgcacaatggaaccgcgtgactaccgcgtgaacagtattaaatcgctggctgcgggaccgttgcagtgccatgcgaccatcccgtgggccgttggtcccgcgttttggagctacgagatcatcgcggtcatgcgttttcaccccgcaggatgggtttatttatacaaatccttcccatgcaggtatataaacgtaaattacagaaaaaaataagtatattttgcaattttttattacagaaaaaaaataagtatattttgcaattttttttcttggtcttctttttttttgtgaactaggagagcaggagctcccccatttccattaagaggaatgatagaattatagtatccggttctaggcagcagatcaactttcttcgctcaccaggcgcgccatcccaccatggctaagaaagtaagaagagaggctaacaaaaagaataagacatacttgcacaccaggtgctcggtggcactgtggcagtgttcaggttggctacaaagttttaatttctcccacaaggaaaatccccagggttaatcaaagctgcgctaagaaattgctcgactcatttaccaccatggttatcttcctgtcttggagccccaaccatgcctggtgctataaacctcatttaccactcgttttagcagtctgcccccctcctgcagtcttcttgtttcttcctccttgttttgtaaaattgcccaatcaaagatacaatgagctacctgaaagattacatctacgagatcattaggaagaatattctcaaagcaggccattttccaaattgcccataaagcagccgcaataccaacagccactagctttgttataaaaataaatgcacaacagagatataatttttatggggaaaaccctttcgagaaaaaaccacggtaccgaccggtagcgatcactattaaggagttgattacaagcgtagtggatacattggactgtcgcaccctccccatccggcttacaagggatatatatagcaaagatctaggagtactagtggggaaagacttaagagtcatactaggaaactaatcggaaaatgcttacgatcggcatgccgatttggagagaaaaatcgggcgctctcctcttactataatgtgcacgcagataagtgctaggtagtttctcttctttcttctcctcactttaaatgttttttttctcttaaaccatttgtccgatttacgatccgatcacactgttatatttattataattaaatctttacaataagatattgcataattatattctgataaaagaagaatatatgtttcaaaccgttataactcaatgtttcatacgtgatagtgacatgtttcatcatgtgcttttgctatgtttcacaaaattcatttaactacttgcacatactctatctctctccactccttgcatgcatgcatgcatgtatttagctatctttaaaatgatttttctcctgaactacttattcgatctacgatctgatcacaccattctatttattgtaattaaatatttaaaataagatatcacatgattatgttttgatgaaagaaaaacatatgtttcaatctgttcatatttgatatttagtttcaatatgttaatatttgatgtttcatacacgataacaatatgtttcaaggtgtgttttcactgtgtttcacacactttttaaatgttttaatgactgatttttttttcaccatgtataacttaatgtttcacaagcggttaactgaaacatttgaccgtccggttttttgagagaggatcggatgtccgattggaaatttcctcccacttcttcaaatattttttcttctaaactaattatccattctacgatttgattacaccgttgtgttcgtcacaactaaatctttataaccagatgttacttgtttctattttgataaaaaatcaaataatgttgcaacacttaaaataaattgtttcattacttggtcaaatgttctatttctatgtataaaatgttttaaaatgtttcaaggagatacagcattcataatttgttattgcaaccctgacaaccgctccactaaaaatttttctatcatgtaatgaaacatcgatataaatcatatgaaacacaatttttttttacaaatacttgaaaatgttgaaacattattatatcatgtaaggaaacattaacttgtgactactaaaacatcataaaatatttgatgaagcattcgaagaacaccacctgcagcattttaagatcaactagtgaatcatcctaaaatactacctgaaacactcaaatataaccaagtgcaacatataggcctgtttggtacagctccaactcctaaatttagctccaggagttgggtctggagtggagttgtggagctgccctctagttcattttgtaagagagctccacccagctccactcctagttttggtggagttgaaactgtttggctgagctccaactctaggaggtaggggtgaaaacggtacggaaacgtacggaaacaacctttatcgttttcgttttcatatttttttttggaatcggaatcgaaatcggaaaccccaaaaacgaaaacggaaacgaatattattgaaaccgaaaacggaaacgaatattattgaaaccgaaaacggagcgaaaacgaaccgccgcggatacggtaacgaaaattcatcagaatacataaacccctcaaactgagcctcacagcaaaaacatattcttctataacttcatataatttgcataacaaatattctaaaaaaaattatagcaagatactatggtataataatgtatagagtatatatagcctattattcagtgctttcactccataatcagtacatactacatagttctcttctacaaaattaacagaagatatcattcatttacacagtataaccaagctccttagtacaaacaaatcaatcatttacacagtataaccaagcttcttagtacaaacaaatcgatcatttacacagtaacaactaacaaagagtgatagatagagctggaggttgaggaacacctgcttactgttgccgctaggctgctggaggcgttggcgtcggctcggcatcgatggcggtgaggaagccagtggggcttgagatgtcgtcggtgtggtgtggctgtggcctgtggtctcgtcgtcgatgtcgcgtcgtcgtcggtatggccggcgtcggtggtgtggctgtggcgtcgtcgtcgcctcgtcggtggtggtggcagcggcgaaaaggcgagaggcggcgggacggcgccgcgagatggtgggggcgaggacggagcgaagaggaagggcggcgcgagatgcgagacggcgggggcgaggtcgcggggagccaaggaagcgaggacggcaggccggcggtgggtggtggcgcgctctggatgcgccgctccgccgccgcctctggatggcgatgcgccgctcccggcctccctcccgatctgtctgacttctctctctccactctcttctcttgggttagcagcttgggttgggccggctggggacttggggagggattatggactattgattggatgggcctttttaacttcggaaatttcgacaaattttccggaatgtttccgaccgattccgagttccgacgcaaactgcgattatcatatttgattccgtttccgagaaaatatttccgttttcgattccgtttctgagaaattctgaaaattttccgaccggctgattccgtttctgaaaataggtacggaatccggaaaaattccttaccgttttcacccctaccaggaggggtggagctggagctgtgccaaacaggcccaaaatatctattgaaaaaagagctaaatattttttttccgttggaatataatcatgtctgatcttgttgtaaagatttaattacaacgaatataacagtgaaatcgaattataaattgaagaagtaatttaggtgaaaaaaatagtttcaaatttgctaaaaagacttaaaacaacctaactaaccctacagaaatctcatgcatgctcctacaacactgctatgtgaagggtcaacgtgagagaaaggggtctgaccaatttacatgtaaaggagtggagtggagtgtgcgtgtgttgaggagcgcacgattttttagccagttatcgggcgcccgatccgtagtcgtatcaaactaatcctaatagttaagttagtattagaaagacttatccaaatacattgcagatctaaaattcgaatcacatatttaacaagctttattgtcttttgggtaaatttcttcatccaaggtcccattaaattctgcatcccatttggcatttcacaatcaaacacacattttactgtactccaaacgaatttggcaatattttcaatcttattagatatcggaattgctgtcatgtacagattatttcagccaggcgcccaagctagctattggtctccatgtgttctgcgacgacgatggctgcattttccccgaaaatatgttcagactgaagagagagacgaagaaaaaagagaacttggttgaaataaacggaagattgctacgttctcttctttcatgtgccgatgtgcctcaagtgtcggtttccaaatccaatcaaccccttgagtaaagtagtacgtactgtatgaggaattgacgattgatcttaagaacagactcatcgatcatgaaagattggttgggattgccagtgagctgttcagtacagtatgcgtcgatctatgcgactatacaccaacggtatctcgactgtaaaatttgctacagaagcagagttcagtgcctggcaaaatcattatgatgtaacaaggccgaagagcgtgcgaaaaatagagttggaacagctcacgacggccagttcctgtaccagccggcccacgccgagacgagcccactgatccccaacgtgacagcgtggttgcagaacgggttgggctcgatgtccgcgatgccgatgacgaggtcggcgacgttggcggccgtcgccatgagccgcatcaccctgtccatccggatcttcttcacctccttgtccttgtccttcccgccctccctgagcagcttcctctcctgcctgaggcccctcctgatcatgatgaggtccatggcgatgaagaacacgtagccgacggactcgccgaaggcggagatgaagctcatgcgtcgcgcgagccaggcgtcgaggacgccgacgcgggagagccacgtgaagtggtcgaagaagaagtagaccatctcgccggcgttggcgagcacggcgagcgcgccgaactcccccggcgcgcggcgcagcccgttgagccccgtgaggaagcggcccgtgcggaaggccttgcggctgagccccgcggacgtctcccagttcttggcgcgcccggcgaggcccgggctggacgactccgccgcccagtgcgcgagcttggacacgtactggaacgtcttgaccagcttgtcgatgccatcgcgcttcgcgaggaagaccacgagcttgtcgagcgtgtcgccggcgctcatggctgcggctgcggtggcttggaaggctcagtgggagagcgcgcgtgcatgggagggagagagggcgccctctggcttgggaagtgagaagcggacgcggcgtgtgtggtttggtttgggataaagcggccgtggcgggtacttggctgggatgcgtttgtcctctgcgccagaagtgattttctggtggtggtgaggattgagatcgagggctcggtgagagttctacccatctttgtttgcttgcttgattggtcccttgtcttgttattagtcttttttatttttgcaacttgggctctcttatctttatttctccgcacaatgcatccgtaacctatgaattgttggggggaaacactaggcaaaatcatgtcaagtagcaacaccatacaaggctgaaagtgaacaactaggcaaacactctacctccctctttcaaaaaaagagaaaactgaaaaagtagtagtagaagaagaagaaatacacatatttttgaaaaaaagagagagagagagacaaacactattgtacagttcaaggcttcaagcccatagattctctaccaaaaaaggttcaaagcccacaggtgaaattccgtatcccacacggcccatcaaatctcattgttgcttattgggccagttacctctcctccgtcttcccccttagatgaagctgcagtgcaggttcagggggcagccgcgacctgcgtccgggactccggcgctgcgacgacgacacgttcagagactccgggctcccgccggcgagaggccgagggaagtccaatccggttagctctcgctctctcctgcctattcctcgctcatacgcatatgcgtgccttagcggaattggagtagtgcttgaaaccttgtgtttctctttagtacctctggatctgatcaaattggaggcttaggtgtgtgcaaggttttgccgatgtttccaaatgatatctgtattccgcgtgtttgcatacgcggttatattttcagcaggaatcgtccatggaggggcggaaatcaacttgccttcgataagggcaaagcctcgtttgataaaatggacagttaaggatttgcttgtggtaaatatgtttggattttagagaaatatttttttaaccagctgatgatttggctaaggaatttgaactcttgcgcacttctattggtcgtagatttgggtggtcagtattgcttgatgtactaaccggatagtctgttattatggcaattatgttgttatcatccttctgtgatttgtctgacattcagagcgaagcttaattctcaattatgctcactgtatctttggttggccctttaatattttcctagtcttaggctcttagcactaaggatttcaaccgcaatgatcgtttttacctgattgtgcctcacaatgaccatgtctagttcgatgcaaaatacagttttgtacgtttctttttacatctattcatgccatgtactcccttagttttctgtatgttttgaccagctatagtttgggacagaggaagtagttccgtaatatataatatgcaaacttttgctaggtgtagcttgaagttaggatgagtgtgaccacagaaatacataattgcaaagcatttggaaagctgtgttccattatattttttcgggaatacgcaaggagcacatttttgtattaagagaaataaaagttatttacatggaaatacaaaaacagcaggggactgaaaccggaatgaaacacaacattcattagcctaaatcttgcactagttttggcgaccttgatccctccggagaaccagggaggggatagccgagtttgcttgacgccaaagtgtcttctcctccgccattccccttgccacttcaacccaggtcctgcgttgctggttgaacacccggccatttcgttctttccagattctccggaggaaaaaaaacatttagaagattcaaacacacaaacctcagctgattcctgtttcagccaagccagctgtgttccattataaacaagtggcaaagagcagaaaacacacaaatagatgtacatggagttgtgatcttgattcttgaaactcagttgaatgagtatcataaaacacttagtgaagttaactgatccttgagttcctattgtattgtcttctttgttgcgcaactagtctctgtgatgtaactctttcatacatatggtattcatcacttggattgattgatatctttggttcagagctatccgtcaaatggctgtgttatatgggaaaaacaaaactaagccaattgtagatctatatgccgtcttttgtttcgttgttgttaacctgatatcatactggataacattccattgtttctgtctttttcgtgatactgttgagtttttgtttaccaatatgctatgtatagtaccatagttgaggcacttgataactagtttgttttgttccctttgcagtgttgaaggcacagatgtcatcctgtaccatggcctctttaatttgttcacagataaaattaagcaaagcacatattaggaacaggagacagattcatgagaatggacaaatcagattgcctaaatctctttattggaaacctctacactctggccattttgaaaatattgtcttgcgatgcactcaaaatttgtcttgggaggcctcccttccatatgcctctgcagaagatggtgccaacattattaagggaactgaagttgttgaacctattgatacagaagaagcaccagaaattccgatcctccagagtgaccaggattttgtggaggtgataaaagaaccttccatgcagctgacaacttttaaactgccaatttggcttttagggccttcaattctgttggttacgagtatagttccaactttatggctaccattgtcttcagtgtttcttggtcccaacattgccggccttctatccctagtgggacttgacttcatttttaacatgggagcaatgctgtttttccttatggctgatgcttgtgggcgtccggaggccaattcatccgaactgataaagcagatcccaacttcttacaggttctggaatctggctgccagcatagtaggctttcttgttcctttggccctgtttttcgcatctcataagggtactctgcagccacatataccattcattccgtttgcagtgctgcttggaccatatctcttgctcctttctgtacaagttttgactgagatgcttacttggcactggaaatcgccagtttggttggtggcccctgtggtttatgagggttaccgagttctacagctgatgaggggtcttcagttagccgatgagatcactgcgcctggatggatggtgcaaagtcttcgtggtttggtgtcatggtgggttctggttctaggcatccaactgatgcgcgtggcttggtttgctggactcaaatttgcaagcacttcaaggtacggagcaagtgatgataataagtaaattcggacaagaaaaaaatgttcaggtttacatgttttgctcatgcctctgccatctgcagcacgaaatgctattctgatgctactcctggcaccgtctggggttgctcacaggtgccttcttcatcaactagttcagtagatcgtatagacgaacaattatcagactgtgtgtaatcactcttgtacatacaaagtttttttttataatacagaaatatatgtctttacatttcctcggtgaaggctgaattgcattgcacatatgctattttctgtttcaaactttttttcacaaagcgcctggtggtattcatgtactacttgatactcctagtactacaaaccaagcaaacgtttgacaagcgatgtgtgtcactgtggttgtgtttagatggtggaaaagttgggaagttgagagaaaattgatagtttggagaaaaaattggtaatttatgtgtgtaggaaagttttcgatgtgatgtgatgtgatggaaagttaggaatttgggggaaattaaacactgcttatgttttcaagccaatccgacacggatataacaccaaatcacccaaacacacggatgtaagttaccgtgtctgttcacccacttgatggggagttgaaatcctcgtcccgaaatgtgacgctctgcctgcaatcatcaaatctgaatctgaaatgaagattgaagaacaccccaactgtcagaaagaaaaaaggagccacgtgagcactacttttctttctttgtttttctcaaatctaccattgccttaaccaaacaaacatgtggccttttccagaaaaaggaatgtgtagtgtagttaattactacactaggcttttgctcgtcttccgaatttccgatccacctcgcgcagccgtgctcgtgctcgtctcccccaccaaaagacccacccgaccgggggcgacaccatcacacaccaacccgacattccctcgtgctcttcccatccgcgactccaaaattcccgtccgctcctccaggcaagcaagcacggaaacccactcatcactcactcactcccccaaacccaaaccctagctactactagctccccgctccggatcaagcgcatctcgagttcgagcgagcattcccctcttcggttcgagtgggttggctggcggcagatgggctccgactccaagaagttgctcgggatcgagccgctcgagctccggttctcctgtacggtttcctcgccggaaattccctgcttgtgaaattccggagccacatgccgctggggttttgtttgtttttgctgattcttttgctgtttggattgagcagtcgagacgaagaagcagatctcatgctccatgcagctgacgaacagaacagatgactacatcgcctttaaggtaactggaatctttttcccccacgaagaaattcagcaatttggtttcacggagcatagagcttgggaattctgcaaaaaaaaaaaaagaaaaaaagttaatgagatttgacgcgctaacgctaaatttggtgaaatgttgtgctccttaggtcaagacaactagcccaaagaagtactgcgtcaggccgaacagtggcattgtgccgccacggtccaccagcgatgtcatcggttatgctcaattctcatctccttcatgcaaaacgttgggatattttcctcgtcctgttatctgtgtgcaaaaaattgacagttctctgcatttccttagtaacaatgcaagcccaacgggaggcaccagcagacatgcagtgcaaagacaagtttctagtgcagagcgttgtggtgactgaaggcacaacaaccaaggatgtcactggagagatgtagttcatgttctaatgtctatcagatggttgattcttgattatgttgcttgatgtttgtttctaacttcctagttcctatgatgccaacatgtgtaccttttctagtttaacaaaggatcaggtaatgtggtggatgagaggaagttgaaggttgtctatgtccaaccaccacgaccaccatcccccgtgcgtgagggatctgaagaaggctcgtctcctcgggcttcattatcagaagggggcaacttgaattatcaagatgtgagatgtctgattatgcattgtttcatttccttgtttttctttaattcgtgtggatatgactgattgtttttagacgcagacaactcgggaatctgatgagccaccattgctatctgttagtaccttaacttttatatgcacttccccattctgctcttttcaaagacgagttaaactgagtagtagttatttttccaggctacaagagcacacaaggatgcagaagatgtaacatctgattctgaggtgagtcactccaaataagttttctatgttcacttgtaactttacatagaagtaaaggaaacaacagtacttatgtaaataggtttcagtgatctcttagcaaacattgcatttcaatcttctattgaagtaaatatcaagtgcctttgagacttgactatttcaacaaaaacatggcatggatctgatggtcaacagtaccccaataaaacttgccaatttgttttacagctttaaatataaatgtcttttacagtcaatgattacaattaaaatttcaatgagacctgagcttggtaaagtttgcttggcacctgtaacgtagaaaacaaagtaatactgatacaagcaagatggagtagatgttgttgtgctgattgatacttgtaattgcagtatgtacttctcattgtaatgctggatatttgcacagtggtttgttatatgttaagggatcattggtcaagcccaactacgtataagttcaaaagttcatttcagttgacaccttatttgttgtcaattcgtcattttgttttgaaattggtcctttctactctctgtagcaattatttttgctctacgtgcaaatgcacataaattacctgttacagagtggaacattttttttttcgacattgattatttgttttatggcactaggctttcattacaaagcagttaatgtgttgtccttttcaacatttaacactgttcactcctcagccatattggccagcaaagtatctttcgcttgccttgtactgacacgaataatgcctcattaatttcttttatcctatgtgtagacatctgctttgatttcaagattgacagaagaaagaaactctgctattcagcagaacaataagcttctcgaggagatggttagtagatactgcccttatggaaacattttgtcgcatgctctactctttcattgtataagtaatttattcctactgtgataaaggttgatattttgtttaatttgttattatttatgtaaaaatatataattttctacttcatacttcctttttttaaaaaaatatattatgctctcacctaaatctgtactcctttttgcctctcatcattttggcgatgacaatgttgcatcacaaaaggt

SEQ ID NO: 772 - DNA, 2687 bp, Oryza sativa
actgtacctacaagacacagccccacgacacgtttccgtgcgccgacatgtcaccacgacataccggaaagaggccgtgacaggacccttcgcataaccccctctaaccaagcacaccacacctcaggtttcacccccgtccccagcggtcaacgggcagtcccctctcgtgcctaggtgaatccggaagcgacagaggccgtcgcagggcccgccccgctccatcacgcccacccttgcctggatgcgtcggctagaggaaagctacactacaagcccagccgttgcccacgctggcttgtggtaagtacgataagttcttccagggcatcccgcgaaccggtccttaattgccatgggtgcgactagcaaaaccatgcacccacagcccaccattcagtcacattttagttggataattacgaccatgaagcatggccagatgtctcgagcacgcagctcactctgatactaaaaaggtctaatactgtaattatcccatcaactgagctagtggtaattaagcatggctaagcatatagttctagctaggtcacataagtaacatgagctagtcgattcattacccaaggttgacaaagaacagatatcaagtaaacatggcacaagcgagcagataggtaatacccggatcccatgtaattagcaaaacatgcatatttatttgtaaacggtaaaacatttataaattgggatcaacatgctcaaggggaatgtgtgacttgccttgcttcttcgaaacaatcttacggactcttttcctcgcgactgcggacttccgaaacgacggattctacacgctagcacgcaaaacaaggaaaaactctaataaaaaccaaggaaatagtacataaaaagtaaacaaacatgtagagctcaattttagatgaattttgcaagttgaacggctcaattcggagttcgaatgaattagatatgaattttagaagttttgagccatttaaatgaatttctataattattcacgaattattgcgcaattattatttattttctcaaaggaaaaggctgtgctgacgtcagcaaagggccggcgccgacaggcgggccctactcgtcagcggcacaaggggcaagcacacggtggactcgatccaccgcggccgaggcggcaccgtggacccggacctcggaagtggtccacgggaccgacggcctggatcggcccaaagccgatccaacggccacgggcggcgcggctggggcaaggcacggctcaaagctggctggccaaacgacggcgcgcggcggcgcggccacccgcggcgacggccggcgacagctcacgcgggcgaaagcggcgcacgcgagagagcagcggcgcggccggcaagggggaggcggcaaccggctgcccggcaccaccggcaacggcgcgggcacggagtgcggagcgcggcggcagcgacccggtcggacgaccaccggcggcggcagcacgtcgcgaggacgcccgggaggcggccgacgaaggggaggaaaagggagagggaggggagtgctcaccgagatgcacgacggcgaaggggcggccgacggcaaggaacggtggcgacggggctcctcaggaagacgacgcgacggagctccggcgacgggcgtcgctcgggatggggcggacgggctcggcctcgatcggcgaccgaggaaggaggagctccggcggatttccggcgaagaggggcggcggccgaggtcctcctcgtccttgtggagctgagggaggcaacggcgcgggtcggcgtcgaccgaagcggcggcgcgacgcggctagagtcggcggcggcggcggagagaggtggttcgcgtggctacggcgctacggaggtggagaggggaaatggagcggtagccgagcttgcccgggcggcggcaaagctggcggtggcggcggcgcagtgcgggggcgacggaagcggcgacggaagcggctggagggtcgtcggcgtgcggcggcacacaggagtggcgtgggaagctctaaagagcgcgcgggaggggccagtgagttggggaaacgcattagtgcaggtcagggtgcatttttataggccccggagggggagatcgtggccgtggcgggcggcaacggccggcgggtggagctccggcaacgtgggcaagtggggctcgaacggcgccgattttttgggggggggaaatgggggagaaagtggaggaaggggaggacgtggggtggaccacgtctgcacgcgcgcggaggaagcggcgtcgtggggtggctcaggcggccatggcggcagttggagctggaggaatgggatgacaggtggggtccatgggtcccacctgccggagagagagggaggaagaggccggctggggaggcagaacggacttgagggggagagagaggcgagcgggccgagggaggaggccggcccgagagggagagaaagggggcgcgtgtcacgtcctgataaattcatcccgaaataaaaatcattttctaaaaggaataatagaattaattaaaattcgaaaagaaattggcaaacactaaaatacgtgcaagaaaaattcaaatgtggcccggagaatttttgttaaattctccttggtctaaaaagagccctcaaattttagtggaattttcagagcacaaataataattattaagaaat

SEQ ID NO: 773 - DNA, 9859 bp, Oryza sativa
atggcgcgtatcctagctaggtgatccctgcccggccggccggcgcgcgcggtcttggctttcagctgggtgatttgatagtgcggtgttcaacgaggagagggagaaggagggatgagactagtggagatgaagctagcggatggggggaggaagagggagggatcggagggggtatatatatgggtggcaccggcttatttggtccccctctggtctggatgtgatagtatttccgttgatgtgatgaggtgagggtgaggtgaggtttgaggcggtttctcttgatttgatgggtacgtgagtgagagtggctcgctgctactagctcctgatggatttgatgctttaatggaccttgcccgattcgagaaagcctcggatctgttgttgcttctgatttgaaagcccgggacgcaaataatggccggccggctggctggccggggagagaggacgagtgtgtttttttctttccctcttcgcgaccccagccgtgacagcgacaaagagagcaaggcaacgcatcagctgagcctgagctgctgctagccttggcccttgggtgaatggacgcagcaggctccactgttgatcaggccaggccacaggccactgcgccccgggggcagattgggaaacgcgaggggggcaacaaagccaagcgtccagtacacacacactctctctctctctctctctcgctctcgactgggaacagtggctgcgacagtagccggtagctagcatcttgggactgttccgtctgaaaagcgggcagaggggtgcaggacgagtggtggggatcggggtgcagacagaggctgatgccgatagagcttcgccgagcagcgggcggggacgggggatgcatatgggtgggcctcgcggctcggtgttgtgtaggccggcccacctggcgccctgttccatgatgtggtctggtcgcaattcgacgcgttcggcgcagtgccacagtgctattttcagtcgctcgcgatggggcgtaacctttgcagggatcatctcatcggttgcccatcaaacagaccatcactgtgtctaatctttgtatagctcggcgtggtcgttacattccgtccatagtcacaggcactcggattggacagatagctaaggctctaagctagctcgctggagaacacgtatatatatggatcaccttatccccttcctgaacagttagcactgttaatcacagcgttctcctttggcatttttatttttacctatctcagtgttccactcatcttctttggcaccaggtccatcacttgtaacccccagtgttccggccctcttctgttttgaaacgaggacgtgatttgtcagccgcatggtagggcttccctgtcaaaatactggctgcatcattacagcttgtccgcaggagaatgaaccaatcgagatttcgcgtgctgttttgggttattcgaggtctctggtcgatcttctgctttggtggtggggcgtacgtcgtctctagcttagcccggcctcttcagttttgttgctactttagcgcctctgcgaggcctcaggactggacgctcaggcaaaattcagcatgccataataactgaatctgcacttgtgcaggctacatagcaaagctacctggtgaattgatttccctcctccggcctccaatgtagagtaaaacatatgtgtaatccgtcgtcctttgcctgagcaagctgcacgccttggagattcgatccctgtgtcggtgtcaatgcgtgcctcgttgctcagtgtctgcccccctcctcccaaaacctaaaatacatatagtagtaaggagggaaaaaaaaaactgcgcatgcatggtcccgtaactacgcaggaagtaggacgtactactgttccgtagccggtgtaacccaaagatgaagcacagtgcgcagccgaacaggccaaagcgcaaggggagaaatgggataggcaaaggtaagcacgcacccgcccgggaccagctcatccaaatgaccaaagtgtctattgctgcatgtcgttgctcgcgtgtcagggggcacgattgcacagggggtgcttgccggtttagctagctaatcaatcatcgtggtaaaatctgcatgcagctagcggcctcgcgtccctttagctcaggtgcgagcgtgccggcatctcacgcacatggccctcccccgttacgccgatcgagctgcagcctgcaggcttgtgcagtgctgctcgctcgctttcgtctccgtttcactcttgccaattgccatgtgacatgtgagcgcggcctttggcgtcgcgaaaatacagtggctgctgcgctgccaagcttaagatcctgcgaatggaaagacggatctgagggggtggactttcggtatgtgaatatagaaattctctccctgtgtagcctatgctgcatgctccgatcgaagaatagggagtagctgcttggtttacaggccggtaacgacgctgtcgacgcatgcagtgtgcagagccgcggaactaggtatagctataggaaatgtgcgtgaggatccgctaaaaagcaagcaccaaagtgccatgcacatacttgtatgcgtagcctgccctcattatctaggtcaacttatagctagctttacgcatgattcagcggataaaaacgtacatgagtgttataatgcggttaacgtgctactagtgcgtccgaaaaatcttactttgtgcataggaaccggtctcagattgagacaaaacccagccgccagattgatccgatcgatgttgcatggctaccaactcgatcagtacacacgcctagaacacgatccgcgaaacacgaaaacagagacatgcaatatagagcctgctgtaactgtaaacgtgctgtcttacagaaggcgatggcagagaccaagctagctagaacagcggctaacagaccaagctagctagaacagcggctaacagacctacagaaggccccggagtatctagacctccttttgcaagttgtaacgtgtgcctagcctagcaactttaacagcggtaaaaaaaaaaagtcgaaggcacagagaaaaggctagcaacagtattccagcaacgttcgaaaggaagggtaaaaaaagagtgcacaaaagaataccacccacgaggtcaacggtcagaatttgtatgttcacttgaattcacaattgggacaggagtgctggacactgaactgacgaaactgtacattgcccatccacgaccaagaggtagattgttgtccaggccgatgctttggacccaaactttgcactctccttttcctgatttcaggtcctataacctaaaatttgttacaacggcccaaacttatgagccagcccaaaatcgcatttcactcgctaagcaggccacgccccagtccaacgcctgcctgggtcgtcccctttccttctccgcctaggactcctccccgtacacgggttcgaccttcgacgagctcgatcgaccgcaaggggaatgcgactcgtgagcgcggcactccgccgccgtgtgcccatccctccgcttcgccaaagataacgaagccgcgacggccgccgggctttctgatctctccgcccccgctcttcccccacggccaactcgtactgaaggctgaagcactcgacgcgtctcctgtgagaggtttagatcaaaacgctcctacacgtactgcagtttgtttttctttctttatctgtcgttatatgatttgctttatcctacattagtggattccgaggggttttagaaatctcaggtacatagttacatagacggaataataattaggtttgttcaggcgtagtagtattctttttttttcttcaggtttgtgatcaggtttaaatattttctttcttcggtatggaccgtatggtaatattctctagctcgtctctgccggtaaacttcccatcacagaaaattcaggtgcacgtgcgtatagccgtatatatcaaagagaaatagcgaattcgacatgtagtccttataactccgtaatgcggataatagactgctgtctatcaggcagccacttgttacaggcttacagctgacaatttttttcgtcatgaacctttaagtaactccttacggacttcacagttcaaacacggaagatttgatggcaaattaattaatcatgcatgcatgtataaccacttcggttatactttattagtatatatagatgggcagttggtaattaccatgacaatgctagctatttatacactgtatcaaatcacaccgcaatgttattaggctgtatacaatggcgtatatgttagtatgtgttttgcatcattcacgcggctatttccacaaatcctcctcccctccgcaggaggcagacgtggacacgtaatccaagctatcctcctgcttcccctcgacctgaaacacctgcaccggattgcagtaactgggctccttcgcagtcgagtcgccgtggccgaactgagacgccaccagcttgtcaagatccctccaatctgctgccgacgcatcggccgtcacgtagaccggctcgatctgcagctgcagctgctgcgccgtcgtgtggccgcacggctggagagcggacgacgctgcggtggcgacaatgatgtcggcggccggtagcttggggctctccagccttgggaggtgcatgaacggcgccgcctcctgaggaaggaggtggtggtgatactctacctccagcttgcaagggtggctctggcggtggccatggtacggcgagtcgaggcctggcgccggcgccatgaacgcgacgtgctcgttgaaccagaaaggtgagtcgccgccgtcgccggccgccctttgcaccgccgcgactcgcttcttgaacaccctgcagaccacccatccttcctcctgaacatggagcatgttaggtgtctgaagtctgaatcctcggtagcatgcatgcactagtacacaaacttacttggggagctccgtattcgttggtctccaagcgatactcgtgcatgatccagtccgacttctgtccgttgggagcccggcccctgtagaaaaccaacgtcttcctcatcccaacaaggcagttcttgacatagatcggcttgtccctcccggtggccttccaaaagccggcagtggtcgccctgttggtgcgtgtgcccgtcgggtacttcttgtccttgtggctgaagaagtaccactcgttctgctcctcgtttccaatcttgcattgttctgtttgagcatcattttggagatgtcgattaattagctagttatgatattacagggttagagataagcagcaagcttgtagaataagtggagtaaattgtgattaccttgtaggtcccaaggctcaattttgtacagatcaatatcttttatgacgtccaagtctatcttcttcagtgctaccttcttcctaaggtagtaatccacgagttcctcgtcagtagggtggaaacgaaaacctggcgggacatgggagaatgcgtccatcttcttccgcggatcaaagtatagctcccgaactggtagcaagttaatatgaactgcatgcacgataagaagctatatttcagttacaggctagtttgataacgatgcatatatgcatgtgtaacgaattccaaggaagaatttgaacatatagcatccaacttctcgttagctcatgtctactagtactagctagaatcaggaaatctcacaggaaatactccttttcttaattgagaaagcattcgatcggtttgcacctggtctctctaacgattctgaggagtttctttctttttgtaggaagatgaatcggaaattcatccagtgaagtttctctgaccagaggctggtctctctaacgattctgaggagtttctttctttttgtaggaagatgaatcggaaattcatccagtgaagtttctctgaccagaggctgattctcgctcttctgcactcctatagaagactagcttgatcaacaggaggtgtatccttgcttccacttccatttatgcatccatgatgaaacctttgccggtttgtgtgaaaaagaagacgagatagaggaggacaggagcatcgagttcaagttgttcagctaaacaaaccgagcgcaaactagggagagctaaagttgctcgccgtcctatccgacaaagcacactgcacacacctaggccctagggactcgcgaaccttgtacccacgaagacggaagaaaagacatcgctaatcacgcagcacgtaccccagttcagcacgcgcgcacagtgcgcggtaaacaaacaaaaggtaaaacaagctagcatcatcgatcaagcagaaaaccacgggttggaaatggacgagccgtctcttaccttgtgcgcgcgcgcctgcaattgctactgcttcgtagcttgcagcagcatgcagcgcctccctcggccagcagcagccagccttcaaacggatggagcagctatatcgatcgcatgaggagggacgaggccgcggcggggtctatatatcccgcgcgcggtggtggtgatggcctgggcgcgaccgaggtgggtggcgcgcgcggagggcaggggaaggggacgcggccggaaagcgcggacggattgcgggccaaggctggctacaatccaggagcaccgcggccggagagcgacgcggcggagccccgcgtttttctattggcctttttcgccgtaaccgccacctccccgcacccgccaacgacagcgacccctagctagctccctccgatcacgctcagcctcaccccccgaaacggagcttccactgccgcgtgcagcttatgtagcagcagagactagcagtggtggacaccggccagcgctagttgccacctttcctcatctgaaaaattcacagatagagtgggtgtaaacctttctctcgtctgaaatggtaacatttgatcgaccccaactgaaaacgagcaccggcgtgtctggcccagaaagccaggtaatcatggtgacgcatcaagcgcggtcggtcgttgcgtttttaccctcatgcatgactgtaaatgtgtgttagcttagtgtgtgtaggtttgatcatgcatgcggttaagtctgtctatatgtaaactctctttggttggtcgtgttcgctatctggctttctaaggattcggccatatgtgctcttcgcaggtagctagctagatagccgcctatagcttctagttgcgtttgtttgctcctggatggtcgctctcaagacggccacggctggaccccgtttctcgaccgacctaagtatattttcgatggcgaccctcctccaaatggaaacagatccagtgccacacaagccaaaaatatgctactcatgtcatccttactgaaacggggacaaaaggatctcaagcctttcaagacacgtcacatttggacaggaccagggctacaggcctagtgggctacatatgttagaactccaagaactccagactgatgcatgggttttctgataattaatttgcacctttgcttctctgctgcataattaagtaaaactttttttgctgaaccttagtactgtagatattagtagctaagtttagactttagtactgcatccgtacctacgtacatagtatatgggagtgatatatgaggtactgaagtgccaaggagtgatctatgttaaacctgattaaaagcagattagcatgtgcagagaaaatttgatgcaactaggcaagtagaaccaatgaagttaactgtgcggaatggggaccgaccggagatgctgtgcaagcaggcagcggcggctggtgtccggcgtgggctcgaactgatcattagccatccctactttatctctataggagtattatcctttcttaatttatttcggtgctctcgccggttggaccaagggctccacactcgccgtgcatatgcatatggttattgataccttatctggaaattgcgaatttgtgaagaaacattcgtcctcttggactgatttaaaaatcccatctgagctggaaataggatggctatcagatcgatggctgacaataacaagtgaactgtagcaagcgtgcaaaccaaccgggcagccgcagatcatagtacacaattttggtagtaagccccttgcaagcagcagtgatcaatagcatgcatgcacagtccaggatccgagttgcatgtggtccacagtgtgatacgcacgccctttctccgcacgcaaaaatgaaagctagctagctgatgtatagctttcccggccttgtttgctgctaattgagatcaatttacacatgcgcattttcatctctctgcaaacgatcagtcgcattgtgcaacgcacgtacttcacgtgcgcgtgtatgcaacagattctgcaacctgcttggatctgtacatctcctcaaacttaagggcccctttgaatcgcaggattgagaaaatataggaataggaaaaacgtaggattttgatagaaatgtaagtgtaaaacagagaattgcaaaacgcataaaaaacacaggaataaccgtttgattgaaccacgggaaaaacacaggaactggatgagagagatagactcaaaggaaaattagcaagaggttaaaactcttgctaaatttcgtccaaaatctctataggattgtccattccataggaatttcaaaggattggataatccaatcctttgtttcaaagggcttcataagaaattttcctataaaattgaaatcatctaaaatttctattttttccttcaaatcaaatagaccttatcgtctcatcgtctcggccttgtatttgccggagcttttagtgatcgacacgcgtccggccagtgaggccgacagcgacgtcaggccggagcagacgccgttgcaccggggagctcgtagaccgtagcctttgggaatacacaaagagcagaacaagtggatataatagataccggccggtgcttttgcttggatggcgatgcattctcggatgtttatattttgggtggaccgtattgcaactggttctggtgtatctttgggggagaagtgaagcaaaaggactatacgccatctggtgcatcatctttgctagatgccgacgtcactggtctttaatcagttttagcttaacagttatgtgatgaatttatcatgggtaaaatgggtgataactgtaatatataggactggttgcgcgttaacctcagtcaagtccgaccggcttaacacctcagtcaagtgaaccagccattggtctctctcttcttacgactgaagagcgtcttgagagttagtattgatgttactatttttttttaattttttctataactatttgagtcgcatgcaattgataggtgccataacacctatcaactagctatactttttacagtgaaacaatggcatctgactggtaacatacagtgcgacgaaaaggggacaggcaagcgtgaggcaaatggaataaagcctctgcaattcacctgctaattcttgcttgaactgtacactcgaaaccagttgcaccgtcacttttctatatagaccatgaccatcccgatgaagcgagagatgtgcatgtgagacactgtttgcagacttccatcatggatgaattcctgctggtcttatcaaaatcgaaaccccctggggcctgcccagtattccagtgtggacgtgggctcggcaccttttaaccgcacacatcatgtctctgctgcatacaagcatcaacaattcgacatgacagatggcatcattcgccagcagttggcctttccattctgaaaatttgccggggccaggaaacaggttcaggttcaggtag

SEQ ID NO: 774 - DNA, 8969 bp, Oryza sativa
aggtcggtacattaccaatgagctgttgaaaaacatctcttaaagtcgaatcgggacgcaagtttcttttcggcccaaacttagaaagaaataaatcacttagtgatttcaaaatgtcttcaaatgaaagatttgcaaaacaaccttgcctctcttccaagcttgcattaaacacctaagttcccgtgacttgctgagtacgaaagtactgacccttgctctatataaatatatatatatatagttcctccgccctaaagagaagataaagtgaagtgaagattagggtttcgtcctggttcccagccgtcacctgtggtgttgggtgttagttcgttggttcctctgctgctgctgttgttggtgtttcctcgtccgtatcgtcagttgcattctcggtttgttctcagctgcaacctaagttaaggtaaataagtcctctatctattttaaggatttgcagtgattcataattgtcaccgtgggtaccagcactatgtcctgggactggtaccgagatcgcggtttcgtaggaagcggttcgcgccgtttttcctacgacacgctcctatcaggtgccgttgtgcggcggtgccggattggggtgtgacagatccatgccactacaaatatgcaatttagataaatgttaatactattcacgatatcgattacgtgccactggaatgtggggaaattggaatcgtgtcactccatcgcgttttccgtcagacccccagacgtgggacccacatgtcagttacatattccttcatcgtccccccttttcttttttccccatcttttcctccatcttccacaacttctatgaggggcaacgtggcggcggcacccgagccgtcccgccgcggaaggggtcgaagacgacagtggcggcggcggttcccaagccctcccgctgcagatggggtcgaagacgacggcgacgacaaccgatccctcccgccgtggaggtggtcgacgatggcggcagcgacgatgaacgccgtggagagagagagagaggaaggtgaagaagaatgaactgacagctaagtcccacatgcagttgaggcttacgaagacttttgacggaaaacatgacggagtggtatagttccaatttctccaaattccaatggcacgtagccgatatcgtgaataatagtgacattgatctaaaatagcttatttgtagtggcatgggttcaattaactctaaaaaaactgatgatggattggacaaaaacttattcagattcatcgtcataagttactacaaaatggcttatttgtagtacttctttttacggatggagtattgtatatgcatggtctgtataaaagagataaggacgaagaaaatatagcacacgttgatgtgacgtgagagaaatatgagagaaaatgaaggaacacacaacatcggtagagattgggttatcattctgcctccatcaaaactcatgttggtttgcaaaataaacgcttctattttcacaataaccaaatttcacaaaccatgctatgataactacggatatagttagagagaactttccagcgcctgtgtcgttctaatgaggacaacacaggcggcattttcgtccttggatacatcttccatgtgcctccatttttggattcttggatgacaactcaacttagctcttgggccgacaatggtgctgctttatgacgacatgtccttccaaaaggcatcattgtagaaatctattgttgtgttttagtagtttttggtctatcatgcctcgcgatggcatccacgggtagcctttgggaagtaattagagctaatgcgccaaggtgacaacgagctaggtaatgatgactcaaagttgtgtttggttgtgttgactggggatacctgtggaccagatgaatagtgtattggggtacgctagtacgaggatgtaacgctccgcttttcgtgagacgttaaaaactaattcggcaaaatcctaattgcgaaaatttcgttctttgtgtgcgagtctatgttatgccaaggatctcaattcaaatcccgttgttccctctcatcgaaatcaaaatcctccccctcatccaaattcctcttccgattcgagtctctgaaatcaaattctgaaattcaaatccttcctttgaatcctcgccaaatacttctacaaatccagaattattcaaatctcgccccgaatccttcccttgacttcaccttatgttcctaaagtcaaagtatcaaggttaaattccaaaaatccttctcaaattctctccaattgaaaccccccccccccaccaaatcagttctctcgaaaaaagtctaaattgcgtccttcttggctgtgggccgtttctccctggctcggcccatttctcctcagctccctccacctccacgtgcgctgcacgcgccgagagagagagaggcatcgcctctcttcttcctctctccttcctctctctctctgtttcctttctctctctctcacgccagcgctgccgccatcgccgcttcccgccgtcgccgccaccgccttcgctccttcccgcgctcgcgcgtggccgaccggccggtcgttgccgccgtcagccctgccgcgccctcgcgtccgcgcgcacgcgctcgcgcgtgggtcgccgccgcaccagccccgctgccctgccgcgctgcaccacgcagccgcacggccccgcgcgcgtgctcgagccgctccatgcgcgtcctgccaaaacccggaggccgagctctccctctccctcctactcccttcccgaatcggcttggagcgagcctctcttttttccccttctttttccctttcccgaccaccatcggcgtcaccgcctgccaccgcctggaccacgggcgcgaccgccagcccgcgctcacaacccaaaattcggccgtccgatccaccgccttcgccgcccaaagtgtaacgtcccgcctcccccaggccgggcccacttacatctgatagctttcataggtcatagactgccctcacataccaacacatgtcttttctgcacactttgtcctcactcgtgtgcacccgggaagaatttcccggtcggtcacccatcccaaattgctccaggccaagcacgcttaaccctgaagttctttggagattggcttccgaaaaagaagttgcaacttgttgatcgacgccccccccgtcgatcaaccctaggccaggaacgtcctctcttggccacgtccatgtgtccagtgccagcgcatgtgccatgctgtgtaaccactcccggtctacaccagccatgcgcaccatgcctgcgcaactgcgacacacgcgcccgtgaaaccgcgagagtcggctctgataccattttgtaacgtcccgccttcccccaggccgggcccgcttacatctgatagctttcataggtcatagactatgcccccccgtcgatcaaccctaggccaggaacgtcctctcttggccacgtccatgtgtatgtgtccagtgccagcgcatgtgccatgctgtgtaaccactcccggtctacaccagccatgcgcaccatgcctgcgcaactgcgacacacgcgcgccgggcccgcttacatctgatagctttcataggtcatagactgccctcacaaaccaacacatatcttttctgcacactttgtcctcactcgtgtgcacccgggaagaatttcccggtcggtcacctatcccaaattgctccaggccaagcacgcttaaccctggagttatttggagattggcttccggaaaagaagttgcaacttgttgatatgagtattctattaattctattaagccctataggccgggatgttacaggatccaactaacattttttctacagagggagtacgcgtgatttcctgcccgacctcttgtttctctgaagcattacatatgccacgtttttgtttgatgtcacgtcaacagcatataattcttagaccggcacgcgtcttaccggtcgaatggtaagcagcggtcggtgggacaagtggccagaggcagccgccatctcacctcaaactgctgagatgggctgaggatcgatggaacgctacccggcctgccaatcgatcgagatgatgcgagcttttttgcactgtggaacccaagtgagaaacatcaatcattgacccgtgagaaaaataaaaagaaaactgtccgtaggcgctgctatgtctgatggatcgatcccgttcgatgcaatgtttgcaaaccatttgacgccggtggtgcgtccgtgcgagtggacagatgagatgaaaagctcacgtggacagagagaaagagaagagagagtagtagtagtaggtagtataagcagtgcagcttagcagtagacatttggaaatggttgcaccgttatatccctgtagatgctactagtgcactgcatagatcaatcacatcagctcccctccccggcccggccctccataattgcgaggcagcagcagccggccatgcatgacgctgctgctgcctcggcccagtactacgtgccatccatccgtccatacatccatcagctagctgctgccctgccttctctgcttgcccctgcctgccagtgccaccagtacgtagtacgtcaagcagagcagcagtgtgacgagtgtgacgaaaccgcccctagctcagctcgatccagcttacgccgcggtctctcccccggcctcccctcgcttgactggccggttcgatccatccctgcgctgcgcggccgccgcaggctttcgacgacagcccgcgcgcgcgcctgcgtggccgcagttctgatcgtcgctagcgctggatctaaggcgccgcggcacgctggaaacggcacagctgcgtgctactgctaagtagctgtgccgtgccgtgcagtgcagtaccgtgcccccggcagctcgcctcgcctgccattgcacgccgaacgatgcgtgtggtgtgcgtggcgctagctagctgcatgcacggagttgtatccatgcgccgagcgctgtctgtttgtcgtcgtggggggcatatgcgcgcacgtactttcctaccgatagagacccgtcaaacgccggttccgacccgcaggtgaatgaatggatcaacatgcatcttccatacttcttccatttcgccaaaaaaacgacctctagggacgtgactaacaccgaaaaaaagttgatccaactccaagtatacatttcaattttcccaagcaaaatttactttggtaattaaattaactgtagcaccaatatggaggcacggatctatgatatataaacgagtcttttacctccaattatttgacactccgtgtgtcttgctgtggccacggaagcatgcatacgtacgtacgtacgtggtatagtacgtgcctaggtagctaggctagtcggcgcgagcgaacagtcgcgttagcggacggatgcgtaaaggccagcttaatcttgggcccgtttgcaggcatgatcgaggtcgcgacaggccgggtcagagttgttgatcagggctagctgctgcatcactagtcatttcaatggacggagggcaatgtaccggaataacataccaagtccaataatacatcaatcacaattagtgggccctagaatcgatctcgcattgcagatcgtgccaaacaggatattcaatttgtctcgatttttttaaaaaattaagtttgccaggactgttcacaatgttcgtctatatcccaaaattattcaattagcagagatatctccttgggcttcattttattttcttttagttggctatactacatgaggcttagtcctgtacatgcatttaatactactcattacaatgtttgcgatttttattcgtaaaaagatcttgaaatgaaataacattcaactgaccacgtttcatcacatgtactgtactattacacttctaaaaactgtttccttttacatgccgtctaaatgtgcaaaactttatcttaaaacattataaatgtccatttaaaattgggttaggtccaattcaacccccccccccccctcagttgttttgaggcggtttggcggtacgtcaactcaaaagttaaaaaaatattgggttagagccagggttttaaattttgaaattgggttttatgccaggggttactgaaatttcggaaatttcaagccgaaattatttaaaaatttgaccaaattcacaaaaaaagcaaaaaaaacgaaaatttcgggtgagatttgagtatgctggtggggggcgaaatttcggaaattttgaaccaaaatttcaaaccctggttagagctttgcttataattacaattccgtagtttcgagaaataaaattgagaaccgtgcaaaaatatagttctattttcaaaatagacggaataattctttaatattacagacatatttttgacaaagaatatgctgctacgttgtcttattcgtgttgatatagtacgtatatattttttacataatagaaatattttatatctctagtctcacacaaccaaatgtgatgcgtgaactcgtcgtgtcataattcaaaacttttttttactgctggtccccacttatataaagagatcagtcattaaaatcaaatatatattatgctgccaatgggttcagttaaaccaagaatggtgaaaagggtttcaactccccacccctaaaagaatcagacgatttgatttcaaatgatcacctggtaattaaaccaaatcgatctagttatgtccataagatatataagaggcagcacgcacagctagcagcctctgtacaggcgaataggaataggaaaaattaaggggaaaatacatgaagaaactgagaaaactagaattacacatagataaggacttagatacgatcgatgcatgccaagatgccatgcatatggtgccatgatcgtccatatatagaggaacatttcagttaacaagcaaccggagatcatatctggagatcgagacatgcaggaccctaactacagggtgggacacaaagttttttttaagccagatcgtgcattgatctgaggcgttagaatggagtgacacccatgctagatgctgctgtggctgctgcagcggcggcggctgcagcgtagagaccgtccttgaagagcatgcattccccagctccgtcctataaaagcacaaaaaatactataattaagtctcggttttatattcatccattgacatcgattctccaccaatagaattagggtttagattttagggtccgtctttactctttacctggctttgtatgccggtcttcttcaggccctggtccggcatcaggccaaaatggatgtgtgggaaatgggcccactggtgcatgcacaaagatgagacagagtaaatacgaatttggtttatatatacagtggagtatgctgcacacatcacatgcatgttttttttatcaagaaattaaacggggagattttgtacgttcttggcagcagcgctgaaagcctccctgtgggtgatgtccggattgcttgccttgatgcgttgtatctcatctctgatattatacgtgtcataaacggagtgaagcacgagtagtttttgtcagatgatgtaattaaaagaggaaaccaaaattaaacgatgtgaaccattatcgatgattactcacttgatgaatcggttgtatgccgagggaaccctctgccgcttctctgaagctgcagaatcacaacaatgagccgaacataattacttggttaacagaataacagcgtactttgatgacactactgcagcactgctgcagttcaaagaccgaagcagcacggacgcaacaaggctagatcagttgaaagaccatatgtacattattagttcgcatgtgcaacctgaccattaatgttgctccctgtgagctcacagaacaaattagggactggttgccacgttacgttctgtctgtttgaagcagtattcgatctggagtttagaatagttttccatttgatctgtacgtgttctgttcccttttccttaacccctcttcctatttttttattgattttttgttttgtcaagactcaagtgatcttacctatctttgcactgtgcataattaacgtcgggatttgggaagaattcctccacggacaaaaggcactattgagctgatgtgaaaactattcgacccccttccacttgttcgaaaacttcattgaccatcgaaaagaactctcaaaaggagaagctcaaagaggagcatgctgtattcgtgccaccaagaacagtgtgtgctactgcagcgcacgcgcacgcagctatctatagccagcttctggagttctctcctagctatacacagcgttgccggaggatcgaggaggagaaggcgaaggaatgtgggagaagtgaggcacttactcctgttggctgacggcgcgttcttcggctgctgcggctctcgctgggtagccttgttggccgccgacgccatcgacgtcgccggcgcgttgttagcacagctgctgttgctgctcgtgatgctgctcacgttgggactcgcctgttcggtcattaggctcgccggcgcttggaatgacggcacctcatcctgcaagccgaaaatgattaagcatccggccggccggcgcagtgagcaaaaactaagtagaaatagatcgttgttacgtacaaggaggccgttcggtgaggtggggaagagcagagcctggccgaagggaagctggttggcggtgaaggcggcggccgggagcaggaggccgcggaggttgacggagagcaggttggcgcagtggccgcaccgcacggtgaccgtcttgaacaggctgctacacggcacgcccacctgcaaatgcaacggaacgaggctttattcaagggacgtaccggagtccggagctatagttagctattacggccggacagatcaacggcgcccggcgagggaac

SEQ ID NO: 775 - DNA, 1438 bp, Oryza sativa
aaatcctaattgcgaaaattttcgttttttgtgtgcgagtctaagttgtgccaaggatctcaatttaatcccgttgttccctctcatcgaaatcaaaatcctccacctcaaatttctcttccgattcaagtctccaaatcaaattccgaaattcagtcgcatcctttgaatcctcactaaacgctcgctcccaatttcgaaaaataccaaactctatcttgagccttccttgattcctccctgaaccctcgagttcgagtatcaaatttgaattcgaatccaaaccctaaatctctccaattctatccaaatcagttttctctgtaaaagtctattttacctccctctggctcggtgggccgactctttttacccggcccatcttctctcagcccgcttttccaccttcccgcacgtgtgctgcatgtgccgagagagagagaggcatcggctctctacttcctctctctttcctcgctctctctctctgcttcctttctccctctactcggcgccgatttccccgccgtcgccgttcgaaatccggccgcacccccgcgttgcgcgcgcgcgctcgctcgcgaggaggtcgaccggccggtcgctgccgctgtcagccctgccgcgcctgcgccgggcaaccgcccggccccgctggccttgcgcgctggaccacacagctgcacggccccgcgcgcgtgcctgagccgctccacgcgcgtcctgccaaaacccggaggccgagctctccctctccctcctactcccttcctgaatcggcttggagcgagcctctcttttcccccttctttttctctttccccgaccaccatcggcatcaccgcctgccaccgcctggaccacgggcgcgaccgccagctcgccgcccccaccttgacccagcgccagctcgccccgcgccagccggcgctgctcctctcgctcccgcggttcaatttccgccgcacgatccaccgccttcgccgcccaatgcatccacgccgtcaccgctttcgcatcgcccacgaaaccgccgctgccgccagccgagcgcttgaccgccaaggtcggttctcccctcccaaaccgacatcacctcaccccgtgcctataaaacccgaagccgagctccccttcccatctcaatccctcccgcttcacactcctactccaccgcgccattgtcgcccttcctctgctctcgccgtcgccgtccgccgccgagcaccgggaagaccggtgcgtgcgaggacgcgtgacgcgggactccgggcacccatcttcctcccctttcccggcccgaggccggagagctcgctcccgcgctgtcggccgctcgtcacagcgcccgtctcggctcggtagtgcctccctccgttctcccttcccgcttgccctctccctcctatagctcgcgcggtagctcggtagtcctccc

SEQ ID NO: 776 - DNA, 582 bp, Oryza sativa
catatttgtcaccgtgggtaccagcactatgtcttgggactggtaccgagatcgcggtttcgtaggaagcggtcgcgtcgttttccctacgacacgctcctgtcaggtgccgttgtacggcggtatcagattggggtgtgacagaggatctacacgatacggcatcaagcaaacatgaagacaaagattacactggtgtcacgccccgaactagtcccgaccggaactagcccgtgacgctccaaattaacctgttaatcgataccagtcccaggaaacagtgctggtatcacagggagacagaatatcacagcaacagaggtctctttattatagagtagaggtacagtcatgttgggctgcggacagatcccgagctcacaactgcattacaaaagggaagcggaagccaagacttggaccaaacaacacaggcgcgacttgggaactaggccgaaaccctaaaactcatcgtagccggcttgctcctggaagaactcctcatcagcaggatccgcttcatcttcttcagcaactggggggagattatttctatagagcaagggtgagtacgggagtact

SEQ ID NO: 777 - DNA, 3412 bp, Oryza sativa
tatttttttaaatagtgaattatatatcattggaaagcttatgaatttagatgaatttaggttcaagtttcacttaaatcggagtaaaagtcgaatgcgaaagtcgattcctttttattacctttactatcagcgaactacggcaaacccaatttcgatttaaactattttgcgggtataaatattttgttgtcataagtttttaatttactcatcccgagcattatatccatataacaggttagaaatttctattacgagctaaatatcggacgaaatcttagaaatattatacaatttaatttagtctatgactaaacgattaaatataatacacggctaagattcctagtaattgaatccgaatttctaccatgaaccgatgacttatagagattatcaaaaataatctataataatctataagaattcatctaattgtttggttattaattatatctaaattactaccaattttaatctaatctgatcaagaaacatatatttataattaactcggaatttcgatcgaaataccattacgctcgaggaatttccaaaaataatctattattaaccccgaccatttttatttcctaaatcctcctaatttctcccccaatttcccttctattttctcctttccttctttttctctcttttctctccctctctttcttttcttttcttttctcttttcccttttcctttctttttctttctctccctttttcctttcttctctctttctctctctgtcggcctctcttttcctcttcctttctttctctcctctctcccggctctatctccctctctcggctctatctccctctctcggctctctcccacccgagcggcggcggcgatggacgcgagggagaaggagggcggctcaccggcggcagcagcggcgacgacggcggcggcgacggtggcgcacggcggcgcaagagcggcggcacggcggcacgggaacggcggcgcaggaacggcggcgcggtggcacgggaacggcaacgcggcagcacgggaacggcggcgcggcggcacgagaacggcggcgcggcggtggcgcacggcggcgcaggagcggcggcacggcggcacgggaacggcggcgcaggaacgtcggcgcggcggcacgggaacggcaacgcggcagcacgggaacggcggcgcggcggcacgagaacggcggcgcagtggagaggggagaggggagaggaagggttagatggggtgggggagaatggagagagggggggtatttgtagagaggggaggagcggcggggctcggggcggcttggtgtgacggcgatggcgacgcgacgatgacgcggcgcggcagcggcgcgggacgcgaggtggcgacgcgatgggcgagcggcgcgcgggtcgcggggcgcgagacggcgcgcggggcgcgaggcgacgggacggggcggcagcggcgacatgacgggcgcgcggcgatgggatgggcgggcggtagcggcgcggggcgcaaggtgcgatggcgacggacgagcggcgacgagacggtgcgcggcgcgatgggacggcgatgcggcggcgacgggcgacattggcgcgagacgacggcgacccgcggcgatggcgacagcgtggcagcggcggcgcgagcgaggcagcggcacggggctcgagacggcggcacggggcgcgaggccgacggcgacgatggcgacggcggcacgcgggcgagcggtgcaaggtggcgacgcgcggctcgggacggctagggcagaggtgggagagaaggggaaaggttagggaccaaatcgaacaccttgcgggcaatgaatagtgcactttcctattattcccgattttaggttattttcaatataaatttgatttcataatttctaaatcttgtataaatgaagtttatcccatatttgtgttatcctaactaaaattctccttaatttgatatcactcatattttgtttatataatttatttgagttttaattagggtaaattcttattctatcgcaattaaatttaattgatccaaatatggtcgcgataatattttatttattactacccatacctaatcttttatttttaatttatatttattttaccaatttatttttaaggtttattaaagattctataattttctaatgagaccgttattaacataatagcacattagctcaatttatctatatgttagtttattttatatggaggggtttaatatatcaaatttcaatccctaaatgcaattaggaacttggtgcaaaatcgatctacatatcgaattaaatactcctgtaattctattatatatacagagagctcagttcatttgaatgatcatcatttcatgtgtactcgtattatggcacccacctatattattcaaatattttaatatttgataaaataggttaataataacttttattttatttgattttaatatcttgcgcataattattcgtaggattaaatatattctcataaatcatatctattgcttaaatgtagttcttttctttaccttcttggtgatcatttatggtttggcaagcaataggaatcataacaaccagcatgatgcaaaagttttaaaaagttcgaaattttagtgattttttttattgtcttgaattttcaggatgttacacctagagatgctcccgccaccacgaattgaccccattctctcccggcgtgtcttcccccttttgctcgccgccggtggccgccgtcgaaatccgccgcctccgtccagttccggccacatccgagccgaggaatggagtctgcgtctccttttccctccctccggtggtctcccttcctcccgcctcgcctcgcggccgctccgccgacgcgcgccgccgcctgccgtccatctcccggtcggtctcgtcttcctcctctagccggcccgcgtggctgccacgtaggcgccacgtcagtgccaactcggctagaccgagtcaaaccggccagcctggctagccccctccgtgcgcacggaccacggtgcgccatgcggcggcacgtgggcctgtcacgcctcggtccacccggcgcaccaatcgtgagccgcatccacccgaaaccctaaacgccgcccgcgtgctcccatccctctgtgaaccgtgtcgccgacatgcgggccccacccgggacctcgcatggtgggttcggtccacccggaccgccccctctcccattcgcgcgcccctaatgggccgcctccttgcgcccgcgccggcccaatggctcggccgagcctctttcaacccattgggccatgcctcacgctcggcctaaaagtccatatttcctccctccgtccaagtcagtgtccatctctcatgagctaaaagtccatatctgctccctcccaattt

SEQ ID NO: 778 - DNA, 522 bp, Oryza sativa
tttttttttaaaaaaaaatctggagagactcaatttttaagctctctgccgatccaaggtccaatgctcactatacagacttcattcaatcagtagaaatccacttatgcagatgaaaaaaaaagcaactcttgattgcaatcaatgaatgatccttacagaagcctgtttagttactcatcaacggtagtgtatttgatgtctgggtatatatgagtggcctctactccgaccgttggtttgatctcaaagttgatgtgatctcatttatatatacagaatgaagtatggccagatcgatgcttagtggtgaacactctgcaagaccaaatacaatgatttttatatatattccaactatatagacactattaagatttgatatatagcaacaatcagacaagtatagaattcatttccatggtgtttctttaaaaaaataaacaacattgttaacttatttcaattatttaaaacaaatatgtagtaaatgggaaggtttaattctaattggaatatttt

SEQ ID NO: 779 - DNA, 616 bp, Oryza sativa
atggctaataataacatcaggggtagagtgatagcatacgcacatgtgcacgtacgtgtgcgcatgcgcacacacaataacaaaattgtgcaaaacaatatgattgattatgttttatttcagttgctagtaatatgtcatagttgtagtttgacataaagaaggaagcaaaaaagataaattagcctataaaaacatactacaatgtagacaaatcattcattcccattacattaaaaaatgatctagtctacatatggacgggtgtaagcagagttcagctcccaaatctttagcgattgggaagtgactttaacatttgtgggattgttgaaaaaaaagattttgcccaactcgtagatggctttggggggatacacacgcgaggtaatgcatgtcctccctccttgagggaagccctcaactatggagtgatcaacctattgaaagaaattgcacacaaagagttaggttacgacgtatcaaaatatatgcgttgtggcatatgaatatgcatgctctcaacattgctagaaagacttaccaaaatccttattgacaggttttcgccatctagcacaggtaccaagctgccatagactctcttaactagatc

SEQ ID NO: 780 - DNA, 4032 bp, Oryza sativa
ggcataggataggttcccttaacagtgatagtatttagtttcctgtagtctatcaccaacctccaagtaccatctttcttcttaacaagtaaagcaggagaggaaaatggacttgagctgggttgaattacccctgactgcaacatttcagcaacctgtttttcaatttcattcttcaaggcagggttaaatctgtaaggcctctgactgacaggagctgctcctagaatgagtggaatggagtggtcacaatatctcttaggaggaagaccagtgggttcagagaagacatcttgaaaagagttaatgagttcctgaacatcagaaggtaaaggctccttagtcacaggatcagatgcagaaagctgtactatgtgcataattgacccctgtttcaccatgcccagatactgttctgttgatatgactgaacagtgagtggtctgtggtactatgccctgcaatctgacaacattaccatcaactgtaatttccatccatttgtctacccaattaacttgcatgggactgtattgttccaaccaatccataccaaggataatatcatagcttcccagatggagcagtctgaaattactgatgaaattaagtccttgcatccaccatctacagccagcaacttcatgagaacaagtcaaaaatccaccatcagccaatttaacagaaagttgttgttgcaggggttacactccagccattttcagtccaattccagcatccataaaagaatgtgtactaccagaatctaccagcatgagtagttcagagccttggaccaaacctctcagccgaatggatttagaagactcagttccccacaatgcttgctgagaaatagccatcagatcactgttactatctgaaggagtttcagggtctccatcaggggtctcatcctgtaatgcatccaataactcctgaacaacatgcaattgtacagctgaaccacacttgtgatccctactccatctctccccacaagtgaaacaaagccccttagatcgtctataagatttaagagcagctagtttctcttctctagctcgagcagactcagtacccctcttgtcttctgtatgttgtggagtaaattgcttctgtggtgtagcagtatgagcaagtgcaggagttttctgaaaactgcgaacaggaatagagctgtcaggtttcctgtattggttaaactttataccctccaaagcttcttcctggagtaaggctactgcacaagctgagtcaagatcttgaggtctctgaactaataccacaaccctgatgtcacttctaaggccttccacaaatttagtaacaaagtacacaggtaacagagaattgtcataagctaagagttggtgcattaaactgtcaaacttctcaacatactccgaaacaaaaccctcctgtctaatatgaatccactgacgtatgagagcctgctgtctatccttagaaaatctggtacacaccaactcacagagaccagtccaagaaattccacatatctgattcctcacagattgcaaccagaatgcagcattaccacagaaatttaatgtagcaattttcacccaataaactgactgtatgccataaacatcaaaatattgctcgcaattagccttccacatttgggggttatcaccactaaattgggggcaaatcataggtgggatggaattactcagattaaaactagcagatccactaccaggagatggggtttcaggttcagaaccaaaattaatgtggggaatggagaaattgtccttcataccaaacattggcgtcgcagttgcccccgacttatcagcagcttgatcctgcttggagttgcctggagctccacccgcggcggtgctgccgaacgcctccgacttgacttgccgcaacaggttgccctccaagtgatccaccttagcgttcaacgactgcaccgattctcccagtgtttccgccttcttctccacggccggtatccttgattccaccgttttcctcagctccaggtactctgctctggtacgctcctccccttccactctcttcttctcattgtcagaaatggttttgagcaggagatcgaacttagcttccaaatccatctcgagattccggatccaaacctcagcgctagctctccgaattcagccaaccagatcgagggagccgaaacttttgcggatcacacgccaccgaagtagcaggatcccacctctccccggaattttacagccaaatcaagaggattttgcagcgcgtgagggctctgataccagattgttaggggctctcaagaacacgcttcacaattcacgaatttagtggcaatatttgttacttctcagatccaacaggaccgagccgccgccgccaacgcctccagatgccaattcccgaattgttctagtgttgttcgtttgatttattacaaccaacccactctctctctctccggcgccagctcacaagcgagctgataccttacgccacccactctggaccgtggaccttcggattgggcctcctctcacggactggacgccgagttgcaacccaggcttgattgtcacctgaagtctggatcacctcctccttatcttctctgctaccagcttcatcagcaacttcaggacggcttccttcttcttcttctggttcttctgcagttgagccttgcgagatatctcctggatgatcttgagagtccctgacacatatgctcttctaaatttctgactctaatctcgagcagcacacgataatttaaaagtcgatttttccttccatggaagtttttatttcttccgactggagtagtattccatacacaatccgttagatccttgtaaacggccgtttgtgatatcaccacgatagaaaatagaccgttcacacatcacataattaaaccctggtggtcaaaattgatcccttctccgtacgactgaacgatccgttcgcgcaaaaaggaaataacattagcctgcgctgtcaattttcttcaagttgacttaacacgcgttgctttggtcgcatatggaaaaaaaatcaacagcaacgagataataaattactattcggaaactgagactgtgacggtggatcagttcgacttgggaaaaaatcacggtgctttgttttgacaggtgtgaccagccatgcaactcggggtgaagcgccggaaatctgggagagcctactcatcacgtacactgcaaagcttcacagaatatgcgccttattttatcgcgacatatagaaagttttgtcgatctagacgatgggtgaaactgtatcacgggacaaaatctgaagtgctgccagaaatttatccaacaacatcttgtgtgttgggcagacccagggacagaaagcacgcgagttgtggatcctgtcccagttgcacggagagttggaaacgctttgtcctgtacttgctccactccaaataagcacggcttcgtcgaaggcctccgagttcagagggtactaaacgacagcgagatttttgtttatttgatggattcaggcgacctcagatgtaccacaccactaatccactatcccactgagacacgtactcttatcaaaagaaaacaatactacacggcacctgagactcctgactactatagatgtcctggcacgggcttgcaccaagatacgcatgtgtgcatcaatccacgcctccgttcatcctggtagcctgcatccagctagcccttgcagtgcttgccgagccagccttcgcgtgacgcgtgccaaagccgccacctcggttcatgcctcctgggtgatccgagaacgatgaacctgctgccggctgcggatagcaggctcaggctgctgctttgtcgattgattgccggccatctgggcatctgacaccaaaaagatcaattagccgactgagacaactcaaattgaggacagacatgccaggacagcaagggggagcatgccatgtccgagatcatcgtgatatgaaccgcagcataccggcggtatggt

SEQ ID NO: 781 - DNA, 1600 bp, Oryza sativa
ttcaattctaaagattgatgcattgcacatactccgaccggacgagacgcactgtctcatccgagtcatttgagaagcactcacctagtcgttttagaaaagagttcaaataaaataaattgcaaaaataacagtctttccttgaagcctgcaataaacacttatttcccctggcttgctgagtactcccgtactcacccttgctctatataaataatccccccccagttgctaaagaagctgaagcggatcctgctgatgaggagttcttccaggagcaagtcggctacgatgagttttagggtttcggcctagttcccaagtcgcgcctgtgatgattggtccaagtcctggcttccgctttccttttgtaatgcagttgtgagctcgggatctgtccgcagcccaacatgactgtactactctataataaagagacctctgatgttgtgatattctgtctccctgtgataccagcactgtttcctaggactggtatcgattaacaggttaaattggagcgtcacgggctagtcccggtcgggactagttcggggcgtgacaccaagagccttgctaatgaaggcaataggatgaccatcttgagatagaactgctccaatcccagtttcagatgcatcagtttcaacagtgaaaaccttttggaaatcaggaagtgcaagtacaggggcagaaaccagtgcttgcttaagatgttggaaggctgattctgtttcagagttccaatggaagggaactcctttcctaagcaagttagtaagaggtttgctgatcaccccaaatcccttgacaaactttctgtagtatcccgcaagacctaggaaccctcttaacttcttcaccgaaatgggaaccttccaatccaccacttcctgaattttgttcttatcagtgtgaaccccagctgcgctgatagtatgccccaagtaagtgagttgcctttgagcaaaggaacattttaagagtttgaccttccagtggtgtttgttaagcagtgacagtacttgagcaatatgatccaagtgcgatgaccaatcagggctatatataagaatatcatcgaaaaagaccagcacgaatttcctaagaaccgttttaagggtgtcattcatggccctttggaaagtggcaggtgcctcagtgagtccaaaggacatgaccgtgtactcatagtgacctgtatgggtttgaaaagctgttttatattcttcaccaggagccatacgaatttggtggtaaccagctcgcagatctaacttagtaaaccacttagcatgagaaagctcatccagtaactcatcaattactggcataggataggttcccttaacagtgatagtaccaaactatacttgcacttgagaaattagtgtataacgatacacatcctcatggccaaatgagtatagcttagcaataagccattttattggtttgcttgtcactgtgcgcacagtagcatgcatgcacacgtgaaacattagcgtgtgatgattaaatgccatagttgctgcagatggcgtgctcttctccaggcttggccatcggctccacggcagcccccggcaatgtgaattga

SEQ ID NO: 782 - DNA, 656 bp, Oryza sativa
cggctcaccgtccggagggagcacgcgacgcacgcgcgcgggcagggaagggacgcggtgcatgcgcgcggtccgcggttgacgcaggtgcggcgggcccacgtgcagcctcacggctcgcggtggattgcgcgcacgcggagggaccgaccggggtcggcccgaccctgtctggctgagctggcgccgacgtggcgcctacgtggctgccacgcgggccggcgggaggtagacgacgacccggccgcgaatggacggcgggcggcggcggcgagcggcggagcgaaccacggcgatacgggcaacagcgagcacaccgggcggttgcacgtgacaagggggggcgagccaacggctcggattcgccggaggttgctcgacggcggcggattgcggcggcggcaaccggcggcgggagaagagggaaacggcgacgaggtcacgagaggtcgattcctggcggtgagagcatctacgcggcttcgggaactcacgctagcgtcggattgggcggaactacgccgagcgaggccggcgacgagcgggtgctacggagctcgggcggcgacggcggcgagcacacggcgagcgatggcaacggtcggggcggcgccggctagctacggggagtctactcaagctactaccgaaagcta

SEQ ID NO: 783 - DNA, 4632 bp, Oryza sativa
gatttcaccgtgcaaatccatctcccccggtgacgcgacgacgcgcgccaaagcagggttgaaggtggagaggtcggtacaaagggacaaagtggcgacgcccgcgaggcaacaaccgagggaggcgcagccgtgagggccgcgtggtatggtgggatgcacggctttctcctacgaatgctcctactgtctactccctagcccgctcgcgaggcgaggccgttcgaaacgggcgagacactcacactcactggaccacggcgcgcagcgtcggcacgaggcagggcaaagcggtggggtggggccgtgtcgaccggtcagctgttgatacaggccgttcggcatacgcagcggacaaatcgacaggtggtactatctgtctgcttatcgtgagtacggagtactgggcttctaggtacgagtaatccgttagtacggaggagtagactagtagtactagggagtattatatactgtagtagtaaaaatttcgttggatgtcacaacatgtttgggaagagtcgtacaacggtactagtagtttagttatgaacaccgcagacaacgtagatgagcaggagatgcaaacctttttaaaaacaaaagggatagaacgcaccaaacatggggaaggttcgtcgtagatggccgggtaacctgggcacacgtgtgcagtagaattgtcttttctgtggaggacaccaagtcgttgtttcaagctgataaaggatcggtaaagatacatttcaaacttctgcctgagtaaaccaatatcagatttttttttcacatacatacaaggtagcctttgaccgatcagcctggtgacttggtgagtgttaacaatcttccaaaaagatgggccactcgataattcggatggaacggcttgtgtttgcataaataagggcctgtttagttggaaaaaaaaattttgggtgtcacattgaacgtttgaccggatgttggaaggggtttttgacacgaatgagaaaactaatttcataactcgtctggaaactgcgagacgaatcttttgatactaattaatccgccattagcacatgtgggttactgtagcacttatggctaatcataggctaattaggcttaaaaaattcgtctcgcgatttcctttctaactgtgtaattagtatttatttttatctatatttaatactccatgcatatattcaaatattcgatgtgatgtttttaggaaaaaaaatttgtgaactaaacagaccctaacttgagtatcagattactcagtcctctctgcttgtcccgtatactagaagcagccaatcctgtcactcccgtccagtatcacctacggcaccaaaagtccacatgagggcaattgtttggcgacgtgcacagaatatgactactaggtcctgtttagatttaaattttttttcttaaaactttcaactttttcgtcgtatcaaactttcctacacacaaacttctaacttttccatcacatcgtttcaatttctttaaaattttaaatttagcgtggaactaaatacaacctagagtactccttataaagatattctacgtgggttgtttgccttgttgcacggaaccgtacggtttcccatgcgtgggtgcctgaggtccaaagatcatccggatcctattccaagtcaacaaatattagtgtaattcctattccaagtcagctcgtttgtacgggaacaatcgttttctttgccttcacaatagtcagttcatgtagataactcaaaacaaaataccactacctctatttcaaaaataaagttatttctgatatagtagcttcgtccgaaaataaatatatttcgcctaacttcaaatctcaatccatcacaattattctctatttactctccctatcctaaaatataacaatttagttcaaattcgtagtactatgatatatctaatacggtcatatgttgttatattttaaaacatatatggtaaatgttgttcacttagtttctcttttgaaccaattacaacatttttcaatcatttctatttactttcttagtacacatgttcaacttaaaaatacttatattttagaaccgatgtgaggacatatccggtgaagacgagcaagtgttggaacttgtgaaaatcatacttaaaaattttataaattcatgaaaaaaaatagtagaaataggtgtagatatgaaatacattctcactgaatctcaagttcgaactcaacttcatttaggaggtgaatagtaacaagatactattcactctaaatttgtctttttttctccaaaacgaagttgattttggatttgagatttggtccgaatgtatttcatatctacacctatctctagtgttttttttatgaatttataaaacttttaagtatgcttttcatgagttttcaacacttaactcgttttcaccggatatgtcctctgatgtagcaggtggtacaagtatttgatcaaaacacttccaataaaattggagagcacaccaagtaccttgtactagaattcaattaacgtgctgttaatgccatggttgatttgatcatagaacgttcagactagagcactcaagtccttatggcataaccccacatgttactcagacaattagtactattgttgacagcggataaaaatgtgggctaccattcccatcgttagaaaaatgcgacttcgcactatagtcaatataagatcacaattaaaatattcaagtgcactccgagttcatcccgcatcgacagcaactgcaagcgcaagaggcttttactcgtcaaggagaacagagaaacgataacgcggtgccccaccgatcgcagcatcggattcctggggagccgtacactgaccgtactcacgtacgtgcaaggctcaaccatcaaacgatcgaacgatcgacggctcgacgcaagctgccgctgactttgaatgatccgtcgccccgccaatttgtctttagttttggtgtgaatggcgcgcggaaactaggggcttaatgataaactagaaagaaaaagacattaacctacgtggagagcacaaccaaccaaacaagaggttcttatcgttgcccagcctgattgattggctactatatctagtgcccgtcctactcattcattacatggagcttcaaagaaagtaaatttagggggaaactcatggatgcagaagctcatgtgtgttcagctgaggatatcctgacataagctacagatgcgcatatcctttggggaagatgtacgttatgtgtagccgcaagaatggcaatttggcacggaaggcctggttcatgagtcacgaatttttcattcttttatcaggctatgcaggcgtttgccacatatattcagtgatgtgagcagatttccttatatgcagggaaaactgtgtgaaattccttggtggccagttgcgtagtgtaacctttcctcccccacagagagaatacgacggacgttgaatgcgactcatctctccacgacgaacataatttggttctccctttttatttcctgtcacaccttacagatgcagtgcaatccaataatttaggacgttgaccagttatccgaccgctgtcataaacatctttggtcgttttgagtggtgtatgcatgcaggtgcgtgttaatgagtcttccctttcaatcggacatgattagtccatcatatcggctatccagtactactcctgttccaccaaaaaaccaacccaggcaacgatgagatataacctatgacgataaatctggacatgttcatgtccagattcattatcatacgttatatttctattcaagttcattgctatagattatgtcccaccgttgtctaggtttttttaaaaccaacggagtactacttcactgtacaccgcttgtagtcgagtaaaactgatgtgtactaggcatgcacgagtggacgtgaagggcagaagtacagttttactccttccgttccaaaataagctcggccatgaaattccatgtctaactttgaacgtccgtcttatttaaaatattttttattagtatttctattattattatattatgaaacatgaatattacttatgaatattactttatatgtgaacttatgttttttagttttttttaaaaaaataaataagacggatgattaaagttggatatggaaactcatgactgcgtttattttgggacggatggagtagtatatactcctttttttagttctttaatagaggcttgcatgtactccctccttttcatattataagtcatttgatttttttttcttagtttgatcaagtttatagcaaaatattccctccattccaaattgatctacatattttataggtacactaagaccaagaaaagctaataactctctcatactatatttactctagcaacaaactcaatgcatgcaacatccccactattgcatgtgggtaataaatacttctgtgcatggatgcatgtatcaatgtctatttagtacttcaatgcacaaataacgaatagacttaatgaatgaatacaaatatgtagatcatttaggaataacctaaaaaaactaactataaatttggaatggagggagtataagagtaacattt

SEQ ID NO: 784 - DNA, 1330 bp, Oryza sativa
ccgtcggttccgtggactggcggtggaccacccgcgtggtcccggtccacggtgaaccgccctcccccttgagtcgctgaccggtgggtcccgcttgccggcgccccttcctccctctcccgagccgctgaccggtggggcccgcttgccggcgccgcgccccgccttgatgacgtcagccctgggatttattgcgcaataaatgatttaaggtttttcttttatagtaataaacacagtgaatcttctaaaattcataactaattcatccgagctccgtttaagcccattcaagtctcagtaaatcaagaaaaatgtgtagaatccattaaaaatagttttgttccctgtttcagtagtcttatagcctgtttgcaatgtttgctttgtatgtcgctagattccggttcctccgacactccggtgtacttcgaaatagtcgccgaggttcctccagcagcagagcaaggcaagtcatgcttgtcacttgaacatgttgatcctatattgcaaatgctctattgtttttcttcaaatattgcattgttttataatgttactatgggatgtttacctattgtcatagccatgctattgttgtaccatgtccctttgtaaccttggggttataacatgactagagattggactagggattgcttagccatgcttagttcaactagtgcacaatggggaaaattctattaatgtttagactgctggttctaatggtattgttggattagtgccaccgctttggtgttggttaattaaaataaatcacatggtgggctgtgggtgcatggttttgctggtcgcacccatggcagttaaggaccggttcgcgggatgccctggaagaacttatcgtacttaccacaagccagcgtgggcaacggctgggcttgtagtgtagctttcctctagccgacgcatccaggcaagggtgggcgtgatggggtttggatgggccctgcgacggcctatacggcttccggattcacctaggcacgagaggggactgcccgttgccttgcgaggagtgggggtgaaacctgaggtatgatgtgcttggttagagggggttatgcgaagggtcctgtcatggcctctttccggtatgtcgtggtggcatgtcggcgcacggaaacgtgtcgtggggctgtgtcttgtgggtacagttgtacacctctgatcagagtaaagctattcgaatagccgtgcccgcggttatgggcggtcaaccagattcaccgtgattagtctcaccctagtttagtcttttgaaatttgatagtataggtggatggttgggcctgtcgcaacgtgg

SEQ ID NO: 785 - DNA, 5821 bp, Oryza sativa
  unsure (1)..(5821): unsure at all n locations
caaaatcagaactcaaaaaaagcaggaattcattcagatcgtaacctggtcaaattcttgtgagcaaaaatttaccttgggcacagaggagatcggcaaaggtggccaccggtgacgatgcggacgggagagatcaacgctagcggagcagatcggtgagcgaccgtcggtggcgatgcggacgggagagatcggctcgggcggaggcgcggaggaaatcgacgacgttggtgacgctggccgacgggagagggatgggcgttgttggcgtggcggcgtctcgatggcggatggcgctggatagggcgatggagcgatgcgagagagaagaggcgacgtcccgatggctgatggcgctggatagagcgatggcggcggcgtgagggtgcaccgtctgtggcgtgcgagagaaaggaggatgcgtgtgaagagcgtgatggggggatgcgcgtgaggaaaagggaaaggaggacncncgtgangaacgcgtgcggaagggagggtccgcaacgattttgaggcgttggatcagatgattcttgaccgtcggatttgatgaatggggtttgtaggagtgtagttggtgagttatagggtanatgtgtgtcgtgcatgctgcatattactctgtgctacagtacatatagagagcccttttacaacacacaagtttgattgagtcaatggttttatgggctcgtggcctgtgtgtgggcccaatttcatttttggtccccttatcatccacatccagttgaccagtccctcctagcccatacggcctatattgtgaaggccccagaccaaagtactgatgggccatgttcccaactctgtagactgtagtctggacttccacgtcacgtccacaattcccatttcacacatttcatttgggcctctaaagtagaaaggtctcaacttttgacgttccaccggtaaacagcagcagcagcagcaaggcacctactcctaatcgtctcatgtaacacgcgagttgatcgtgatcattcctccatcacgaaatatcatctcacgcaaaagcacgaagtccacctgccacggttctggagctccgctcctttttcccaaacacagcagagtttcagacttttcagcttcggtttcccttgtttctgatctttctttctccttcatcaaggcacggaacaatgcgatctccgcgcggtgttttgcattttgcaaccgaaatctcgcgaaaacccaaacccctcccgttcaccgtgccgggactgtacacgttctgcggccacaagccatgggatttccaaatcacgaagtacaataaatggaagaaaccacaagtttgttccacgcaatgcccccgcgtgatccacgcgaccacacttgcgaggagcgcgcgagcgaaagctgccgcgatggcgagacgacgtgccgcgggtcacgtgtcctcgtggcacgctaactcgggagtgtacttaaggccgcgtctcaccaactactcggagtagtttggctgcttgacctttgtactgtgcttgtgctgtggtcgcggacgacgatggctgcgcggtgctgggtatggggcttcgtcgtcgcgctcctggctgtggcggcggcggcggatggggaggaggaaggaggggaagtgggagccgctgattcggatgccgacggaggaaggggacgacgctgaggctgctgctcccgctcctgctcctgcggcggcggattacggggggacgaggtgggcggtgctcgtcgccggctcctccggctacgggaactaccggcaccaggtgagctcgcggtgatggagttgggtgtgttagggtctaggggcgggggcggcggtagagattagagactagtagaaaggaaaggaactgcctttgggggaaaattgaagcttttggcaaattcccctttcttgtgggcgtttttgcagcttgtttggattcgcttcccgattcggagaaaaatttactgttaacattcttgctgcaatgctgcttccaatttgtggtagattttactaattcctaaggcaacccttgctccaaggctgtatgttcttctaccaaagctcctgctatctgactactgaaatcggcctatggacatgttctatttgttcagaggcatggctatccaatccgtattgctacttgcttcgcttaaattttgaaagctccatacagttatgttttcgataagagaggaacaatctctaagtcaataattaggtgggaggcatattggttggcaacatcagttttgatcgggcgaagattttttaaattgctataaatatgacgactacgacactacaaataatttattgtccttcctgcatgatttatgtttgtttatcttctaatatattgacgtgcaatccttccgcgcgttcgagaaaaaaagatttatgtttgtttagtgtgtgattgatcaaatacgaacagttcttaagataactgaacaattatatgagtgcttgtttaatggacgttggtgtttcctggtgcattgcaggccgatgtgtgccatgcgtaccagattctgcagaagggaggagtgaaggaggagaacattgtggtgtttatgtatgatgacattgcccataacattctcaatccaaggcctgggaccatcatcaaccatcctaaaggtggagatgtttatgctggtgttccaaaggtagcattttcctttaattgtagtttcaagaaaaagagggtgcaagtagttctagtttcagtcttcaaattcgatttctttttctagtcatgttgtatggatctctaatgctagttttgtatataatttgaatgtgtctgtattcatgcaaggctgatcaacttaacatgcattacaggactacactggtcaccaggtcaccactgagaacttctttgctgttctcttgggcaataaaaccgcagttactggagggagtgggaaggttatagacagcaaaccagaggatcacatcttcatctattactcagatcatgggggtcctggagttcttggtgcatactccagcatatgatatttttcttagttaattttgtatggaacttagcttacaattaacatattttaggtatgcctaacctgccgtatctttatgctggtgattttattaaagtgttacaaaagaaacatgcttccaacagctactcgaaaatggtataagatcattttccccttttcccttccattttttataatccaaaatgatgtacttagactgaaattaaaccctaatttctgcaggttatatatgtcgaagcatgtgaaagtggcagtatcttcgagggcttaatgccagaaaatcttaatatttatgtcacaacagcatccaatgcagttgagaatagttggggaacatactgccctggggaggaaccatcacctcctcctgaatatattacatgtctaggtgacatgtacaatgtttgcttggatggaggacaggtaagcttcatttagtatctcttaggtgcgacatcttgtggatttctgttcttctatataatctttttcggtgtgtcacaggtatgccttaagggcttatgtaatttacttttcagtttgcaatacttacaatagtttataccagctacagtcatgactgaacattgttggtccactctatgatgtacatgctcagtttatctttttacgccctggaaatttgtttctgcgttctgatttgggaccactctcaaaagttgtctatttgtctttcaacatctgtacaaatacacagtacatgttttaatatctgtgtggtaagaagtactgccacaaggcataatgtatcaacatgtcttcctgtaatattagtcacctgactaaacataagtaatccacaagtcactgttcttcataatggcaacaaagaaaagcctgtaaaatataggtgaagaaaagtatcaattgatagaacaaccaggtgacaaataacaagtgcatgtattgctttgctgctttacacatacttttacactgtagcaattatgctgtgatgcttgattctgaaagtttttgtccttttgacagtgagactcataatctaaagaaggaaactatcgaggatcagtatgagctggtaagtcttgagtgcactttctcgatattgattcattgttttctactcactgctttcttgggcaggttaaaaaaagaacatcaaatgcaaataagttaaatgagggctctcatgtcatggaatatggtgacaagacattcaaggatgagaagctcttcctctatcaaggttttaatcctgcaaatggcaacatcacaaatgaattgatttggccagtaccaaaggctacagtcaatcaaagagatgccgatcttcttttcatgtggaagagggtaaattctagctgtcttcagtttattcatttccgtccttcctttctttagaagtccaaattgtatgtatataatactgagttgtcgtaaactagggttcttccactactataagttggtcggcgaatattaatataaaactagcatgttaactgaaacatgatcacacacaagttacatactttggatgaaacatatagattatgatttttattttcctttttcttgctgccgaatagaatggacagaggcatggccccttgatgcattgacatatattgcattctgacattatgttgttaggataatggtgttgaatttgctagagtagtttctttcatgttgatttggttgacatcgcctgtaagaattggcatcattatctctgcatcattatctcttttattgttaactggggctctcttgtttagttctgatctttattttctactagaacaaatgcccgtgtgttgcaacgggtgaaggctattttaatcttattattgtatacggtttaactaaggtgaaattgactgtgggaatttgattggatattttcttttttaagaaaatcatgagctgcaattaggagtctgcatgcaagattttttaaagagatttcttatacgactccttatgtatttctaaaagcaaacgaacttaaaatccaactcaaacacggatttgtatttccaaaagcgaacggactttgaaaaccgactcaaacacggatgacgtactaaaataccggcaaaaacatcttcaatttttataatagtagagattgctcatgaccttggatatttattctatggacacttcaccctttcttgcctctacttgtgtatggaaataatggaatacatttcatatttgaaagggtatagtgtgatatgcttcgtatttaaaaaggccatcacatggtgtacgtgtgacagctgatagcatgatactatgtgagctccatttccgagaacaggactaagttaagatgtctgaatttttaagccagaaatattttcagagcatatgacagtttcatgctaatgtctgtatttactttttcagtatgagcagttgaatggggtgtctgaagacaagctgagggctcttagggagatagaagacaccatagcacacaggaagcatcttgacagcagtatcgatttcatcgggaagcttgtgtttggttttgaaaatgggcctttagcccttgaggctgcaagaagctctggtcaaccattagtcgacaactgggattgtttgaagaagatggtgagtacaaggctcttttttttaactctgatataagccatctataaatatttcttgagttattgtcttcttgttgcctgttggccttaattgcacaatgctatccttggttcattgccaattgtcaggtgcgaatttttgaatctcaatgtggatcactcactcagtatggcat

SEQ ID NO: 786 - DNA, 946 bp, Oryza sativa
aactaacatatgaatttcagtcgatataacacatgaatctgtcatgtattgcaaactgaaatgctaattttgtaactccaatccaatatgaagaatcgatgtttgttggtgacaagagcgaagtggtatttaggagcaaatataaacaacttaaccgggagataagcaacaacccaagcgtagaacctatcaggaatatccttaacctttagctacatctaccttccagcacatctgaaaaagttgctcccaggttgtacactggtggatagcagagggcttcgtgcaagggagaggtggaaacaaaatgcaggaattgagaaacactgtatgaaggcagtgacctgatgttggcaagccagcgcacttgatgactgatagcatactttatggagtaaaatggacaatttccttaaaaagaagaactgatgaagaaccactactttaagtgcatcagttgttaaccaatagtattaaatttaaaagtagcaaattatcatgagttgctcatataatgctgaatgttacctgaccaacatcggcacggtagaagtaggaaggcctcgcggaatcaaagctgcatctccacgggtttctaagacccaatgcccaaacttctagttctaagtcactgtcatcagtgtatgggttgtcttttggaatggagtagttaccccacaagctggttagcaatttcactctgtcctgtaaagggaaaaaagggaacaaattatcaaatacagtacatgctgatgctccatatattgctaattgtttgtcttatgtgagaggagatttatcacaaataaatatgtgaagtcgtttgcaaaaaattcagttcgtatgtttgaagttcatcataaacatatttatgtacccaccccattacctacttacacaaatataagtagtgaatccatattactgggttgttgctatataggaa

SEQ ID NO: 787 - DNA, 1105 bp, Oryza sativa
gccgcgtatttggccacctttccggccagagccaactcggcctgctgtttgttgccccagaggaggacaacatggagacgatcgtcgcgcaggatgcgcttgtaatcacgtggaactcgtcgccagacaccgcagatcttgcccgtggcattctgatagacactgagagtgcccgccaaggtggtctccagttgatgctcctccaggattacacccgcatcatcaacgaattgaatggcacgcggacgaccgattcgcgatgaggtgtagaaggagtagtatagattcttcttgtggaacaggaaacgggcggtggccaccacattctgcggattgtaggtggtgtacatggacttcatttcctcacccttgaggaaataggaggtgcggcccgttagcaacgcagcgtaatctataaatagggatcaaatgaaaggtggagataatccaggtgttagataaatacaatagttctcttgttaattaaatgtaggagctggtgaatgggattacaatttcccgcaagatttggcggattctattgggatctgggtgggtgtccggtacttttgtacttacgtttcatgttgcgctcttcctcttcattgggcacgggcacatccaaggctacatccgtatttgaaagatggagggaatccaaatagagaataagatgatgctgggcgataaggtacgaccttaaatggaatttagatagcaacaaatgcttcaaagcaaccgaaccgccgccagccattcaccatccatccagccagccatccagccagccatccagccagccaaccaactatccatccacaatttgtggacccaattccggcattcataccaaaattccagttgaatgggtgaatggtgaatggctgaatggacgaatgccaggggatcatcatgaatggcaatgcaactatcaggtagagatcccacctccgaactaagaccttccatttccacctctcgcttccacccaggtggcattcattaatcgtgcataaattgagggcaggtagaaggtagagtttctcgaacgggaagtctaacctacatctaactaggaaagtgctttgtatttgaggatgtgcgg

SEQ ID NO: 788 - DNA, 737 bp, Oryza sativa
ggggaagatgggccgagggaaaatcggcccatcgaacccgggggaggcaaaatagacttttgcggaggaatttgatttggagggaattggattcggaattgaactcgacgatagatcggggattgagatcttgagatggcacggacactagacaacaatcagagaaacaaatttcgcaattagggtttttaagagataattttttcccgctaggcgccacgacggaacgggcgctacacaagcgggtcccacccgggaccacgtgtggtgagcccagtccaccggctctctctctcctcccctcccgcgcgcgcacttgggccgccttgggccggccggcccatttaactcggccggtccgctccaattcccttgggccgcgccttagccgcccgaggaaaagtctataatccctccctcttttcttttcttttttttccaaaaaaggatttaattaaatccttttcctttagaccaaaaatccaataatcttagaaattcaatatcttcctaaccttcgatccatttgactccgttcaacttccaaaattcctcaaatctcgagatctatctaatggcacgcttagaggtcattattagggcttcattttcgccgtttgttgagttgtcccgtttcgcgtgtagtttcggagcccgaagacccgcagtgcgatgatttcgaggatcaagctccagatctcgagcaaggcaagccacctttgaacatcttgagccta

SEQ ID NO: 789 - DNA, 8306 bp, Oryza sativa
tttagaccggaatgatacaataaaccaagtttaggaatctcgatgtgcgctttgcaagttcgtggatctaagtgaaacctgctgacaagtttaaggaccgctagtgcattttactcttatatatatatatatatatataaaaagctatatgattaagcgatgcatattaaacagagggatgatacaatcattcaaaagctatgattaaagcgatgcatattaaaaggatgcaatcacaaggtcacaacaattggagagccaattgcacccagtctaacgtgcgccaaaaaaaaaaagaatctgatacggaaagaagaaaagaaaaataaaaggaaggaaaccgtgcgcaaaaagaaaaacaaaagaaaaaaaaccgcacaccgcctaggaaaccgtgcgccaaaaaaacaacaaaaaaaaagaaaccgcacggtgcttgcgcccccctctccacgcgcgacccgtgtctagtcgcgcgggggagggcgcatgcgactgatcgctcattaacattctctctccaattgtgcctactgcccactgcctgcgggtttccgtggtcatcgcgataatggcggtgatactttgtaaattgtgttcatctgcctgacaaagaaaaaaaatgtattcatctcgtaccaaagtcctagtccatatgctactccatccgggttgataatacttgtcattttggacagagacacggtcttaaaaaaataactttaaccactatttttttataatatgaatagaagtgttaacaaatatatcattttattgaaatatttttttaaaactaatctatacatatagtcaccatattgcaaagataaatattttagaaattattcgtaatcaaatattttaaagtttgacctcacttttgtccaaaacgacaagtattattagcccggagggcgtacatttcttaacgagcctaagagtaactgtaacggcgagagctaaataggagaaaatcatatcataattgcaaactgcctaaatgtttgactgctaatcaaaaggccataaaaggtccataggtggttattattcctttgtttgtaagctaaggctgtccaccatgaaaagaaattcatacagcaggcatttatcaactcaatgcagctcaacatccagaaagagtgggtctgatttagtctacaatttcagaccatgtgttgtgaatgtacaatgaatcacgtacaaatgacaatacaacaaaagttaagcaagaatagcttgtaccggtagttgtgataacggtagactatgggcgtattctttccaatagactctcagcttcaataaaccctccaaggggaccaagaggtgtatattttacttgcctccagctgttaaaatgaagtggtataaataatttccaaacggaaaaatgccacatttcaaatgaagggaaaggcgtatagcactgtaaattgagtacctgggcgtaaatggcaatgccaagcagtgaagatgaaggtgatcaacactattaaatggtggctggtgaaaaccaaatctgcaatacacaacaagtttacaagaacgcagagaggaataacgctcgataagtatattgtgacaatggaagtttccccatcaccgcatattagtgttactgcttatcagcaaatgagagagctttcaatcacatgtacaacaagaaatatagaacacataaataatatttctttttggcaatacctctgttcctccgaattgggagcatcccgattgagtaaatctcttcctactgccaacatgtgactaactgaaaaggacaaaacatgccaactggttggtttgacttagacaaagagtaatagggagccaaggttgcaagaagcgagaaggaacaaatcacccacctaactggtgatcttcggtggttctttggagattattgacagtaggtatatgttcaatgggtatgacaagatagtgcctgcaaacagcacaggataccgtaaaacaaatgttaaaggaaaaatctgacaagctctgggtcaatagttaacggtggaaaactgaaatcacatttggacacttggtgctaaaaagattacagggccaaaatcactctggcatagtggcatgtcaaagacagaaccggcataaagagctcagatcgacttgttattatgtttgcaacttttgcattgagtacagaagggtgttcatcatgtctgactgatccagttaaccatatagtacaataattgtcggtagcaatttattgatcttcaactgtaagctatgtgatattacatactccctccatactcgtaaaggaagtcgttttggacagtgacacggtctctaaaacacaactttgacttcttcatacggtttcaaaaaaaaaagaaactttgacttcttctttctataaaaatatttattgaaaagtgatatatgtatacttttatgaaagtatttttcaagacaaatctattcatataatttttacattttcaaactcaacaacttgagagttattcatgatttatattcctaaagtttgacttaaacattgtcctaaacgacttcctttacgagtatggagagagtatgttttccactatttgtaaatagagaggtgcaactgtgaagatatacaacatgttttttcattgctcttctgtataatatagaaaaacatatgcttgtgtatatgcacagtaacttgagaattgagataatcaagaacatccaagtaggcgatccacaagacttggttctccatgacctcttggtggttggtatatacccaaattcagacaacagttaagattagattggtacagaggaatcagtcgcattgctattcagctgatcaccaatattgatcggccatcaaaatacataatctcctgctaaaaaaacctaaaggatgatttctttcagcatgaaaatatagccacttatataggaacgatcaaggcataggtctgtttgttcaaaaaatatatatattaaaacataggtctctctgcaatgagaagcagagtaaaaagagataatatggtggtaaaaaagtgtccaaatatgaaaaattcgcactgaaacttataacaagctcactgcaaccaagatccacagtaaaccattatttgcactcgcaaagtagttatagctaggtaggagacataacaagacaacaaacacaagttagttaaagccttccaccttgcattagttgtatagtagaaatatagatggtaaattcaatccgagtacatgtgaacccaatcacttctaatatccgactacagctattatacgtaataacaaggaaacgccatatccatatttccagaccaatcccccccaacacgacgcagtgcgcggagacatagaagtactcctacctgaaagccgacgggttgatgtccttgaacgccatgaccctgtcatcctgcggaggaaaccaaattgacacgagttttagcgaccaacagcaccagatgaacggggattattagatcggaagcggcgacggggaggagggtacggaacggagtagaggaggacggtgttgcaagcggggtcgcggcgggcgatggggcagaacacgcaccattcagccatcggggccctctccgacctcctcgccacggtgccgccgcggaagcagaacagcttcttcatggcaccctcggcgcccgcgtggagcggttgaggttaggtgggatccccaacgcggcgtggacttggactgtttccgcacttgcgccccggacgcggcagccgtgctcgtgctcgtgctcgcgggtgggataccgccaccgccgccgccgccggtatcgatccggtggccggtggcgcactggctaatcgtccagtgattccacggcccagcgcaaccggcaaagctgtagcgtcagtttcctggtcccttggagaagcccaactcatcacaggcccaactgagatgggccatgaatttggttccaagcccaactcagcaccgcactttctcatttcttgctgggaaaaagtacacccaagttctctcaacttgtcatcgaattacaaaatcgtccctcaaccacaaaaccagatatatgacatcccttaactttacaaaaccgttccatttaggttcttcggtggttttgactccggttttgtacgacgtgactgctaagtcaacatgggacccacctgtcaggatgtcacgaaagggcactgatggagacgtcggctgcgcgccggccactgcacggcctcgcccccgcacggccgccccggaccgcgccttgcaccgaactccgcagcgtcacaccagccgtcgcccagccgtgccgccgctctggccatggccgccgcgcctccccgaccacacgaagtcaatgggaaaagaaaatgaagaaagaaaaaaaaagggaaaagggcagagcagcgagcagccctggccgccgtgctgctggcactcgccgcgccatggccgctcggccgcatcccgcgccgagccgcagcttagccgcatcccgcacccacccggccaccggcgtcaccgcaccgtgccgtgctaggccgctgcaccgcatccgccgtccacggcgtgctcgcagcaccacgccatggccgcttgatcgcccccgcgccgccccgcatggtgtggcgccatgagccgccggcccgccgcacgccggccgccacgagcccgtgtcctggccgcgccgccgccgtgcgtccgcgtcgcggccgccgcctagccgccaccgcgccccgccgtcggccgccgtcacgctcctgctcgccctcgctgcgcgccgcgtgccgccgctgcccctcgccggacctcggtgcgctaggtccccgcatggttggcaccttgttaacgtcgaatgtgattggcctgcagcaggatggcatcccccatagctgtactgcgggcactagccacagcccatctgttccaacaaaaaaaaacataaatttacgagtcgatgcaggctattagcagcaattcagcatctaatctgcaagaattctcacacacacacacacacacacacacacttacggattgtgaagaatttgagcgggtgtgaggctgtgagctgcagaaacggagaggggaagaagcaccagatgagcaaataaaatccaaaaaacaatggcggaagctagcaaagaaatggagggaaggatgggttcacaggctgttctgccggccggccgctgcccttcttcctctccgcgtgcactcgccggtcgggagggagatcggcggggagaggagcaggaggcaagccaccgctgtcctcgctcgcctcgggacatcgccggacacccaccgcctccactctgagtgcgtgcggcttttccagcccccaggagcaagcgagcggcagccccgagtcgtcgtcgtgctccaaggaggggaaagagagggatgctgacgtggcatctaacatgtggggtccatgctgattcagccgtcacgtcggacaaaaccgggatcaaaaccaccgaagaacgtaaagtgaatggttttgtaagttgggatattatatatttggttttgtggttgggggatgattttgtaattcgatgacaagttgagagaccttggatgtactttttccttcttgcttcacgctaattcttccaattttttttaaaaaaaatgggcgcttggttcttccgtgaagtttatcctgaatttatataatggtcaactgttaaaaaaaaggatgattagtgatgaagcaaagaggaagggaagttttcgaccattacgcacgttgccggtgggtgtaaaattcaattctgattttttatttccgttggcaacaaccgaacttgacacgcaaagaggccgagccgtcatccacaaggtccagagtctagacaaccgtgggccacgaatcacaagagcttgactggaccggacgcgagcagggctgcttgaacgttggacggggtagctcgaagaaatgaagaatgtttggtctgtcacgagccgcacccgcacgactgtcggatataattaaagttggtccatgtggctgaaccacgtcggaaaaacataaacgaaggtgtacacgctagagatggtaaattacttggctacgaactttctgtgtcaagcttgcacacgcagctgctggataaggtctttttcttttcttatctccgttctctctgttccttgtgcatatcagtacgtgagcttggagccttggagcatgtctagtagtactaggatttcgcttttgtctcccgtctcccgtggacaggatcgcttgaccaacgcctgatgatgataattaagacctgcctaagcaacacctgggacatccgtattatgatattatctgcactgcgggttacttctaaatgatcaccgcaccccctcgtcgttaccaggctgcctcgtgcatgctcatcacaaaaaggcgtgctttgacgtccctcgcgagacacatcgcatgcagctgcggccagtctcagtctgccatgtgcccatgttcttcctcgaatgcgtctgtctcgccggattagcctgatggaaacgaaggtgaaatttaaccgtgaacagtgcccggctttagctgtgacagaggtaggaaaattcggcagatctcgaaagcagaagaaggcattgcagaaaacgggcagcgccgccgccgattcacggcaacatgcgccgttctagagaagctgcaagtaacatgcattattgcctcctactcctagctagtactgcggtatacttatcatgggtctttatcgaccgatcaagagagctccaatgtatgcatgtgcagaaatgttgcaggtaggcgatagcgcatgttactcgcgctcaccgactagccggtttgctgtcgttggaggagatcgaccggtattaattgatcgcgtcacagtactatcatcatctccgcgggtctctgtctgcgtattaaactcctcattgctgcaaaaatgcttggagtggattccatccacgtagctagctagcgtaatgcttgaattgcgacgacgtcttcaattatttggcagtccagataatagatcggtgctagctcgatcgatcagccagttgctgttgccagtcaccggtttgacgaaccggatagtgtatatccactcaatcgatcgatcaaatgatctggggattgcgatgaatttttctccctcccatttaattctcgcgatgaatagttgaatactggatcaggtgttcgatggatttcgtgcgtacaagtctgtgatcgtgtgcgtacacatagattgattaatttatctttctttgcgtgagtttgtccacaggcacaccacatatgattattagtatatgaattgccacggtggaggttagttccggcaagcaattaacagtagtaggtctcattgaggtgcatcagtggtgacgacatggatatcaaggagagatgatgatgcaacagtggagttgagagtcgatcctggctgtgtataggaggggccaggagcctccttgatgcaccgttgaatagaaattttaaacgtcaaaaaaatcgttggtttctttccttcagaaaccaagcgagtggtgtatgaaacaaactatatatgaacattctcggaatacgcattgaacaaattaacgttcaaggtataggagctatggtttaattccacctgtcaagactatttttgggaggaaaagtacatatataaaaggttttatctcattagaaatttcgaaaaatatatatgtatgtatatatatgtgtgtgtgtgtgtttgtgtgtgtgtgtgtattaattatttggcctccttacatgtacaacatgtaaatttgtagataagtttcaagttctttttgcatttatactcttttttaaaaaatataacttatccgttatatgctatataaatttttgttattgttattaatgtaaatcatatttcatacgcaacatccgatatttttgtgttttgtgatattatctattttaagcaatttctctgctcgtataccacacaaaataattttataaaataaatataacaaaaaaactttaatctgtaataaaagattaccacttactgtacaatcgttttgtacataggccatacaacaattttcatttttattgaaacttttaatgaaataaattagggattgtttacattgtatatctctaagagtattttgggtattcttataagggtgatcaacccactggtatattgtaaaacattgttaatgtcaccggtatataatagaaattaagagacactgttagtgaaatcgttgagctgaaccaaactcagtggcatggagtcgattctctctt

SEQ ID NO: 790 - DNA, 5572 bp, Oryza sativa
aaagtttaccaaagtatgatataattcaattgtattaagagtagataaggtgtaaaactattgtattgagatttgataaaataaagatattgtattgatatgcgtgggttggatgaacagttaaaacgatggtagcaaatgagagccaagctggaatacatgttcgcaaatgcttttacaatcccagcattgatgtgccaatagaatattgccaaccattatgcgttcgtcaggtgataaatggcctagctagagatagggttcatcactcgtgccaaaacatattactgtgcagctgcgctgagcaattcaattgattggcgttcggtacaccgtgacagctcacgcatcctggattcatctacgccgatccaatccaaacaccaacctccgcagctcacagtgaactgcactgctaggctctgtgcactgcagacagggtgctttctgtttttgagtcctagtaaatgcaaatttgagaaggaagataaatattttttgcaagcatgtgacaggctcgttatgttgattagttgatatgaatacagagtactacacccattctaaaatatagtaatatttgaatagatgaggcatatactacgactctgcaccgagcgacatcgaacctatatgttgatcagtctcgagctctgaatgcatactcactacatctaccgtatgagcacgttggttcagtgcgcctgaaggatgttagcaatgccatgatgttatactgttatacagttctgtatagtggagcgctagatttatatgaatcgttcttgttgcacaccacagtgaatctacggtttgtcaccagctgaacagtttggtagtggtggtagtatcgataggaaactggtcacatctttctttttgaaagagagcaccattgcattggaattttggatctgctttcaaatttgaagaggacttttgaagtttcaaactcaagtgtggattctccgcaacgtatctactgtatgatgcggatccttggcagtagcagagctgagcaaaggaactgttcatcttgatgacattttcaaccataccatttttttttgtcaaagttgcaaaaaaaaatatctacgtttagtttgttgccaaatttgataaatacatgaaaaatcctgtcaaatttttagtaatattgccatcttgctaaaattttagcattgccaaaatttggtaaggtttattttggctacaatctgaatatgcccaaaatctgtcttcctaggcctacacctttcctgcctgacattgcccaattagatcgtcattggtttaattatttagtattccctccgttccaaaaaaaaaatattagatatgccatatgtatgtctagattggtagtgactaggttattttttatgggatgaaagtatttaacactaggtgggatattttctagtataatgtatctggaactctctatcagatactcctacattcattatacaaaaaaatgtttcatctaagattcttactacttcctacattctataatataagcaacttaggacggaatatgacattttatagtacaataaatttagacatatatctgtctagattaattgtcatatgaaatgtttcatccagtcctaaattgttatattatgggacagaaggagtatattttagacatattttctattgttcatccacattttaagtatgatactacctccatcccaaattatatctatttctagcacagtaacttgtattaaaatgaaactatttctccacctaccctcttctctcaaccaatcacaaccattctcttcacctattttctcttctcaaccaatcataacccctccaattaatcatttctacatacttacttaatatacgtgcctaccttaaaatggttaggttatgggacggagtaagtattcggttgttcatccagattttctggatgattccagattttttttttaccacacacgtggaccacaaaactgttgtaatctctgtagcacatcgaaccttgcgctgcctttccctcaggagacaaaccccgccagctcatgctcggctcaccactccacacgtgcgcagctccccatggcccgcttgtacgccacactcatcgctcgacagctcactcatcagcggcaaagctgattaccaccaccactcgatcaatctctcaccggatcagcttgaaaattctggagtttatctgcactgcatctctcgtgcaccagtggttgatcaatgattcttgcatcaaatgtgccaaaggttcgagtttgtttactgcagtttctctgttggtagcaaaaacccgtgtggagacatgtctcgccgtccgagtcgttgccatcggttaatcgttaatcaggttccatacgggcagagcaagacagatttacaagcagaaacacgagaaacaaaacagtaacgtcgcaagaagaacaatcctacagatacatgcatggcagctaccactagtctgtactctgtacacctgagagcttaggacaaatcatactcgatcatcgtaagtccgcaccagcagctcaccggcgcgagagcgtgtcccacaggtccgtacaccggcggcgggcgaagccgacgcgaccggcgtccacgtcgtacaccacctcgaacccctgctgctggaagttgccaagcgtccctgccggaccaccaccgtcttcgccgtcgtcgttgttcccgccgacgttcatcagcatcaggcacccgacgctccgcccctcctcgctcttgaaccccatgaagtagttcctccgcggcagcgccaccgtcgcgttgccacggaagtggagcgccaccggcggcacggcgcggtccgacggggagtagtggtagcagggggcgagccctgtctgggcctccgcgccctcggcgcgcgtgaaccgcgccgcggccatcgcgcgcgcgaactcgtcggccacccgcgcgaacgtgtcgctcggcagcatggtgaacgtcgtgcccgagtccaccaccatcccgccgttgccgtcgcggtccacgtccccgagctcgggctgggcctgtatcctcttcccgcccaccgagacggcttcgagcgccaccgagtagaagtaggggtgcttcgggttgtgcagcagcggcgtgtacacgaagtccgtctcggaggcgccgatcgcggcggcgtccgtgctgcggccgaggatcagcgggcttgaccggatgagccggtcggcgcggaatgagtgggcgacgaggcagtaggaaaacctgccggagagcgacggggcgagctgggccgggagcgagagcgggccgcgcccgaacccggccaccccgacgggctcggcgagcgccgtgtgcgcgcaggcgaaggtgaagttctccacggccatggacgcggccagcccgacgcgtccgcgcctcaggttcgcgacgaggctgccgtccccgtacgcgtagtacagcggcgggcacgcgtgggacgcgcacgagtcggtctcgatcgcgtcgagcgggcaccgcgccgcggcgcacaggtcggaggtgggcgcggaggagtgcgccgcggagcagagcggcgacgcgcaggagatgcggcgggagtcgatcggtggggggagcgggctggagtggttgccaccaggcgtcgccttgccttcgcagagcatgcaggtgaacggcgcgcaggggaaccagacgaggtcgctgccggtgtcgaggaagagcgacacggagctggccgtggaaggcgggccgaccgagagcgacagcgtgtagtcgctccccggcgcgagcggcagcgagagctggcggtgccgtggaggaggaggcgcgcggcgcgtgccgtggcggcggccgcggtggcgcgcggcggaacggagggaggaggagcggaggaggcggtggatggtggcggtgtcattggctgggcggagcgaggagagggtgttggtgagcggcagaagcagcccgtggcattgcagcgaggaggagacgagaagcaagccgaagcagaggaagcagagttggaggcgcatggtgacggggcgctttcgcgcacggtggaatgctcgggtttctggcctcaggccgcgggtttagaaggggtttttgaagcggccgagccggcagcagcatcccggggcgtacgtggggacggttcaaacaaactaaactgtgtatcgcgtgggggaaatccacccggggagagcgcgagccgcacggaggacacgcatgctgcacactcgctcaggcgctcgcgcggcgcgcccgcttggttgcaacttgcaagcggctacgtgacgagacaacgtgtggatttggagtcacgggacggcgagtcactgtgcggatgtgcgcttggacgcgagcgtgtatgcgtgcacaagcgcaaaccgatcgagccggggcggatctttttttctttgcgatagagagccggggcggatcaggacggagcagtacaggcctacagctacagggtagcagagcaagcaggacaaggggacacaggaagctagcgagtggtggcctcggagtgagagtagctggagtagtgtcattgcattttcaagtaccacgagcttgcgatcgctatggttttttactggtagttgtgactttgcgattactgggagtggtgactttacgacacggctcgattgaaacttgaaaggcgcacaactcgcctgttttacaaggttacagctgcatgtttcagctctagctcttttgaagttgaagcccgatcaataagtttcaacttcacttaaaacagaattaaagataggtgaagagctctagtaaattaaagtagaaaggtaaaactaggtttcagctactccataactttacttgagattcaactcttaaaattaaatctagaagtttaaactcaaccaaacgagttttactattcatctgtcatctcatgctattgctagcctggtgcataatgcgtcccgaaaggctgaaactataggtactccctccgttcaaaaaccgtgagtttccgtgtcaacgtttgactgttcgtcttatatgaaatttttttataattattattttcattcttgttagatgataaaacatgattaatactttatgcgtggcttatctttttaatttttttcataactttttcaaataagacggacggtcaaacgttgaacacagaaatcagggtttgtcttttttttttggacggagggagtaggtgaatggactgctagtacggagtacatccaactattatgtctcctttttatcttctgtttaaaccacttcagaaagttttagtagttgaaacccctcaacataattaactacccttgaaaacgtgtgatcgttaatctgcatttagggtgttgcttccatagaccataggttaggttaggaagattgaaatcagcaaattaactattgagattaaggatagcactaattaaactgcagtctgtaggtgtctgtcaatcagaacaaagacgtgctaatcaatcttattcgaaaaaaaaacgtgctaatcaattgtaggggaccatttgcagagtgcttatcgttgcatctgtggacggatcagatccat

SEQ ID NO: 791 - DNA, 6753 bp, Oryza sativa
  unsure (1)..(6753): unsure at all n locations
taggataataataagcatgtcgtaaagaaaataaagatctacactgcatcaaatataagtacaaacccgtgtgtaatccaagtactcgagtttcagtagacagttaaatctaacttctctacaaaccccagaagtatgttcaatttttcagtggaacatgagaattattctgaaaagtctacaggaaatgaataatttctgatttgaaagttaaacatgctaatatgctatgagtgcctttcaattcaaatcctcagagggagccttggaaatcatatgatccatttgcttttgtgtagtattccaactacatatagaaatgacaacacataacataaagagtgcggactaggtatttttttacagaaatgctacaggacagtatcccgttcggacgggatgatacccggtaggtatcaggtgatacttgtgaagtatcacgtgatacttgatacctaactgatattgtaccgtctgaacgggataccgttatatagcaaccccttttttaagaaagtgcaaataatcgcattggacagctcttaatccattttttgggggttatatgtgagaatcaacaagtgcaccctctggccagttctggactgttattttccgcctaacataaactgtccccttaatattactgattaatctatgtgaaatatatggcctgtgagaaagatactgttctgtcgaaggccccaggaccctatatttaattgttggggaataggttcattggttattgtttaataaggctataaatggttgattattgttcatatttccttatagttacttcccttatgcttggacagatttaacacaaaggcaatctttagtgcaaagcaaaagaatgatttacttgctatgttttctgccacgtagtttacttttttagcgtcttaccatgttgcttaagcattgttatgggaagtactgcaatttagaaaatactatccaaatcatgaaaacaaattgtaagctggctagctaacgtctaattataatctttaatgcaaataatatgtagcacctcaaatgagtgctgctgtttggtcatgctgaaacagaggtgtgatttcgacattaacctttgttaacctctatgaggcaggctttggtaaagagactggatctccaatacaaaaggagaagtttcttcccatattggcgatcagctttaagtttcgggtttcctgtgacgatctatccatcatactcatatgatgataagcatcatcgtgatctggaaccattcatctataaacgtgaatcgagggacaaaggatcatctccagctccaaaccataacactggccttttggcaagcttgcggcaacccacaaccaattatcaattgacaaggcaatttggtactgctgcattaataaccaatcatcaaacaaagaggctatttggcacggctgcattgacgctcttgaaagtcttgaagaaagcatgaatgaaaaggtatgccatgagttctgttttctatctgcatataacataactttcgtggtgtatataactgaaaaggtatggtgttgggggacgggaagagcatcttcttctggtcttctggacagacgactggaccggatgccaattctatngcttccgatgggggttccatcctgaaccggatgccaattatatgctcttacgtcaaaaacatggaaaggacagttcactccaagtttattttatttttaaaataagatagaaaatatgtaaatttatagctgttaagccaaatatttttattgagaaaaatattatatattttactttatgcagtcaaatttgtttctaagccatccggatgtattggatctgatattattaaatacaaactctagatgtttctgtatcgtttatttaatagccgctgcaatgcgaagtaaatgaacctgtaatagaagggtaaatgaagctcacggatagaaccctcctatatgtcaaatattcttattaactgttgaggaggaaacatcatgtgtgtttttcatagtatgccaagcacaattttgcagtgtttttctttcaaaatgtagctatcgtagtcttagtgaatagaagatagttgttgtacatatgggatcttacgagggtgaaatattctttaaaaattggaaggcatgttgacatttacaatcatcacatttcaaactcatttgacatcagtgtaagtttgagttgatgttattttatttcccgttgcacgcacgggcacccaagttgatgttattttatttcccgttgcacgcacgggcacccaattagtaactaaaaaggtgtggtgttgggggacgggaagagcatcttcttgtggagagacgacttgcttccggatggaggttccatcctgaactgtgaactggacgccaaaaacaagggaaggacagtttacacagtgctgcacgaggatgctagaccggcgacatctccaagtctgggacttgatcaccaccgtcaccctgaaccctactcaaccgaatgcatactattggaagcctgctgcggatggagttttctcggtgaaaacggcctattccctcctctgtgccgcgaagatgcggtcagtggtcggaaggcttgtttgacggcggacaacctccagtggtggggttggcatctggcctcgttctgccacctctgtgggaacgatgcggaatcttgcgcccacatcttccacgcctgcgattacacgaagtaggtatgggcgtaggttagaagtcgcttgggcattgcctgtgacacatcctctggtgacatactgagctggtggtgcgaggcacgtaaatcggttcacaagacggatcgaaagccatttgatgcgggagttatcctggtgacgtggttagtttggaaggaacggaatgcacaggtgttcgatggaaaggccacttcagcggtgcatctttgtgctaccatcgctgacaagtgggaaacatggaaagccactggtttgctgtgcgcgatctattacggttagatagccgagagtccctcatgtgcctctagtgtgttcttagggtgttccgctacggcggttagttgtagcctcagccattctcggctcagggtgttctgtaaagattctcttcttcctaatatacatctcggccggttctttgccggcccggtgaaaaaaaggtatggtatcaccttgaacttatcaagatagtttaagcatagttgaattttaaagttaggaattctattgttgcgtccttttcccctcttgtcaaactgaacatgtggatgaccgtaacctcattttatgtttttgccctcccatttgcgcaggttccaagcaagttgtgctatcactgttttctgcaagttctttttttggtgcatgattgtcgagatccaacctggtctgctgggtttgtgcttttttttttttggtgtgcctgataccgcaacttcgcatgggactaaacatcggccttagcatgcatgttaagctcatgaccccctcgcgcggagcttgggcaggagccggcggtagtggcggaggtagggaggtgagcaggagacgtactaggaagaccggcgaacgacggcaacgaggacttcagcctcacccatctcggtctcgctaaaaccgaagatcattgagtatcgatgcaatttgattagtccagcgatgttggtttaggatgtccggcaatgtacattggttttataatgctaaaaaagatttttataatttagtaatcttgaaattcgtagttaataaatattgagttttagggtccgtttatttgtacgaaaaacataagaatttcggaggattttaatcatataaaaaacattcctatgaaatcttacgaaacaaacaatttaattctatcatatccttattataattctatggaatggataatcctatagaaatttcggagaatagttagtgagaggtctaaactcttggaaaaattcccttgaatctctatcatccgattcatatgtttttcaatactttattttacacatatccctaacagaatcctaatgttttttctattcctacattttctcatttctgctattttatgttttacacatatatctatcaaaatcttgtgtttaacatgttcctctatttttttcattcctgctatttaaagggacccttacttggtttggagtcttagttgtggttttaccatgttttaataagtttgaaattctaaattaataaaatttgactctattcagtttagagtctcaattataattttgacatgatttactgaatctaaaattttgtaataattaataatatcaagttgtactcggttggagtctcgattatagaccttttatgatttcataattttgaacttaataattaactagatctgggattgggaggagacggaggggattgggaagaggagacgcagcggcggcgacaatggggaggaggcacggaacgacacgtgctgtctccgcctctctccggatggaattggaaggaaaggtgatttttcctccagtaggacaaggatagggacatggaagggccttttttttaaaaaaaaaacttcttgaaggatcaaggagatgttttgtcaattgacggatcggatggctagtaactaccgaatgaagaatcagacggtccatgtgttcctgatgacatggctcattgtttttttttcactattttagatatttatgaacttgtcataagcttataacccataatggatgggcttgaaatgtagcccatgatgttaaaagtaaatctattatcatcgcactatggcatttaatcaacaagttagatttttttttaacttgaagacttctagaaaatgctttaattagaatagagatatagcagaaagttagacagagatatctacatcagtgaaaaggggatcccaagatcccaccaggatgagccacatcatcaaataaatatgaaccgttggatgcatgatttgaatgaagagaaccgttggatcaaaagagagaaaaataagttaaaaaaaaaaccaaatagtgtcttgggatgttctagtcccttcaagcacattccataaaatgtgtgataacaaatatatgagaatgaaaaatatcttcaaaattatccttaataatcaccaatgagtattcaaagtaattctactgtatcaataataaaagtatccgtgtaaatataaatagctacataatctaatactatcgattacttcactacagattaaaattaaaaaaacatgtgacatggacgatataataaattttgtaaagttgacttaaatcatatgattataagatttacgataaaatagcgtataaatacttctcaactggtgatgacagaattgcaacgcataagaaatgtgactatttacattactattacaattgacgcatttagatattgtaaaaggcaatggtcgcggtaatatatgataaattatttgtttacgatgatattcttaatgacaaatcaagatatataaatccattaatgttatagttacacttttgaaataatatgttaaaagcatattcattattaattataattaagaatttatgtccactaacataaacaatatataaatatatttaatagatggagaggtcatagtcgtcgtgtgaacccacgacttaagatgctagtatagatagatagttcatgaataactcaaccaaaagtaggtcctgcatcgccgttccggtagagaagagaagacaggcaaattagatattttgggcctggacgtttgtcagcatagccagatagtttttaaaggaatttattgactaagtgagtgtatctcaactgtttactgtttagattctggtgtaaaaccaatttatccggattcaagttttaaacttgacacaagtacttgcttttacggttaattattttttcagtgggaaacaataggcgcccgtggtgacgaccgtaatgaccgtggtgacttcattatttcaagatatggatgttcgtaaagatagggtgtagccaagtcttttagaggtgttcgtaaagatagagagtgtgtttgtgcgtttataggggtgaatgtgcacacgttgtttttattgtgttgaaaattaaaaaaagaatagcccatcttttcgcttatacttatgcttatcaatcaaaatttgaattttcaactttaaaattggagttgattttaaggtttttttttatcaaagtttattttcagcttttacttttagattgctaagaacacaaatataaaaggtttatttacaaattattatttgtttgtgaatatgttgtttgtcttatacaattagccaaacgatggggtcgtattggactgactgagctaacattggcgtgcattatttcaggtacttgtaaattaagttgaccagtgaagacaatccactcttatttgtacaacgtgtatctgacattgaacccgagcgtagatgccatccatgatctcggtcaaacttcagctattcggctacagtcgtttagtttctgaaattagggagaagtttagagaaagttggtagtttgaaaaaaaaaattgaaagtttatatgagtaagaatgttttagatgtaatgtgatgtgataaaaagttgagagtttgagaaaaatttagtggagagtattaagggatggtcggttgcaggctgctagtcaggagggaaaaagactgaagtacgtttcgtaacaagtttatttttagcatatttattattataaaataaatttattttt

SEQ ID NO: 792 - DNA, 684 bp, Oryza sativa
aatctcttgatataatcaatgacatattcactgtatttttgcctaatcgatgttaaatcacttaggctaagtttagttttaccagtatagaaataatcatgaaatatttgctctaattgaggccaagtatggatagaatttgccggtaaaaaagtaaaccatgtaaaagcagtaccggacaaagataaagaaaacaagcgcaatttataagtatcagaactactagcctcaccacattgcgctaagaattgacctacatgctcccatgtggtcctactatcctcaccactaaatttggtaaattcggaaactctataaccacgaggatatgggatgttgtcataataatcaggatacgacttttggtaaccttagcatgattccagcttcaatcctgaatttatccctaataataccactaatcatcctccatattctcaggcctatgctgatttggtggtgggtttggtggcctaaaaggttgcggttgcggcgcaatataattatattggccatacctagtattgggaggatatcccctagtaggattattgtaaacatttggaatatgtgggggaacttgggtattaacagtagatacaggggaatcatgtactggaatatggtataaaaacccattatttgtcattggatcaatcccctgtattgggatgattgcgccgg

SEQ ID NO: 793 - DNA, 636 bp, Oryza sativa
gtcaccggtgagttcgccgcgtcgcccgcatcattttggtgcccttcgttagcgccgtcgtgtcgtcgttcgccggcgagcttgcgccatccggtcgccgccggtggtgacgtcatcaccgacgtcatcgtcgccgtgtcccgtggactggtcgtgcgccgatagatcccggccgttcgttttggatggatcgatctcgatcgttcgttttcgtagccgccgtcgtgcacccggtccaccgtgaaccctagccgatgacgcaataatcccctttcccttttcaaaaataattcattattgcgtcataattcaattaaaatctatataagtgttttaatccgatttaatctttgaaaattcataactaattcatcttagctcggatttagttggttcaagtctctagatttttctaaaattgagatctacatgttaaaaatatccacatgtactgttcatgcttgttaatgtgctgttttggggattttgctcttttctccttagattccgacgttcccagagagtccgatttcgcaggagaagactttgaagagttccaaggccagcaaggcaagccacacagatcccaaacaaccctttgagcatgttgatcccgtttaaagctattgtttctat

SEQ ID NO: 794 - DNA, 639 bp, Oryza sativa
aaagaagctgaaatacgagagtaccgtcatatatgggatgagccatacctgatagggttgctctgatggtctattgagaagatgcgtgccaactgaagagggacttaagatcatagaacgatgccacgcctcgccttatggtggacattacagtgcattccgcacccaggcaaagatttggcaatgtggtttcttcgggccgcaatgtacgaagactcaaaggaatttgtcagaagatgcccaagctgctgtaggatcgagatgtcgactagaggggggtgaataggcgatttaaaactaagtggcacgtaatcaaaactaacctatgttgctagggtcggtgagagacaagtctaactaagcaactaagttatgttttgcaatcctagggtgaaagtggttcaagtgtatcactaggaaagtaaatcacacaactaaattaagttttgcaatcctagggtgatatggccacaaataagtttttatgaaatataaattgcacaaatgtaaatgcaacaaataaatgagacaagagacaaggaatttttcactgaggttcggaaactcgccgatttcctaatccccgttgaggtgagcccaactccaccactcaaccacgaagccgccgcacgccccctt

SEQ ID NO: 795 - DNA, 778 bp, Oryza sativa
attaatattaattaattattacgactgttttcttctttaaacttctgtttataaatgctcgctttatgcaaatgaaccactctagctcttctttgataattccctgcatcatacccctattccggtatgacttctgagtacagtgggtagtactcagtcttgctctatttttcccaaccccagagcacgagtatgtgtcagatgaaggtttctccgaggagtaggcttcgtccgtgccgtcgaggatgcctgtggagtggtgttcccgctgcagatctagtcaaggcttagctcctgttgtctttcgttttccgctgcatttatgtaagacttttatgatgtttgtaagacgtggatctgaatgtcaacattgacgtggatctgaatgcacattctgcttggaattctattcgggaatttctaggcgtgacagtgaccatggctactatggatacaaccatagctcacatcatggatgaaccagaagatatcaagatcaagtcctccaagtgttgaaatccgattcggccaactgctacactgctgacttcaaacggtcgccgaatctgcatacgacctccgttttcggtccgcgagtacttgatggaaatatctcggagccctctttccaacggatctagcctcatcaccaaattccatgtagtttggccgcaatcacataaacaaggtgttgtgtcacttgtcttgggcctctgggcttgtaactttgtttaggaccccagcccaggtggggcccatgtaagggtgcatcccatcc

SEQ ID NO: 796 - DNA, 503 bp, Oryza sativa
acgggcggggcgctaaagcggcggctaggagggagagggaggggaatagaagggagagggcgcctcaccgagggtggccggcgcggaggaagacgacggcgaatggcgacggcgagccacgggaggacgacggccaccggcggacgggattcggggtgccctaaagaaggagacgagagagattagagggagggagatgaaccacggcgaccggtatccatggccgaaagcggcggtagcggttgaactcaccggagcgtgaggggatgcgaattccggcgacgaaactcgacggggaaggggcggccggggtggagcttagcctcgcgaacccgacggcggcgacggcgcggtgcggcggcgaccctagcggcggctagcggcggccggagtagcgaaaacggcggcggcgggtggttgcacggcgcacgagcgatggggagctcgggagagttcggcgaaatggggaaaaagcaagagggagtgacggggaagcttaaata

SEQ ID NO: 797 - DNA, 1290 bp, Oryza sativa
cgcgcatctaacggcggcgacgggaggcggccgtgacgacgcaagcggcggcgtgaggcggctgttcgccggccggcgacggcggcggtttgggtggcgcggcggcggcactacggggcacgagagagctcgggagatgggtcaaacgaaagagggcgactaggggatgctatttataggcttggattgaagagatcggactccaaccgagaggatttgagccggaaaaaccgagggttagttggagagataaactcgaaaacgaatccaatttcgcgtcgaattcaaagggataaagtcggatttttgggggaagagatagaggaggataagaggaatatttcccctcaactaattttgcaaacggagcacgggatgcggcggatttggtggaggaagcggcgggtgcacaggtacaggacggctggctcgggctctgtccaagcttgaagacgacattgtagcagggagacgaattagacttttcgtcttgggctggctgaaaacaaagcaaagaaagaaagaggaggagctcggctgggccgacttgggctgcacagcacgcgcgcgagggagagacatgttgggctgaaattagcccaacggcttaggagaggatttaaaaactttttccaattaaaataatcactgaaatgatctttgaattgttaaaaatacttccaatgctcaaatagtttcaagaaaaatcctgaaaatacttggacactcaaagtacttaaaaaaattataatcagaccatttaatgattaatttaatatgtggataattactgaaatgttctttgtagggttaaaattaggaattgagttccgaaaaatccgagaatattccagagagtataattaaccatggagaatttaataaaaattaaatccatccatgctttatatttaggaaattttatttcccacatttaacttcactttataaattaatgaccatttaatataaattctaataataatttattaaatattttttaaatcctaaaacgaaaatcaggatgtgacaacacctttgtttttacgacatttggggcaagaaagcacttcattgtttttcacaacatcttccatgtactcaacacgacctaaagcatcttttagtttcatcttattcaaattacatgttgagcaatccaaaacaacatgaggttgttttaactttttagcagaaatcatgttaaacatcaaactagcatgaaaggcaatttgatatttttgcaacaactttttagttaaaaacaactcatccaaagtgcgtgtgtgc

SEQ ID NO: 798 - DNA, 639 bp, Oryza sativa
aacacagatggagcaacaacagatgccatgagacgagatttccgacaacttggttgctgcagcagttcatggagtatctccaatgcttcagtttttaactctgaatcaagaaatgaagcaacgagacgcactgcatcttcactaatggatggaattcgggtcctgtatgaaaaggaaatcagccgttacaaaagtttattggagaccaaacaaacaaattgccataattgaaccctttgtttttaaaaagtagcacaaaacaatcttcgtttttgtaggataaatatagggcactcagttttatttatggatttttattgaaaaaggtagaaacagcaaatatcttatgtttgtcaacagtaaaatctgcacaaggagatttttagataattaatgaattaaaaccagagctctacatccaacatggttgtacacagccaaactcaaggagaatatattatacaagaatgctcacctgctattacgtagaaaagcaagaaaaaactgaatgccagttctttgagcttccattgtgcattttccattatcgttcttaagaaactcaagaaatgaatctaaaaaaccattggaaatcatagaacgccaaatttgatattcacgattcagaacacttttgaa

SEQ ID NO: 799 - DNA, 619 bp, Oryza sativa
cggtggcccgtagcgtgttcgccggccgcatgacgaccttctacgcgcagcacaacttcctgactggcttcccggtgccgccgctgccgctgccggactccgcagcgctgtgcctctcttacaattgcatggagctaccgtccgcttctgccgccaacgggtgccccaccatcggcggcccaatggagtccaggcccgccgaccagtgccggagcagcaccgcagccaacgccggcagcagcggaggggacggctgagccgccaacattcctcaaggctgacaggtggggcccacctggttcagctcatcagctgggcacgggtgggggcgtgagaaagggacggccaggatagctaagcctggctcacacattttcgttttgtccgtttgtttcgggtgtggttttcatgtgattgggtttgaattcatcggcatccgggcttgtcgtcgggcgcgcaacggttacacggctacaaggttagcgcgttcttgtgcgtgtgtgcaattactcgctctggtagtttgtacgctgcgtctgtgttactctgttcattgtgagtagctggcagtgtccatttaaacaactctgttcatactctactaagtcagctaatgtaa

SEQ ID NO: 800 - DNA, 551 bp, Oryza sativa
tgccagatctgcacacgctcgacctcggcaataaccacctcacggttccattcccagcggcttgctgctgccgtcttcgcagagcctcaaggtgctcatcctagcgaacaatggcggcctctccgggcagattccagaccaattttccagctcacagcttttccatgtcgacctaagccggaattccatcactggctcgctcccaccgctggcgcagacagtccgctacttctccgtcgcggcgaactcaatgcaggggagcctcgacggcgcgttcggcaacggttcggctccgaccgacttggccttcctcgacctctcgatgaacaacttctcgggttcaatcccgcgggagttgttcgcgctcccgagcgcgtcgtcccttcttctgtcccgcaataacttcaccgggtccctcgccgtgccagcgttcgcatcggagcgtgccgcaacgccgccgtggtcggttgtgaacgtcagccacaatggcatcacgggggaggtcccggaggagctagcggccgtggagagcctgtacgtgaacaacaacc

SEQ ID NO: 801 - DNA, 1342 bp, Oryza sativa
  unsure (1)..(1342): unsure at all n locations
tgacccgggaaaggggcctttatcattttgccaagtaaacaagattcgcatgtctcaaatgattcaaattcaaaagagtgtagaagtccatctctatgaagcttctccatgcgtttctcatttatatgacccaagcgacaatgccaaatataggacgttgcctttttgcattcatgttatagactgaacatccatcaagattcacaatgtataagccattcatcatgggtgcatggaaatagaaaatgtcattataatagactgagcaaccgtcgtccacagatctaaaaccataaccctctgcttgcaaacaagaagcagagataacgttcttacacaaagctagaatgcaataacaattatttaactccaaaactaatcctgacggtaaagataatgccattgtgccgaccgcaacagcaacaactcttgctccattggccacgcgaatgtccacttcgcctcttgctaagctccaacttctttttagcccctgcaatgatttgcatatatgagcaactgaccccgtatcaaatacccaagaatcaataggaagtagcaagattaatttctataacattaatacctgaggtggaactctntncatcttgctgcttctgcttgagctgctctaggtatttctttcagtttctcttccaatgacctgtctccttgcaaaagaagcactatgcatccttagcggaccctgtcttttgaaccttggtcttagagttgctagtactcgtgatctcatgagagtttagctttctcttttgaccactcttcttgttgttgggtttgcgcttatgcataaccatcacatggttggagtttttcttaatgctttcctcggcagtctttagcatcccatgcaattctgccaagatcctgttcaggttgtttatgttgaaattcattatgaacggctcaaacctgggagggagcgattggagaatcaaatcagtagccaactctcggctaaggggaaaaccaagcttatccagactctcggtgtaaccaatcattttgatcacatgtaggctcactggattaccttctgcaagcctgcacgcaaacaagaactttgaggtattaaacctctcagctcttgcttggtcctcaaacatgttacgtagtcccgtgattattgtatgatcattcagtgcctcatattgcctttgaagctcaggggacatagtagcaagcatgagacagcttatatcaaggtattcattgcatcgcctttcatgctccctacattgagcagcaggagcattgttgggcaagtcagctggaaaaggctgtgtaagcacaaactctttgtgctcttgcctgagaacaa

SEQ ID NO: 802 - DNA, 1999 bp, Oryza sativa
gagcattgcgcacccgcagagagcttgtacgtgctgggctgaactttttcactttcacccatctagtttttcgcttttttcgctcttgatgtacagaagggcttcggcttcccctacccaggttctcgtggcgcacctgagcgcgaagcggtctgccttggagcggctggacgtgtaccgtcttcgacttccgaaggccgaagaggaccttcaccataaagaggacaaacgccgagtcgtgccggacgccctgaagaaggcgagcgcagagaacaagtcccttgtgggggaaaataaatctctctgcaccgacttggagggggtgaacaatagggccgccgaaagggagaggcagcttgctatggccgaagaaaaagtcaagtctcttgaggcccggcttggcccagccgaagctgctgctgaagctttggcgccgacgacagagtctgccaaacaggcttgctatactcttcggctggctctcaactaccttggggcgcatgtagaaggcgctctgggtgaagatggatcagcgttcgacttctctgagtggacgcaggatgcggccggctcagttgtcgaagcggctggcgcatacggcgactgctgcgcacgagttgccgtgggcttcatgctcagcattcttcacgaacatggttgttaccatgttgaggactttccccaaaccgtgaagaaggattggcccgaaagttcccaatccgtcacgtttgctttgaaggcctttcggaagaacttctgggaaagcggcggtaaggatggggcgaagacccggcttcgcgagcagctggagaaaatagcaagggccgaagatgccactgccgccaacactggcgaagaccccgagccgtcggggccggctgttggccgtgagggccaaggcactgaaagccgacaccaccctgaagtgtgaggacctttgccctcacgtttttcgcttttttagacttttatagccgtagtttgtttacatatatatatataagtgctttgcatgttcggctggagccggttttttttaaaaaccccccttaaaaattttcccccttttttgggggtaaaaagggcccccccggttttggttggcctttttgcttattaatgaaaagtttttgtttcaccaattgtgcaacttttctagaatgtgttattgactttgttagcacttcttcccccttcgctgcactattatgccttgttggtaggattttagccgaaagtcatgcgttcggccccccttggggattggtgaaataagaacgagaagttcgtggcagtgaaggatttgccgaagaccaagtgtctctttcggcctatttaccgcgaaatgttaataaatggcaagagttacaaggttataaaagtagcggggtggatgcgtgcacatccaggtcgaaccctggaggactgtgaccgctaccatgtcgctcgtcgtgcggaaagcaccagtttgggttgtgtataatattagtagtgatgacgaaccctgttcgccaatttgtagcgtagactgggacgaatgtataaatgatgatataatatttttgtaaggtttacttacataaatacaacagatttgcaccttcgcttactttacattgtgaatctttcgaacatattttcgtgctatcgttcgcatagtcactattgtgctgtcgttaggtcgaaacgtgtcggcccctttgcgtactatagcaaaaggatatgtttatttctcagatctcttcttccgttttcggctcgtggcaggcgtgctacgaagcatcatggcatgtgcataagccgagtacaacagtgttttgacttgtattttcaaaaatcaagctgtcgtggtttcgacgtttggtgagctatgcttcgaccgattcgtttcgcacccctggcgtgttcgctgatcaggagtttgccttggggtttttccacgaagacattgttcacaaaaaggaaggcgaaaagacacaaagatttttatactggttca

SEQ ID NO: 803 - DNA, 706 bp, Oryza sativa
acattgtggtctctaggtcttccaacaaaagtccacaccttgtttcttgcaaagttgttgagctcttcatgaatagcattcatccaatccggatcataaagagcttcatctacatgttttggctcaagacaagaaacaaacgagtaatgttcacaaatcgaagcgacaggagatcgagtttgaacacccttactaatgtcacccaacacttggtcaattgggtgatccttggaaagagcggtgtatatccgtggaggcataggtggatcttgtgccttctccttctccacttcaacttgagcttgacttggcgaagcggaagtagatggctcatcttgagtggaggtggatggcttgtcttccacttcaataggcttgacatctccaatagacatgttcttcatagctctcatcaagccttcatcacctacatcatccaaattctcgtgcccctcttgggagccattagtctcatcaaattgaacatcggcggtttcttccacaatacctttattcttgttgtagacccggtatgccttgctatttgaggcataacctagaagaaacccttcatcacaccgactttcaaatttggttagtctaacaccctttcggtaaatataacacttgcaaccaaaaactcgaaaataggcaacatttggcttcctcccaacaattagctcgggtaccgagctcgaattcgccc

SEQ ID NO: 804 - DNA, 2117 bp, Oryza sativa
aaagtgcaacataaaattgagctagataaaatttcattaaatactttgcttatttttctgtttactggatttttctgggaattatttgagcaagggaattatttttaatcaacgaaacatcatttcatgaattattttaattgaaaaggttttaaatcttcccctaagccgttgggctgattccagcccatctccctcctttgggtgcacggctgtgcagctcagtcaggccagccgagctttccccttctgtttctttctttgctttattttcagtcggcccaatactgaaagtctactttgcatacctgtgcactgttcttcttcaacctctggcagccgacctgagaccgaattggctcggttttccccctccaaatccggcctttcctttcatgcaatttctaaaactagttgaggggatttgtttcccttatcctcttttatcccttcccccaaaaatccgattttatccctttgaattagatgcgaatttggattcgttttcgaatttctctccaaactaaccatcggattttccggctcaaatcctctcgtttggagtccgatctccctcacccaagcctatataaagcatcccctagtcgtcctctttcgtttgcctcaagtccaagccgcagccgtcgcctatagtgcagccaccgcgcaaaccctagcgccgtcgccgccgtagccgcttcagccgctttgcgccaccgctgtggtcgtcgccgccgccttccgtcgccaccgtcggattcgccaggtgaaggagaatcctgtccgccccttcgccgctgctacatctcgctggagcgtcgccgccgtcgtcaagccgagccgtgctgccgtcggagttcgtcgttggtcgtcgttcatcgtagttctttgcaccggtgagtttgcgtcgttgtcttcttcttgtaggtgccttcggtttagccgccagagctctctatcgtcggcggagtcgtggtccagtgccatggctgcgatgatgtcatcctgacatcataaatcctttatttaaatcgtaataattttctgtattagatgaaaatctgattaaacttcataaattcataactaaatcatcgtaactcggattgaagtggttcaagttgctatattcatctaaaattgatatctatatgttaaaaatatccacatgtactgtttatacttgtttttgtactgttttgttgattttgttcatttgctttagtttccgacgttccggaggagaacgtttacattgaagaaggtttagaagcgtttgaggaagctcaaggtaagtcactcagatcccaaacaactctttgagcatgttgatcccgtttaaagctaatgttttatttcaacttatgcattattttccaatgtcatcgagtggtgagcctttcccaattaattagtggccgaagatgactttattttcatatgggttataaattgattagcttgaaccttatatattggtttggttcagctaaatgctttatatatataattgcttagtcatgcttagaaacattagctcattaatgagatgaatcaccttacattatacttatggttgtatttaatggtagctcacgatggttaatcgtgttatcataattacttgatattaaaaccggattaaaggtgagctgtgagcacatggttttgatggtcgtgctcatgacaattaaggaccggttcgtaagctattgttgtgaaatattaaccgtgccaaccagaagccagcgtgggcaacggctttaccttttgtatagcatagttcattatggggtgccagactgcgaagcggtgaaaagtccgtggggtcgctggggagtccatgcctctggttgtagagggggtgattatggtccaggtatggtgcactgtggtgagttgtgttgtgcgaggggtattgtcacagttcctttccgatgtaccgtggtagtattgaggcgcatggtgacatgtcgtggagctgtgtcttgagggtacagtggtatatctctggctagagtaaaactattcgaatacccgtgcccgcggttatgggcgggtctaacaatgtttttcgtgattagtctcacactactcattaatgataatactgtgat

SEQ ID NO: 805 - DNA, 667 bp, Oryza sativa
ttgttttaggtttggttgtgtgtgtctcgcatgtgattacatcagtggtgggatgtaagtgcatgcgttggtttgttttcgagtgttaggtagttggtgagtttagtggtgtgagagtcttcagtttgtaataatgaaactcacttaagatcaataaaagttaaattaattctctgtcctaagtagttttccccggtttctcttcttgtgctctgtccatgccagatggtgctcactcgcagcaacgggaatggccccaacaacaacaacaataacaataacaacaacaatggagagaatcccacacttgcccaagtcctggctcaacaggcacagcttatgaacatgatgatgcagcaacttcagaaccagcagaaccagggaaataaccatgcaccttcccagaacaagttagccgaatttcttcgtgtgaggccgcccattttctccagtaccactaatcctgttgaagctggtgattggctgcatgtcatagagaagaagttggatttgcttcaatgcactgatcaggagaaggtcttatttgcatcacaccagttgcatgggcctggctctgaatggggggatcactttctcctgaattcgactactgctgaacctataacttggcttgaaattaccgctgctttccggaagaagcatatac

SEQ ID NO: 806 - DNA, 2510 bp, Oryza sativa
ctggagattatcctgattcccaaaagttagtgaataaggctattcgccagaggacaaagtacacccgcatgaagcaaaaggaacgccggattgctcaattcaagacacaccaggggaataatcaaaacccgcgtcttactttaggaccccagtccatgccacagggaggttcttcgtctgttgttcgtccgcagcgtcagttcttcaacaacaatgccggcaacaacatccgtaatcaagctccacgccctgttgcagcctcgacatagcaacaacctgccaagagggagcaaggcagcaagcccgtggtgtgtttcaactgtggagacccaggacattacgctgacaagtgtccgaagccccgacgtgtgaaggttgtccctacccagagcaactctaccgcaccagcatcaaaggcccgtgtcaatcatgttgctgctgcagaagctcaagatgctccagatgtgattttgggtatgtttcttgttaacttagttcctgcaacagtgcttttcgattctggtgctacacattcattcttatctatgagttttgcgggaaatcatgggatggaagtagaagatcttagacgtcctatgatggttagtaccccaagtaatcaggcactctctttgcaacgtagcccctctgtcagaatagaaattcaaggcgtaccatttctggccaatcttatcctattagaatccaaagaccttgatgtcatcctagggatggactggttagccagatataaaggtgtgatagactgtgctaacagaaaagtacctctcaccagcaatgatggtcgagttgtaactgtttatgcattgtcttctgagtctttaaggtcaagactaaaccaaataactttggaagagatttctatagtccgggagtatctgatgtgttcccagatgatttacctggtatgcctcctaaaagggatatagagtttagaatagatttggtaccaggaacaactccgatccataagagaccttatagaatggcagccaatgagttggcagaagtcaagaggcaagtggacgatttgcttcagaaagggtacatcagaccgagttcatctccatggggagctccggttatttttgtggaaaagaaagatcatacccagaggatgtgtgtggactatcgtgcattaaatgatgtgactatcaagaataagtatccgctacccagaattgatgatttatttgatcagcttaaaggtgccactgttttctccaagatcgatcttcgatcaggatatcaccagttgagaatcaaagaggaagatatacctaagacagcttttaccactaggtatgggttgtttgaatgtactgttatgtcttttggacttaccaatgcccccgctttcttcatgaacttgatgaataaggtgtttatggaatacctagacaagttcgtggtggtctttattgatgacattcttatctactcccgaaccaaagaagagcatgaagaacatcttcgccttgcactggacaagctgcgagaacatcaactgtatgctaagtttagcaagtgtgaattttggttgttcgaagtgaagttccttggtcacgtcatctcagcaggaggagttgccgtcgatcctagtaatgtggaatccgtaaccaattggaaacaaccaaagacagtttcagagattcgtagttttctaggcctcgcaggatattatcagaggtttatagagaatttttccaagattgctaagcccatgacacgattacttcagaaagatgtaaagtacaagtggtcagaagaatgtgagcagagttttcaagagttgaagaatcgcttaatatcagctcctattttgattttacctgatccaaagaagggattccaagtgtattgcgatgcatccaaatttgggttaggttgtgttctaatgcaagatgggaaggtggttgcttatgcatctcgtcagttacgtccgcatgagaagaactacactactcatgatcttgagttagctgcagtagttcatgcgttgaaaatttggcgtcattatcttttcggtactcgtacagaggtgtataccgatcacaagagtttaaaatatatctttactcagccggatctgaacatgagacaacagagatggttggaattaattaaggattatgacatgggaattcattatcacccgggaaaggctaatgttgtagcagacgctcttagcaggaaaggctattgcaatgctacggaaggacgacagttgccattggagttatgcaaggaatttgaaaaattaaatttgggaattgtcagtagaggtttcattgcaaccttagaagcaaagcccactctaattgatcaagtgagagaagcccaaattaacgaccctgatattcaagaaattaagaaaaatatgaggagaggaaaagctatcggtttcttggaagatgagcaaggaactgtatggttgggcgagagaatctgtgtccccgacaacaaagatttaaaagatgcaattctaa

SEQ ID NO: 807 - DNA, 783 bp, Oryza sativa
agatgttaccttaaaggagccctttgccatgagacaaagtggagcgaagagtgatggagcctccttgatggcaacaacggccatcttcttcttcatggagcttgcatcatcaccaccttcttcctcggacccggatgaggcgaagctctcctcatttgagtcccattccccaatgaaggcctcaatcttcttcccttccttcttaagcttccttcctacatccacaatactccaaatatggaagctcatagccttgaggtgagtagacattttaattttccaagtggagtagtttgtgccattaaacatgggagccttccctacatggtttacctcgttcgaaatcttctctctaggcggtgaagcccaataaagagaaacctggctctgataccacttgtaggatcgagatgtcgactagagggggggtgaataggtgatttaaaactaaataacacctaatcaaatctaacctaagatgctaggcttggtgagggtgaactctaactaagcaactaagttatgttttgcaaacctagggtgatagtggctcaattatatctctaggaaagtaaattgcacaaatgtaaatgcgacaatcaaattagacaatgagacaagttatttttcaccgaggttcggaaactcgccggtttcctactccccgttgaggcgagcccaactccaccgctcaaccacgaagccaccgcacgcccccttcgtcaaggggtgggcaaggcgggagccagcccacggagaggtctacccaagcctcgatcactc

SEQ ID NO: 808 - DNA, 1922 bp, Oryza sativa
tgcctcaccatcttcaccattgccactcccattgtcatcaccatcatcacttacttacatctcatcaccctaaacattttccatattttcatcatcactttgaacatactcatctccgcttgaatcctcattctcactgacgggatcgggcgtgggctcacgacgaccaaggcgagtgcggggaggcatggctaaaaaacaaggagcaaaggatggataagcaaaaattttagaagccacatagtgaagtgggagaagggggagtgctgtctgtcaggggcagtcagaccgagagccaaggccggtcagaccgcaagccccaagtcggtcagaccgacgtccataggccggtcagaccggcggctcacggccggtcagaacgacggtcctcggccggtcagaccgccactgacagtagcacaaccgaatccttccacaatccacacaaatgattctaaaaaaattgctaggacaaagtcgcacaagattggaacatgaacatcaaggtgtaggtctatttcattaagattgaagcaatggggaaactatccttaaccctagaaattgaaatagaccgatttgagagaatgcacaagagggagagtgatttaccagttgaaggagttgaatcacaccaagaaactaccctctattggtgcaaatcgaagaacacctcttccttcacctagggttccatgccatggatcacaaattcaataaaaactcaaacaaatccatggaatagagagaggaagaggaggagattcacttatggtgtaacccgagtgattttgacggttgaaccggatggatttggtggagggaggtggctagggtttggtagaggagagaggaggagttttttcgacttggggatgaatggggatgagaaaagaaaaggtaggtgcgggatggaaaaaaaaagggtaaaaaccttgggcccaccagctcggccggtcagaccggccctctgcggccggtcagaccaccccggccacgccggttagaccggccctatatgggcggtcagaccgggcagcgccctgccggctgtgcacagcccttacacaagccggcaacccccacacaataaaattcaacaaaaatttgatttttggagcaattttgaaatgtgtgagttgaaatattgccaaccattcataatatttgaaatttatgaagatttgcaacaaaagtcacttgagtgctaggaggtgaccttttatggtctataggggtttttggacgaatttgattttcaaacaacttttgaaatatttgatttttgaatatgatttgaataaaaaaaacatttcaaatcctcctctctaccaactttgttttaaaacttttctcaaattccttctcaaactcattttggggtttaatctcattttggccaaaaacaagattctagtttcttcaaaagagggccaaaaggccattttcatccaaaatacatttttcttgcaataagaggcttggaaaacatatagggacccttttaaacattttccaagagatagttttcaaatttcattgattttgcaaaagttttgacttatgttgacttggacatttgaaaatactactagcaccactagttgatttgctcacatataaagggaggtagagcacatgcaaaattcccccttaatgtgacatgctccattttcgcaatgaagaaccaaatggcaataaatccaaagcataagagcaaataagaccaaatatacaatatgcaaaaagaagcaaccatggtgcaccatctcaagccacattagagaaatttatgacatttaactcattcctcaacttgcaaaagcgggtttcatcaagaggcttggtaaagatgtcggctagttggtcctcggttcttatgtggctaatgactatgtcacacttggcaacatggtctgtta

SEQ ID NO: 809 - DNA, 724 bp, Oryza sativa
tcgagctcggtacccatccttgagttgcttgatttgaagtccaaggaagaagctcaactcttcaatcatggacatctcaaattccctagacatcatatcaccaaattccttgcaaaatacctcattagtagaaccgaatatgatgtcatcaacataaatttgacacacaaagaaatcatcaccaatgatttttgtaaaaagagtggtgtcaacttttccaattttgaaatcctttgacaaaagaaaatctctcaatctttcataccaagccctaggagcttgttttaaaccataaagagcttttgagagtttgtaaacatggttaggatatttaggatcatcaaaaccgggaggttgttcaacaaagacaagttcggcaatttcaccatttagaaaagcacttttcacatccatttgaaatagttttatatcaaagcatgatgcaaatgcaagaaggatgcgaatagcctcaagtcttgccacggggccaaaagtttcaccaaagtccaaatcttcaacttgtgtgaaaccttgcgccaccaaccttgccttgtttctcaccaccaatctgttctcatcttgtttgttcctaaagacccactttgtccctatgacattgtggtctctaggtctttcaaccaaagtccacaccttgtttcttgcaaagttgttgagctcttcatgaatagcattcatccaatccggatcataaagagcttcatct

SEQ ID NO: 810 - DNA, 908 bp, Oryza sativa
cagcatcggctttagtcttctccacttgtataatttcgttgcatctccagtaggtacttgaacatcttgagactcctccttggtagtaacgacctccagagctttggcttcttttctcacccacaccttctttacttttttaacctttgatccaccggaccgattcttgtgtgagaaacggtcttgtcttgagttaaatgaatgacttggaactgtcctaggtgattccttccattcttgatgaaacgacataggtgattgaggcatccacggcatataatacataaaaggataaccgtatagcgacattggatatggataccatggcgttacaaccggaggtttgtatggagttggtattgttgatggctccgatttctttgccgtttgaccaaatctcttcctaggagacgatcttggtcttttcgaatcactaggccgattatcaaatcgatcggccaatcccttcttgtatttagccataagcatctcaacagtgagcttcggctttttagtcttgttggaactagatgactcatcttttgtaactttataatcttcggccttagcattattaatcctaattgtcttgggccgaggatctctaataataacatttttccctttcgtggattcggcttgactaggccgaatcaacactttcttgttgtcaaagtcaataggactaataggaagaggattactagccattccagtcttaggcataggtgtaaccgaaatagtttcacaagtgatcgatgaattatcaattggtctttgctccatcaagcttgcatctttaaaataatcatcaaactcatgctccatttgtgaccatgtagaaattgaactaggaggaagtaaactaaaccatgtagatgcaaagtttgacaaagaaagatgaaaca

SEQ ID NO: 811 - DNA, 1298 bp, Oryza sativa
ccaaccctgtgccatgacatctcgactaccgggccgcagctcgtgtagccttcatttgtcctagagaatgtccatcgacccccgacttcatccatctccatccgtgtacttttgtttatgaccagactgagccacaaactaagccttacccactagacatgtggaagtacggtagtgctttgcaacagaggcccgagcttaatccttatagtggccggggtgctacttcccacaactggcatgcacccaaaccccaccgaaaacaggttttaggggttttgaaagaggaagagaggtgtatgtccaattccaccataaaccaacaattccatagtgtccaaatgatatgagaattcccaaagtctaaagttataaaaccacctaatattgcctaattaatcagcgaagcatctacctaaattcatactagtggaaccatgaatagaatacccactagttggggttttgtttatcctagggtgaacaaggtaataataacaatagcaataataataaggtcataacaaaggtaaataggcatggctaaataaaacagtgataacgcgggaatttaaataaagcgataatgcattaatttaaattaaaataattttataaactgggattcaatatgctcaaggatgatgtgacttgccttgctcagagataacggccttccgaaccttcggcgacggccgcgaaccacgcttcgggaacctccggaacgacgaaagctacgcgaagcacacaagcaaagctacaagcctataaaaaagcaataccaatacataaaaagaaagcacagagttctttaggttataacaaacattaagagacttgaacgggtcgattcggagttcgtatgaccaagatatgatcatccgaagtttaatgatgttatatggagatttacgggttattataattaggctttgcaactataaaacatgtggaagcgctagcctggaaaagacaggaaggctgcgctgttgacatgcggaccccacatgacaacctaaaggaccgcggtagaccgagtacacagagacggtccacgggtcgacgaaagcggaccccgtgtgtcaaccaaggcgagtggccgacaaacggagtccactagacaccacacgggctgcacacgtggaaaccacgcggctaccgagcgggcacactaacacggacactacacggtcaccacccgcacacgtgaacgactaccgacaccggtacacgggtaccggggtcgacgaccgcacaacgggtacggggcgacaccgaaaggacaaggacggggcagt

SEQ ID NO: 812 - DNA, 1092 bp, Oryza sativa
tgagattagaaggtttcatggtttggcaggatactatcgtcgcttcattgaaggattttcaaagattgccagaagttattgaagaaggataaatcttttgagtggtcagataagtgtgagaagagtttccaagagttgaagacaagattaactagtgcgccggtacttgtgttgcccggttgccaaaaggactttcaggtgtactgtgatgcatctcgacgaggatttggatgtgtgttaatgcaacatggaaaagttgtatcttatgcctcgagacaactgcgacctcatgaagagaattatccaacacatgatttggaattagcagcagttattcatgcattgaaaatttggagacattatctactaggcaacaagtgtgaagtgtacactgaccataaaagtttaaagtatatttttactcagccggacctgaacttaaggcaatgcagatggttggagttaataaaagagtatgatgttgacatccagtaccattcagggaaggcaaatgtagttgctgacgccttgagtagaaaaggacactgcaataatgcaatgattcaacagtgtccagcagagttacagaaggaagtgcaacaactaaggttagaatttgtaaaacctggacttttgttagctttagaagttaagccaacattttagatcaagtccgagaggcacaaaaggaagacaaatatttagaacagattcggcaggatattcagaaaggagtcaccacttattctactaaagatgagcaagggacaattaagtttaaaggaagattatgtatacctgataagaaggaaattagggacatgatacttgaagaagctcatgattcagtattttctattcatctaggtagcactaaaatgtaccatgatttgaaggatacattttggtggaagaatatgagaatggagattgcagaatatgtcaacttgtgtgatgtttgtcagaaagtaaaagcagatcatagacgaccagcaggtttgctacaaaccttgccactaccagaatggaaatgggatgaaataggaatggattttatcactggttttccaaaggttaggtcaggttacgatg

SEQ ID NO: 813 - DNA, 4766 bp, Oryza sativa
aaccaatcgttttaataacgaaggataaatttgaccaatgaaatccaaagcccaacctcgaaacagccatggttttgatgatagaattcaatacggcgacaggtgccaattgaacattgccaaaccgttgataagctgtgcatcccctatagtatttgaaataatcatcgattattttcggacaatagaaccccgctctcctaagcaaccaattcatcttatgggccaattgatgaatttccgcaaatcccttgacgtacttctcccatagcaaccttagaaaaatcactccatctatatttcggcgatataactctctatcaagcaaaatgtatttgaatgcttaccaccgaatttcccgatcaaccctaagactagaatctttcaaatattccatcaaagggattttccagtctacttctgactcatctatatctatatctatactaatataaaaatgaggagttgcacccctccaatgctacaggccaaatcatctggatcaatccgtaccatccatcctcaaatcatgtaaatcttcaccatacgatttcaccacgtcaccacgtgaatacacagcctctccactcgtgcgacggactgcactggatctcatgtctttgattccactttaattcccctattgatgtcaacaacatgtgaccatgtgaactatctccagtggttgaattatctcgaggaaatgtacttgaatgtctctggttaatctaactaataattcacagcagttatacattttattgaatcaagtatgtgcagtttcacataataatttgcagtacatgtgtttgatttgatgcacgttatcttcaataggtccagagggctggagctacacaatcagctaggtcttaccctggtaaattgttttcggttattctcaattgccgttcggtgggctcaggataaccgatcgaaattagagttgtgatagttgatttgcgggtctatggaggggaatgtggggtttacgctcatgattttgagggggtttctgttcggttcatgcaccggcctcctatagtgtctttgtttgatttatcctatttgcgcacataatgcaaaccatttaggtttacggtggtcgttggacagaagtagcatgtgtttacccatcggcgtgcccaatgcccacctacatctattttcttgttagcgaggatatcgatcaattgactgctcaattaatcaattcatctattgtgtgggttattcaggtcaatcggctcctcccctcagcccacttccatggtcaatgcagtaagctctacatccggacctgctgcaaggccaggtcaatacactccatattttgcttcatttgcaaatcggttttgcagctaactaattggatgagaacagatgtcacatgtatgtactgctcatatatcttgatatcatctcgatctcacaaaattttgatggtttgcttctcaaattgttttttactgctcaatgtaatttttgtattccgttttatagcgatttgtcatatacttctaatagatctcaacctgtattgctgatggttgcttcttccagctcaatgctttttctccctgtattccatactcctgatttgtcataagtttggagatctcaaatgcttcactatatgacaacatgtacagttcaagctgaatagtttacagaggaacataatagtagctgtctaggattggagataatttctgaacctcaagacctcattttttctacatatacggccattacgattgtttagctgtatattaatgtttagttatatatgattgtttaacttaattatatgcttatcaaattgctttgaattttatccaaattccacttggaacatcaggtcagcagctgtcaacaggtgcaacgaggacaaatttgtttggccaatgttaaattcactcgacatattttcaacagaaattttatttgtttaattctgttcatcgagccgcgccccgccgtcggtcattgtcgtcgtgcactgatccactatagtcgccagccagacttgtgagcgtgacggagggagcacgccactcttcaatctctacctcaagcggcgaccctcaccaatggtaggagcagttgtgtcctcctcccctcctccttactgtgctttatttggggatccatccatgatacatctcagtctcaggttctcccgatctattgaatcacatgcatctttcctttacttttggattcaaatttcttttaggtcttggcactttagttaactaggaatttctgcaatttctgcaatgttgagcgatttgggtgtttcagtggcatatcttagtggaactcagtagttaatgtcttgctcagtttgcttgtaaattagacagacttcactgaagttgctctgaactgtttactctcacaaaattacaattttatgagtgttttgtatccaaactatatttatctaatttacagctgaagtagctccagcgaaacgtaatttcataatgcatcgagaataccttgtggagttattactggtcgcatgggtgaatgaactcatcacaagcattggcatcaatcaacttcatgttccctctagaactactaaggaaaaattcatgacatcaaagtttatacctgacaaccactgctcggtggataaggtgagaagcagcaaagattttgatttctcctttaatataaattattttgtttggtttaaatatttgtatactccctaaaatttattcccactattattcaagcttgaagccttgaatgttgttcactaaaggaaagacatgccgtgaatgttgtataatctattgtctcctttggttttcaaggtaactgctacattgagagagactggtcttcaatcatcaattttgatttcttggttttgaaataccaaaagcaatgaatagtcagatgaggttacttctgtattacggttaaatgcactggctgtttcctttaagctaggtttctatcaattttacttgaggacacgttttggtttaagcaagcaaattttcttgctaaatttctctatgcagatatattcctttagaaggaaaattctgcaacattgtttggatggatatacatgctccgccagttgttctcccatgatcagcagtagcttgatgatcagcagtagtgaaacatgttgattagcttaacccttacctgaattattgtttttatccgctggttgcaaattgttatggtgaggggatatagttgcttatttatgataaaattagttgctatgatttaactggtggtggcacttgcaaaagtttctttcaatgaagtgagtactgaaacttttttttagacggtagcggaaacaaaagggaccaaggagggttttttccttattcttcaccgaagaagtccctcatttgtcacttatttttcatgttagcattagtggtttagaatgaatttgttgtttttaactattaataaaattgaatcaataagtttaacatgacgtgcattgcacgtgcacgattactagtgggcacaaatgtccgaattcacaattaattcggcctttgaatcaattgtaatgtgcccccagcttcctgtctgggaccggtcagaccagccacgcaatgtcggttagaccgccccgtctgcccgatcagaccggccatgcagagccggtcagaccgcctctggtctatgactttgccaatttcttccatacttttgaaatcaagcatcggcttttagtatataaatttttttcacattatagccagatgcttggtgtatcaaattattgaaccaaaattccttctttctagacatatgaaaaattataacacccaactaatatgtctagatgaatactagtttcaagtggctattgaaacaataatcattaaggcataaaaatacttagccacttgaagtgtgattaataatgaatcaccaaagtcatatgtctcgtacacatgaattacaataaactccaaatataaataatcggcttgagcatgtatgcaaaatattaaaacaaggccaatgttccaaaacataacaactctaggcaatattagaacaaatcatcacattggccgttgacataagccaaattactaagaagcaaaactttcatggtgtagtaattatgaagtctatatcttatatggtgatccatagaaacacgcatgatttggcttttagtaaatatcaaatactcatgagccaaatcatacttcaaataaattatatgccaatttgccaattctaccactcggaactagcatttgcaacatatatgtataatatcaatttgatgagcaaacacatgtgctagatagcaagcaatattttaacatggcataggcatataatataatgatgaccacaataaatccataccttgccttagcgtccaacaaacggcagctcaaagatgtgatgttgtatccatcgccgttcttctctctttatttcttcataagcatattgacgtcttgccccccaagcaaaatcggctttcttgattgcgcgatttcgaaggcaagatgaataccgcactaacacccatagcatcatgtgaaggagacttatctctaatgaccggtgattcttctctcatcaaattggatttatcactactttgggaaatcaccgatctcttaacttttacctctttgagtctccacacttgcctaggtgatgttcgaggctctaaattattacatgttttgttctccacatctttggcctccttttcttttagacctatggctcga

SEQ ID NO: 814 - DNA, 2716 bp, Oryza sativa
tggtctttgctccatcaagcttgcatctttaaaataatcatcaaactcatgctccatttgtgaccatgtagaaattgaactaggaggaagtaaactaaaccatgttgatgcaaagtttgacaaagaaagatgaaacaattttaacttaagtaaatcatcactactggccttaccacatttgttcaataaattggccgatatgctcaattgttgttctagtatcttcacctgtgaatttcgtgaagttgagcacctcaaatccttgcgggtatgggacataatctacgtattcaggatatggcctttgatatgtatgcatagctactttggattctacactgctaccctgcaagacattgtcactatctattccaacacccacatggccgatctataattcggtcttaggtaacaatactaatttacttttgcttgtgacacaatccgaactgtcatatagttcggctatattttcaatggtgctattgtctaagctagcaacacaatccggaccaacacttagttcagctatattagttattgcattgttgcatgaattattagcacaatccgaaccgtcgtttggtttggctatacatgttattgcgttatcatctaaactagcatttaagctattgtcatccactcggctttcctgagccagagcttcatgcaacacatgatcaacatcaaaaaatatctggccattcaatttctctttaatagaatcaagcaatacattatatgcaatgtcggccaaatccttttcagttgtattcaaactaaaacatcgacttttagcatctctaaacctctcaatataatcagtgacagattcattgtacttttgcctaatcgatgttaaatcagacaacctaaactcagtttcactagtgtaaaaataatcgtggaatttttgttctaattgagctcaagtatgaatagaatttgccgacaaagaagtaaaccatgtaaaagcaataccggacaaagaataagaaaacaagcgcaatttaaatgcatccgaattgctagcctcaccacattgcgccaagaattgacctatatgctcccatgtagtcctactatcctcatcattaaacttagtaaattcgggaactatatagccacaaggatatgggacattatcataataatcaggatacggcttttggtaaaccctagcacgattccttaccttgataccaaaattttccctaataatagtcctagtccgatcctccatagtttcaggccttggtggatttggtggcctaaaaagtggttgttgtggcacaatattattatattggccatatccaatgtcatgaggatatcctctattaggatcattataagcattagggatatgtgtagtagcatgacctacagtattaacaggtgatgaataataattaaaatcagcactgctagtggtggtataaaaacctgtagaaatttcaagggaactggtctgaccaggtattgcccagctatagatagcctggtctgaccggctaagcccccgatctgaccggcccatggcccgatataaccgatggttagtggtcggtcacacaggccacagtaggcccgatctagccaagatagggcacggtctgaccagctatggtgggcacggtctgaccggcatagtacacggtctgaccggccatggtagtcacagtctgactggcatagggcgcgtttagaccggtgtcatgaccggtcataccgtcagttaggttctgcatatagccgattcatgtgtaatcggctgtataaacacttgttgacccctccatagcattataagcatattatatagaagcaaaactaggagtagcagatgcatctacacaacgatcattaactttttgaatagcaagggatgggttaggcgaatcggagattacctttggtgaaactacgacctgagttgacgaagatattcctcgattaattctagccatataactcatagccaaaaccttgatatatttgacttgtgtacttagcaaaatcccaaaaatcaagagatcagtagccttggtcggccgatctcctgtgcagtaagcaaaatatttctcaaaaattaattagccgatgcaagctagacaaacagcattggtaagaaatttttattgatatacgtgcgcagtagtagatgggctttgatggatcggtctaatgcacgaacgttcgctggcagcgaacagccaacaaaaaagagaaacggagtgtcatagccctatcttttaggacgaggtatttaggattacttatttctgttaatatgttgcataattattatttttgcattagcttctacattcaattaaattttggagcaaattatacccctaattggcaaaacaaagcatcatctatgtgtgcattaagttgaacattagggaataactttcataatttattcaaatactagattgtttatcatgagttaacaaattttttctagaatttttacagtcagttctgaccttattaaaattcattgtagttctcagcataccccttttcacctttttgccagaattaaaatatttcgaatttttaagtgaaactttgaaaaatggaaactaggtaactcaatctatctccgcactagaacatatatttttgacactcttgtagctaggtcaaactagttacccaaggagagagagaaaattcttgaaaatccactattttcaat

SEQ ID NO: 815 - DNA, 3673 bp, Oryza sativa
gtgtgtggtgatacattatgacttattgttaagtatggcaataagagattgattatgatggaattatgaagatgttaataatgaaacttaaaacttgtctttgttaattgaagcatcaactcctttacaaaagaattgcgaaataaaacttgctttatgctgaaattaaactacatattgccttcctttgaatatatgccttacatgtagtatggtacgattgacttgtgcttgccagtacattaacttgtttaatgtactgactcttgctcttgatataaccttttgtttgcaggttagacttagtctttgagtgatgcgggttccgattgcttcttttaggatgagaacttaatgggggtaaacccctagtcggtgtgcttgtgattgggtagtcaagcttccgctgttctctaataagtctatttggccggtcggcctatgtaattattaagttgttgtaagtcttaagtttctttcatcttagttgtgtttgctatgtataatcatgcttaagatgaaagtgtgaatctagtgcatatcctgggaactagatttacatgagtatgagttaggaatatttgagaggttgtagatctttagccatttttgtcaagtctcctgaatgtgtaacacatctggtcgccgccttctagtggtttgacgggcacatatcaggctgaagttgactggcaggctaagggctcagcaatgtctccaatatttctctctcgaggcgtcggatgtttcattatgcttgtttgatgacttgaattatttacttcatctctcaaatataatggaaggtccggagagtctacgacagcatggtatcagagcaagtaccgactatatggagccccttaagttggtcgcttagaattgcttcttaaaaaaaaattattttgagggctttgctctcaaatacaaattatttgcgaaaatcatattcaatcttatatctcatccctctatagagattgttttactttatgtctcatgttttgattttaaaactcgtatcttgctctataggaccgaaaccttttgaaaatgttacttctgtaaaaatgtaaataaaactacttataggtcatcataaagcagtaacaaagtgttttgaaaagtttcgaaatccatttgcaaactactcctatgtactagcacggatttgtaaaatatcgggttaaacatagcccctagtgaatgggttttgaaaatgagtctataaaatttaaaacttgctagataatatagagattctatctccttatgttatctctgaacaaaaaaaaatgaatttggtgggatttttcactttcctctcccgatatttcaaaattttaccggtatggcctaaaacatgtagttggtatagaatagaatttgctgtgcttaaccctctagattgtttgcttagatggaccacccaaaattcatctatcctctggaccaccctaacataatgtgactaaaagatgataacatttatacaacctaaaacttgattaaagtttcattttgtgccgattgttcttttctggaatcttgagtcagtctgcttgttaattttgtctagactaaaccgtaggtgataaacctgagaatttttacatgcatcatgtagactaacccagtaagcttcatgaattttggcataatttttagacccctgcatcatagtgaaacaatctagatacttagcataatcatattctggaaatttgtagtagctgcattcatcttttcatgtagcccaaaacataattgataaaatatgcatctttttacagtagttttcatacataacctgtaggctccacgaattttggttgaatttttgagtcattgcgtcatggcataaaagttcatataatactgtatagttctgtcctgaaatctgtagattgtcagtttcacaaatttgtgtagcctaaactataaatgataaaatcatgattcctttagggtagctcctaatctaacccatctatctctctgatttttgtcaaaatttttgtatctttagagctagacctaaaaatttgattaagacagtaaagtgatgaatcccagcacctagcactcatgtcggattaacccctatcctttgaagattattagaaaaccctagtgcaaaaatttattttattttaagggggatagtaagccatatttgtatcaaaaccaaagataaaatttttaaccttgcataattcttcttagacctaaaatagaaatcccattctaagtaagccctgtaccgttaatatgaccaaaattaatgattagaggtctatataaccataggttgttaaaaaaaatgtgtgtcgaccttaataataacagtaagggaaaccttaaatttgtaagtgcttaattttaagaggttctggctgatccttgttcttcattttattcttatagatgcctaccatgtacacaccgtactgctattgccgtgggttcacctggaactcaactcagcatgtgctatggcttatgcttcagtacgcccggttcacctatccacctgagtatcatatcctcaagaaacccattggaacatcccaaaccgcagtcatggttcgtgtaagcattcggggtagaactccactagagaaagaccttcaatatactggttatgggtgggatattaagtccgctttgcaaaactgtgcttatgttgctatcatccgccttcctatgagctacctgagttagaagaattttagtgctacatcccatccttaactgagggagctcaacacactacttacccagggttagctgaaataggtgtaggactacataccccatacctccaacttgcaaactttgtgcgctcactagatatgcgttatcgctcaaccttagctgagctgcaacgcgtccgcaccaaggtagccactttagaaagaagcattatgccaaggtatcgccagggacattatacaccggagttcatgtttggtgaggatgccatgcttgcaccagcacaagatataccaccacctgttggaatgtatattgaaagaagcccaccttcgcgcgtcgatgtcaggactgcttatcctccacttggaaccactggactgtatggactgccagagtatgttcaatggtatggtcgagtcttcaagctgaggatgagagactaagcaatagtcctatataacctctactgtcacggtagtatgacttaaggacaagcttaaggaatacgctaggtatatggtggcccattttggaagaaaatcatggtatgtaatatatgtaaacgagggcggcgctcaccgcgtggggggtcacggccaagtagagtagcggcggctcctctggcctcggggccaccaggatcggaggggaggtgaggtaggccttcaactggttgagggctcactcggcctcctccgtccacacgaacggccctgagcgcttgaggagcttgaatagggatagcgccctctctcccagtctcgatataaatcgacttagggcggccatgcatccggtgacacactgcacatccctaagcttattttctcgggattagcttctatgcctcgagacaagaccataaaaccgaggagattgcccgccggcacaccgaacacacacttttcggggttcagtttcaagcacgtggacctaaggctgtcgaaagcctcag

SEQ ID NO: 816 - DNA, 552 bp, Oryza sativa
ggacagtcttcaatagatggcgacctcataccttcattccaacaaaatctaaaaaactcacaaccccaatgaggatcaaggccgcccttacactaactacataatgcctctctgctgcttgtcatacttcttttgatacttactgataatcctaaccaaattcacctaaaaacctctagctcttcctccatcggctgttcggccagctgtgtgcaccatattaacaggaaaaggattgccatcgaccttcatcgacctcttggagtcatcaaacttgattttgcccccttcaatatccgcctggatctgctgtctgaagactttacaatcattggtagaatgagacccacaattatgccatttgcaatacctcctcttacctaattcctcagccaatagaattgtatgaccagcagggaaattgaatctgcttctcccgaagcaacaaatcaaagatcttatcaaccttggtaatatcaaaatcatacctctcttcttttccagaattcttcacccattagcataatataaacttcttacttctaacccatt

SEQ ID NO: 817 - DNA, 556 bp, Oryza sativa
tcagcttggggggcagattgcagaacaataacaatattggctcggggggtaaacatatcagtatcgacatgatgaggcatatcaacaatatcggtcagagggaattcaaatacatcggtatggagaagatttggccgatagaattgcaaagataatagaggagtggtttggaatcaaacctaaggaacatacttctgtgtatcggctaccatatcctgagtggttgatagggtttcattgccacatcgatacaaggttccagatttctccaagttttcagggtaggatgatacatctacaatggaacacattagccgattcttagcataatgtggggaggtatcggctgaagaagctctaaaagttagatttgttccattgtctttggctggatcggctttcacatggttttcatctctaccatcacattctatcataggatgggctgatctttagaagaaatttcatgactacttctttgctggcgtcgatgagatgaagctttcagatttgatatcagttcagcaacaagcaggagaatcggctatagaaaata

SEQ ID NO: 818 - DNA, 1243 bp, Oryza sativa
cttgttcctcaaagaactccatcacctccagtacgtcccacatataaaccaagagtatgtattagttctcaatctatggtctgagtttattttgcctttataccaatccttaacttttgattcattgcagaaaaagtttgcttccaagaagccacaagcaccagccccatcggttaaatttctcaatcccaacgaatttcattttcagttcttaagtaaccgaggctaatctgtagttgtgttgtcagcctcctcgtcctccaactctgatttctgaatccagtgagcaaactccatcggctgcaggaagtcatcacatagaaggagaagaagaagtagcttgccgttgtccgtgatgaactctttttgcactccgaaacggcaaacaatgtttttccatacaaacttctgtactgctgccgaagtgaccgctccgaggggttcagcctcaatccatcgggagaagtattcgacggccacaattgcgaacttgtacccgtttcgcgccaccgggaacggcctaatgatgtccaacccccatctagcgaaaggccagattggtgcgatgggttgcaactcgtactggggcgcagttgggcttcggccatggcgctgacagctttcgcatttcttgacttgcacaacacagactttcagtatggtgggccaatatattccttgtcgaaacactttggaggcaactgttcttgcggcctggtttgcgccatagagcccctggtgtatttccttcgccatttccccgccttcggcaaaagagatgcagcgaagcaaaggttggagtacgccggagcgatatagttggcccgagaacattttttatttcgcggctctgagctgtaagcgctttgcttctgcttcatcttccgggagctagccgctcttgaagtattttacgaatggggttcgctagtctgctggatcttcacccagtcttgcttggtcgattgccatgacatccaagtcctctgcgtgcacacttggtacgtataggacttcgaaaaaaatgcccgatgaatgtgggcccccaaaagcagcagattttgccaaggcgtctgcttgctcgttctggcctctaggtaaatgttcgaccgttatgccgacgaagcgtttttccatagaccgaacaacctccaaatacctcttcattccttcttcctttgcttcaaaggacttatcgacgtgacctgccaccaacttggagtcagggtaccgagctcgaatt

SEQ ID NO: 819 - DNA, 1664 bp, Oryza sativa
ccaaagggtactgcaatggcaccgtgactttgtgggcctgaaaatagtgtttaagcttgcgcgaaaccatcaccaaggcgtaagcaagtttctccatttcaatgtgtcttgttttcgctccttgcaatgcttcggagacgaaatagaccggtttctagcctgactctgtttcttggacgagggcagcactgactaccactggcgaagctgccagatatagtagcagttcgcttcctggtgttgggctgatcagagcgggcgggcttcgcagatattgctttagctcgtcgaacgctgcttggcattcgggtgtccaggtgaattttcccgcgcctcggagggtcttgaagaagggcaaaccactttcggctgcctttgagaggaatcaactgagtgccgcaatttggcctgcgagcttttgtacttcacgtacgctcgacgggggcttcatttgctgaatggcatcgattttctcggggttcacctcgatgcctcattcagaaacaaggaaacccaacaacttgcccgcgcgaacaccaaaaacacacttcttaggattcagtttcatacccgccgcgcgtaagttgttgaaggtctcctacaggtcagacgcgtggtcgaaagccttgcggctctttacgacgatatcgtcgacataaacctccacatttcatcccaacttcttgtaaaggaccttgtacacctggcgaaggttgccccggcgttcctcaggccgaaaggcatcctgaggtggcaaaaggtgccaaatggcgtgatgaaggttgtcttggagatgtcggccgggtccatgtggatctggtgatagccggagtttgcatccaagaagctcatgagttcgcagccagctgtcgaatccagaagttggtcgatccgtggcaaggggaaatcgtccttcggacatgccttgttcaagtctgtgaaatcgacacacatgcgccatttgccgtttgatttccgcactagcaccggattcgccaaccactcaggatggtcgatctcttgaatgacccaagccttgagcaatttttggacttcggcttttgctgcttcttggcgatcagcggacgtcttgcgtagcttctatttccttggcttggcacccggcttgattgccaggtgatgcatgatgagatctctcgaaacacctcccacctcatcagggccccaagcgaagatatcaatgtttttcttgagcacatctatgatattgtcaacctcttctttgcccatgtcgccccaatgatacgagctttgaggggttggcgtcatcaatctgcatctttattaccttgccgtgaggggcgggcttcggcgcgtgcttcgctcggtcctgtggttcggcctcaacattatgcactgctctgttgattatggccagattgccttttgaagcagccgaaggctgtatccccttgaccacaatcactcctgccgggccaggcatcttgagcttaagataattgtgctgggaaatggcttcgaacttgttcaaggttgcacggctgaagatggcattgtagttgtacgggatgtcgacaacgtaaaactatatttgctcttcgcgtctattttcgcctgtgccaaaagctaccagcaattgtgcttgacctagaacttgaactgcttctccgctgaaacaatgg

SEQ ID NO: 820 - DNA, 826 bp, Oryza sativa
gtctcatcaaattgaacatcggcggtttcttccacaatacctttattcttgttgtagacccggtatgccttgctatttgaggcataacctagaagaaacccttcatcacaccgactttcaaatttggttagtctaacaccctttcggtaaatataacacttgcaaccaaaaactcgaaaataggcaacatttggcttcctcccaacaattagctcataggaagtctttttcaagagacgatgcaaataaagcctattggttgcatggcaagcggtgtttatggcttccgcccaaaaggaatcggaaacaccatattcatcaagcatagtccttgccatctcaatcaatgtacgatttttcctctctactacaccattttgttgaggtgagtaggtagcggaaagttcgtgtttaatactaagatcatcacaatagtcctcgatattggtattcttaaacttggaaccattgtcacttctaattttcacaagagtgcaactaaattcattttgggccctttttgcaaactttttgaaaagctcggcaacaatacacttatcatgcaaaaagaacacccaagtatagcaagaataatcatcaacaatcacaagacaatggctattaccaccaatgctcttataggttgttgggccaaacaaatccatatgcaagagctccaatggtctagatgtggacatgatactcttagtaggatgagaacatgcaacttgcttgctggcttgacaagcactacaaagcttatctttctcaaacttcacatctttcaagcccacaactagatcacgttttgaaagtttgctcaatt

SEQ ID NO: 821 - DNA, 1756 bp, Oryza sativa
cattacccctcttaatagtacggcgaaactaaaaataactagcaaatttgatcgccctacaccccgatcaattctaaattaaagcgctagttttaccgtcttctttccctttacttttgcgccgtcaattttaatccatcgataatcatccatgtgcacatatgaagtggacctaacttaaaatgtatagctcaaagacaacggttagtccacaattagcgcttgttattaattaccaaaattaacaccgggggcctagatgcttcagctagcagtagaaaatgaatttgataaatatgatttttctaatgcgcaaatgattaaggctgctagtaataagtttacctcttctacattattttggtggatttatgttagtaacaaacctgaaacttgggatgaattcaaaaccatgatgagaaaacttgtgagttcttatttcaaatgtactattcgtgagaaattagaacatctgaaataaggagatagaactgttagggagtacatccatgaatttaaagtttgtatcatctatagtgatctaaaagagtgcgatgaaaacaaaatgcacagatttttcaaggggcttaattttcatattcaggttgtgcttgctaatgtgatatataatcatattggacatctattcatgtttgctcatagcattgagagtgaaatcaaatgcaagaaagcatgaacaatgtgatttatctcatgtttctgaatcccctatatctttgtgcaatgatgatatgcaaacattggaggagcaatgtcttgtgcctcctgttactaacattttacaggaggttcagaacattaaacaaaaggagggagaataatgaacatgtgaaaaaagaggagaagcatgaagcacctataatatttgaagaaagtttgcaaggtaaattcaatggtgctgagataattgaaggtgagtatactccaggtgtgctacagatgtccacttttcatgctatagtagagcaaccattagtggaaccaattgctgagatgcctttgtcattagttaatttacttgctgttccttgtgataaagaagggttgtgtgataatgcttcttcacttatatccatgccacaactagtgaatgaacatgttatttctagtgtttctttgtgtgttgattttaagcatgttgtttagattgctaatgaagtagatgaacgtggattgttatcttctttaattactttgggctatgttcggtttgatgttttttgttagctcaaaaatttgaaggagaaattatttgctaaatctaatttgccatgtccaactaatgctatttttcatatctttggtgaatataatgatgttagaatatatttggtgcatagagtttacatatgttcggatttaaaacctcatgtacataaggataaaacctacaagctacataggaatattattgctaaccaaattatctcgagtttgccttcttttgattggaagaaacaagttgttttaaatggactacgcgaagagcaccatatggaaaaaccaaggacggtttttcatgaaggagaggatgatgtgaccatggctactatggatacaaccgtttctcacatcatggatgaacaagaagatatcaagatcaagtcctccatgtgctggaatccaattcggccacgtgctacactgctgacttcaaacggccgccaaatatgcatacgagctccgttttgggtccacgagtacttgatggaaagctctcggagtcgtctttcca

SEQ ID NO: 822 - DNA, 3024 bp, Oryza sativa
catgcatacacacgtatgacatggttcaacttgagtcttctttgtgcatttggatttttggttggcattgcatattaggacccatgagcataaataaaagataaagattcactaagcaaacctataaccacacttgagcaataattataaagagttggcccactatgttgaaagtctgtgttgagcaaataaagaagtgcgaaagttgccagcgtcatggccgaagccaagccgcgccccagtatgatctgcaggccattgcgccaatatggcccttcgccagatggggactggacatcatcggcccgttcccggtggcacgaaacgggtataaattcgcaattgtagctgtggaatacttctctcgatggattgaagccgaaccccttgcagcaatcacttcggcagcagtacaaaagtttgtatggaaaaacattgtttgccgtttcggagtgccaaaagagttcattactgacaacggcaagcagtttgactctgataagttcagagaaatgtgcaaagggcttaacctggaaatcaggttcgcgtcggtcgcacacccgcagtcaaatggggcggccgaacgtacaaatggcaagatcctaaaagcactaaagaaaagactcgagggggcagcgaaaggcaaatggctagaggaattgctattggttctctgggccctttggacgacccccacaagaccaaccaagtttagtccgtttatgcttctttatggtgatgaggcaatgaccccagtagagctaggggctaactcaccaagggtaatgttctctgggggcgaagagggacgtgaagtatcactcgaactcttggaaggagtaagagtcgaggcgctttagcacatgcacaagtacgccacaagcacttcagcaacttagaacaaaaagagaaacccccaaaaaggcggtgctgtcgtcatcgactcggcggggatccggccctttcgccgaagcagggtttggcttgcgaggggccatggcgaacggtacgtttgcaatggcgaagaaagagaatgggtgaaacgcttgaggggacaagagatgctgtggaagaaagaaacggaggaagagaccgcacgcggtaaaatggcaagtgtggcggtgaaaaggaaagagcggcgggaatttatagctcacccgggcgaccgttcgactacccaccagtaataaagcaccacgtgtcgcaagggtaggcgaaacggtaaattcccaccgtccgagcggcacagtaaaaagcccatgaagggaaagcccaatactgttccgttcggcccgggaaaagaaaacatataaccaccaatcgcaggaggcgaagcgcggcaaaataataccagccgcacaagtaacaaacttcatttgcaggaataatgtaggtttcggcaggagcatcggtcgaaagaggggcgccgcataccataccacatggtttgcacggttttggccgaagctccaatctcccttgcccgtgaggggcttgttgccgaatggcatgaggcccttcgaccaagtctgccgaaacccatggcaaaggctatggagcaagaacggcgtgagacgaagagtcgtacgagtgccttgccgggccagaggcgtctcaggcgaagggtgcaaggcgaagactatccgccgaaggaagacgacttcgccatgacaagttcgcccgcgagggccgaagaagcctttccggcccatcaagcttagggactatagggccggcgatcgcctgacggcccatcaggggcccatgagcccctacaacattatgtacccctgtaaatgtccctttcataagggtaatcatgtaaattcccctgtacaacctaaaccctagtagtaagatcctgtaatggggctataaatagtcccctagggccatgtaatggggggatccccgaaaaaaggaattcaaaattcaatacatttcgtttccttccaaccactgttgagtaaccatgtccttcgacgtatgcggttgtcatttcgacaacacttataatccatctctttcaccggtaacgatttcgctgtctaaaagaaataacggtaatgatttctcctttacctccttctatttttttatctaaacaaattaagacatatttctcatttaacctgggttttcaaataattaattaaattaagactccctccaataactcgctattgattcagttgtccctgatgatccccgtaccgaatctcctaaataacccactactgattcggctatccctgatactccccgtactgaaccatctaaatctgttggcatctcctggaccgaactaacaacgccctgctcggtcctttgcatgctcgagccagctgctaacaatgcatatatctgaccactactaccgttaccgcacagatcaattccaccatgaaaacaatgcacggactctactagatctactctaaccgaaccacatcctgacacattgacatgtctattctaccatgtctgaccgtagcataagaaacgtgcatgccatccgacacaaacccaattgatacacaaaactaacaccatcgctagagtcacacacattatgcaccatggtacctccaccactagataaaccggcttgcatagattttgtcgaggagtaatcctctctagcgggtggtcgtgagggccccctttgtaagttcggccgggggaaatggcgcaatgatcaagggcctacttccgcttgcagtctaattgccagatcactctcgtggctgagtgggagatcggggattatacaggttcgggctgctgtcgagcgtaataccctactcctgtgtgtgggattatggtgaattattacaagaggtatcgagctctaagggaaacctagctgttcttcctccgagctcaagttctctgagagtcgtccccgttctcggtggacgaggtccaccttttatagttcagggggataccacatgcaccgtttgcacctaccccttcatgggaggagggggccacttgggcccaatcatacccgtatccttt

SEQ ID NO: 823 - DNA, 1052 bp, Oryza sativa
cattatgcaccatggtacctccaccactagataaaccggcttgcatagattttgtcgaggagtaatcctctctagcgggtggtcgtgagggccccctttgtaagttcggccgggggaaatggcgcaatgatcaagggcctacttccgcttgcagtctaattgccagatcactctcgtggctgagtgggagatcggggattatacaggttcgggctgctgtcgagcgtaataccctactcctgtgtgtgggattatggtgaattattacaagaggtttcgagctctaagggaaacctagctgttcttcctccgagctcaagttctctgagagtcgtccccgttctcggtggacgaggtccaccttttatagttcagggggataccacatgcaccgtttgcacctacccctccatgggaggaggggcccacttggccctaatcataccgctatcctttgcttcaaccggaagcaacatggtcatttggctacaagtggggcccagcgacgccctccgcctgacacgggggacgcccctgtcattcaatcataaatgcgtgaagacttcggcagttcaccacgcgcggcaggtgctcctgggaccatgttgatgggacggggcatacctacccccactccggctgacacaaagcgagacgtgggggcgctgccacccgtcccatcgcctgcgaccagtcacagactggtcatgcctgattgacgggggtcaatcaagcggcgccacacgcccgcccacgccgcattaaatgcggtgcgggacggttgggggcgcacgcattgaaagcgcggagcggtgtcccttgctccgcctcctccccccgccacgtggtggccgggcgagggcctcggggtggcgcgtgctgagggcccgagggtcgtgacgtggtaccccaaggccccctggccgtgttagcactacgtggccgtttcccccgagggggcgggggaaatccaggccactcagccacatggccatacgggaaaacggtttccctctactgtgcatacccctgggcccatatcactgacagta

SEQ ID NO: 824 - DNA, 3126 bp, Oryza sativa
ccaaagtctctcctccttccctctcttttcctccctcctccattccttctccttgggccggccaaggccgccctgccccctcccgcctgggcctaccccggcccaggccgagcggacgtcttcctcccacgcccctgacatgcgctgactgcacccgaccggtgggtcccactcacccgagtcatcgtcctcctcccgcccggctcctccctctcccatgaaaccctatccgtttcctccctcaaatccgcgtgaatcaattcccttcattccaaattgattgggggaattaatcccctttccctcctctctctttcccccataattcccccttgaatggcgccctcagttgcccggaacggccgcgcctttcccggccaccctccttggccgccggccgacttttccgccaccattccccgctcctccctgtaacatacccaaaagtccaggactcagaaatttcttgtcaaaataattagaggttaacttctccaatttttgagagccaaacatttccgttttaatttaggtgatgaccaacttaaaccattgcatgattaaaatttgagaacaaaataaaaccttttcattcccaacattatactagaaatgtcatcaagcatttgagcatacatgtgcataatgcatgcctaggctcgagtcccttgtgcatttggattatggtctcgcatttcataataggtcccatgagcataatctaaaagaattatattactaaacaaacctatagttaatcttgggtgataacatgtggacttaatattaaactcaaatatcatcttctcagcccaaaagaagtttaatgtaatccctgtaacaatattaggtgcaattaagaagtgggaacacatatataaagtaaagtaatcctaattctctaaaatattatgtgcaagttaaaatcatggaaaaaaattagatagacaatgtttagcacaaccaattcactataatattggtacaagttaataactaagtttaataccacaaataaatcagtcaaagcagaaaactaaaaggaatcaaattaaattttaatcggctaaagccatacttcatccaaaagtacatttaactgctcataagtgaacatggaaaataatttattcaaattctagattatttatcatgcctaaatataatttttctagaattgtcctcctctgtttaagcctcctaaaaatcagtctagctttctaatagcccatctttgtttaatttctgtgagcagtctacccattatttttacgtgcaaccaaagaaaatggaatctagatataaacatctaccaccagtaaaatctacactaattcttctagtccacatattaagatattgagttgcaaacttagggggaagaaataattctgaagattatccaaaaactaagtctacccaaactcctacccatacctctcttcccagcctagcttccatcgacatggccccacctggcagcctctccagctcgcccttcctctgtccctcatcctcagccgaccaagaaacacagagagggagagatcgagagccgaccgagtcctggacgtgtcgacgtgtggtgacgacgtgtcgatgccttcaagtcactgagtcatgcctccatctcctctagaccgagtcgcccaactccacacatcactctggagctgaagaagccgagggagaggtcctcagcctcttcgtcatcctcaacttcgccgccaggcgtagtgacgacgaccttcgccatctccgtttgagtcaaggtcacctccatctctttcgcgttcccatctctccacacaatgccgagcatttcctcttttgaccaaaaccactctggtacagtgcatcgccgggaacgcaagccacaccaacaacgccttggagcacgcaccggagcgccgccgcttcaaccatcgtcgtcgtccggccattctcgaccacctcggagcaagccactgcgccatcgtcatcgcctcaacctcctcttcaatacgcctcaagaaacccagccgaagatgtgaaggactcggagaacacatcttttcttcaccggcaccgatctagaatcgcctccgccgtcatcatcgataaccgctgcctcggtgagccattgttcgattccttcagtatacaccatctccttgacctcacaaccctcgtgcattcttgcttgaagcagctcattgtcccgttcgagccgtcgtcgttcacccgaggaggagcactgtcgccgagccgttccacaagtcaccgctgccgccaagaccgcgacaatcctagcttgacccacggtgagcatcctgaaggctagaagaccacatgcatgcatccttttcatacggaatcgacttccatgcacacatgcactttcaccccaagaaccactgccgctcacactcgccatcggcgctactccgatgtcctctaaccaataaaactagaggaatggaatcacgagagcttgctcttcattttatctcttgacctcaacctcaaacgagccaccgtttgccgccggcgagctcgagatcgagctcagccatggctagctctgctctgtctagagcagagggatgacttccgtgaattagattaagtgcagggatccgtttacaattgtagaaacacactgacatatgggcctaggactgcgggttgattcctagaaacctcaagggcctttgtgcatattggtccctcacagccatgtggacccaatcctttaaaatctgaagaataattaagaaaatgcccaaacaaatatatgtttagcagaaaaatgcacaaagttgtaaaatctatataaaatcaaatatagctcattttgaagtgattctagttgctgtagattcttgaagttatgaactttattccaggcatataaaacttgacactcactgtacaaataatgtctctaaaatttatctaagataggtcatacataaaacatgtacaaatttataaaacacatagaaaattcatctcaactcattttgaaacaacctcaaacactgcagattcatcatcatgcactctctggttaggtgaaataaaagtaattacttactttgcatcaaatgcctctaaaactattatatctaaaatgattagttt

SEQ ID NO: 825 - DNA, 912 bp, Oryza sativa
acacttgtgtttgcatctatgtcctagggtaaaaatgaaaaagttttagtttgccctcaaattttattcatgcaagagttagatcaacttcacctaggtttaaaacggaaaattttggtccacaaaattgaagaactttcctttcaactagttttgacgaaaatttcttaatcataaaattcgggtatgttacagtacgacaccactcgagtccggatttggtgagaggaaaagggaaactgattttcaatcaatctgatctactatttccttctagatttggaaattcttcttcctcctcccagtgccggaaacagcacgaccgatctattcacgggcaaaccagaaactcaagcaaaacctagatgcaactccaaaactgaccgataaaaacttctgaaaactacgaaaatagaaccgtggcaacgagccgattccgttttcgtaggtcccgacgacaacagagacacggtggctgcgatgactgtggtacaaaacatgaccagaactcgaaactctaaatgaactagacactaagaccagcaacatgacatgacgatgcaacacaaaactcaaaaaagaaaaaactgaaaagaacaatgcaatggcacaatatggctaggtaaatgatggtatttttttatggctattttctggttatgggtagaaaaaaactcaccggggaaacctctagagtcgacctgcaggcatgaaccttgagctccactctaggctgttgttggcccgatctttcggtgagttgatgataactacgatttgggagaaacgttgacgacccaactacaaccgtactagacattattgtgttgcgccttagcgatcgatacacctctccataggttgttgatcttgccagtgcagatcaaccttattcctgcaagcaaatcaaag

SEQ ID NO: 826 - DNA, 1401 bp, Oryza sativa
agctgggacccagggttgggttgccagttcggtctgaatcatcgtaggccttgggttaaggcaggttcgtgagggttcacggccttgattgataatattgtatagctctaggatcgtctttacaaaatagctttgggcaactaagtgacttttaaatgctgtttactgcaaaacttaacccctatattattaaccccttgtacccccttgcattaatcatgcatctgccggtgtgacttgctgagtattgtggttgtactcattcttgctcaatctttcccctcttcagtaagagaggctttggagaagatgtcttaggtggagtcctggcttataccccagttgagcgcctgtgaagatggagccctaggcccgctagtccgctgctgtttatttttgattgccaggcctgaagtgcctttgtaataatgtaaatattatcgatataataaagatgtgtcttttatatcatgtttgtgtggtgtaccccggcttttcctgggacggggattaatacactagcgttcgggaaaatgcaaatttcctcggtcgcgacatagggcgatcaaatttgctagtttatttttagtttcgccgtactattaagaggggtaatgacctagcaaagagatgattttaattgccacattaagtcattatgtatttagacttgggctcacacttcacacacacacacacacttcactcggttcggcctgaccaggggcggtcagaccggccacatagtggcggtctgaccggcgtgccctggtcggtctgaccggccacaagaaggcggtctgaccggcgcataaggccggtctgaccggcggcacatgcgcggtcagatcggcctccttgagatcgggatggtgctgctctggatggccgatacagagccgacggagccgtattcggtcagaccgagtcgatggcagtctgaccgagccgaggtcggtctgaccggccaccccatgtcggtctgaccagccaggccgatggggccctctgactgggctacaacggctagttttctagccgttgcagagtagcacggtctgaccggccacatacctccggtcagaccggcagagcacagagttgggggatttcgcccccaacggctagttttggtgggtgggagtataaatactcccccaccagcagcaagggggctctcttggcacccaattcaatttgcacacaccccttgcacctctctcacactcacttgagctttgtgttcatccatctagtgtgttagagggttgtttagccaagagtcaagtgcatttgcttccattgtagagctagtgtggcacttgatcatctccacaccgggtcattgcttgttagtcttggagtttgccgcctcctagacggcttgtggaggagttgcct

SEQ ID NO: 827 - DNA, 742 bp, Oryza sativa
tttctagccgttgcagagtagcacggtctgaccggccacatacctccggtcagaccggcagagcacagagttgggggatttcgcccccaacggctagttttggtgggtgggagtataaatactcccccaccagcagcaagggggctctcttggcacccaattcaatttgcacacaccccttgcacctctctcacactcacttgagctttgtgttcatccatctagtgtgttagagggttgtttagccaagagtcaagtgcatttgcttccattgtagagctagtgtggcacttgatcatctccacaccgggtcattgcttgttagtcttggaggttgccgcctcctagacggcttgtggaggagttgcccggtgacctctctgagaagattgtggaggaggcccgacgccggtttgtgagtggtttgaaagttcactaccttcggagtgaaggaagaactaccccgagtaattgaggcttgggtagtcctctccgtgggctggctcccaccttgcccaccccttgacgaagggggcgtgcggtggcttcgtggttgagcggtggagttgggcttgcctcaacggagagtaggaaaccggcgagtttccgaacctcggtgaaaaatctcttgtctcattgtctcatttgattgtcgcatttacatttgtgcaatttactttcctagagatataattgagccactatcaccctaggcttgcaaaacatatcttagttgctgtca

SEQ ID NO: 828 - DNA, 728 bp, Oryza sativa
ataaacaagcataaacagtacatgtggatatttttaacatgtagatctcaattttagaaaaatttagagacttgaaccaactaaatccgagctaagatgaattagttatgaatttttaaagattaaatcggattaaaacacttatatggattttaattgaattatgacgcaataatgaattatttttgaaaaggaaaagagaattattgcgtcagcggctagggtttgcggtggaccgggtgcacggcagcggttcacgggaatgaacggccgagatcgatccatccaaaacggacggccgagatcaatcgggtctacggcggctcacggcaaacggccccgatgacgtcagcggcgacgtcacctccggcggcggctcggcggctcggacggcgcacgctcgccggcgaatgatgatgcttcggcacgaacgaaaggcaccaggacgtagagcgcgacgcggcgaactcaccggtgaccaaaacggcggcggaagatcaacggacggcgacggcgacgaggtcgaagcggcggagaagatcgggtcgacggcggcgacggtgctccggcggtcgtcggcgatgacgaaggggcggacaaggacgacgacgacttggcgaccacgatggcgacctccccgagcgacggtgacggctggagcgagggcgaagcacggctggagcgacggcgacgacggcggcgctaggtcacacggcgctagagctctt

SEQ ID NO: 829 - DNA, 5991 bp, Oryza sativa
atccgattcgaactcggatccataattttccaaagcgatttagccgatgattcctaaatagaaaaggtagagaagatctcaaagattgtttcccctcaattcatttctccgcagaaggaaagacgcggccgaatttgaaagaatacgacggcggcccggcgctagggtttcggccggcggtggccggaggtaaacgatgagtccgacaagtgggacccacctgtcagcgacagcgcgctcgcgcggctgcgggctggactgggccgacttgggccggggaaagagagagagacagagggttttgggcccactttcggcccaaagcccaaagagacttttaaaaacctttttcaatttaaattattcatgaaatgcaattccatttattaaaaatacttccttagctcaaataaatcccagaaaaatctaggaattatataattaagcaaagtatttaatgaaattttatctggccccattttatattggaatttattaattaaaattagatcttctcttctagacttttaaaataaattctaataattccaattaaacaacaatttatatatttaggatttttagggtgtgacactcatctttttgtctcttcaatccatcatgctcccttgctgacatcctataaggtgctttagcaactggcttggttcctggtttcaactcaatactaaactctacttctctatccggtggcatacctagcaagtcatcagggaacacttctagatactcattgactattgggacaactccttttgcaattgccacattcacaaccctctttttaaactcattcatcttagaattacttttgtactcaacgttttgtccatctgcaccaactatctccacaaccttcttagcacaatctagtttgcctctatatttagacaatcaatccattccaaggattatgtctaacccgctcatatttaatagaagcaagtccactaagaatgacattcctatttacaaccttactcccaaacaaatagaggaaactaatgacttagttcccggtgcataaatcacccgtggcacttctaaagtggataaaggtaaatgacttttcaaaataaaactttcggaaacaaatgaatgggtggctcttggatcaaacaacaagaaggcaagctctaaattaacctggaacttaccaattatgacatcagttgcttcttcggcctcctatatgttgacgtggttaacacgatcacgtggggcaccttagttgatttgccttccaggctgtcctccatgagcctagaatcctccacggttctggaaacctccacgaactggtactccaccatgattttgctgggctggttgtggtgctctcaccactctgactcgtcctgttgcttgagcttttgctgcttctgatggaagatttttccatggacaattgggtctagtgtggccgatctgatcacagttgtagcacacaacattattacggggacaatattacttcagatggttacctccaaaaatgtaacatggaggctgaacttggcgtggaaatgctcgtggtggtggtggatgttgatccctataagtctaaacagacatttttgtcaacatcctgccttgggtaaccctttggactaccccaccctgttgcttctgatacctcttgcgagactcctctaagttggtacgggtctcttccttctgaatggcatcatcaacaagctcatgaagtgttgcaaatttgaaaccagacaggtggaacttcagagagtcttgcatgccattgaagaaagcttcaaccttcttagtctcagtgttaacatcatctagagcatacctggagagataggtgaattgctgcatatagtctgccacacacattcctttgcttcaaattaagaaattccattcgcttttgtgccattatcccgattggaatgtgtgctttatggaactgctaaacaaattccgccatgtaatggtattcatagttgctcctccaagtagatgcactatcagtgagctgatgagatgcatacaactccttctcacgatcattgcattgcaccgtgttcaacttcctctcaacatcacagatctagtcatcagccttcaaaggttcggttgctccagcaaacactggtggcttggtcttcaggaaatctgaccatttattacctagtgcagatccatttgatgatgatgcttctagagtacgattactcatcaactgagttgcaatagcctcaagaaacttcaactgattcattgcattaacactttgatttctctcaagggccgcaaggactcgagccaaactaggctcttctccaccattgccattactttctaacatgctgaccactgtcctaattagtcaaatctgcagcgatttaaatagagatagataagaataagcaagaatagagtaagttaagacagaatagaataaagacaaaagagaaaagaatggatagaaatgcaattttcgtaaccatgatgcataaatctacctaccacaacaaaatactttttaaaagcgaaaccaaattaacaagatgtagctacaaatcctagtggatttggcatacagcttgcataaaacatgccaatcaacacgtctactaaggttcaaagtctaattcttacgtgagaacaaggcaagagacaagaaattttgaatttagaaacgatgataagacaaaaaatatttagaaaataaaatatattttagctagtattgctaagacagagggggtaagaaagcactaaagaaggtatggaaggacgaaaagtaattaaacttaaggtttttcaatatatttttatatttaaaaatagctttttatcaaaaatcgactctaaaccatctaggtcaacctactgtcaagctaggctctgataccaagtctgtggggatacccagtttgagtacggtatctcgaaaccacccgcgaccgtccaggatttcaatcgcgcacagattgataaacagaacagtttttgacatatataccccaagtttttacataaattattacataaaagttaactaagacaggttttaggggccgactagctaaacactccttacaaacaaaagacccatacacaaaataggataaaaaacaccacaggcaatgcctgagagcagatcgacctagaacatgaactcgtcagcaccgtagaattcttccccttcatgcgccttctcagggaaggactgatcgtctgaaccacattttatgcaagaggtgagtaccgaggtacccagcaagacacatccataataatacaaatagaatgtatgcaaggcgtacaaggaatatagttcatcaaggaggtttcataacaagtcgattataaatagtttttccctacttcatcaaacatttcattcgcaaacaattgtaaatcatcattttaaaatggtatcaatattaatcaccattcatcctcatcttcaacatattacatattttaatttaaaatctactcataccatgataaataggaatcactcaatcacatagcttcttaaccggaagcgcggcaacattcgaatgatttaatgcaggggctacatttgccaggctagtgtacagggtcttgggatcacaattggggccaaacgtcgaagcctatgttgatgacattgtcataaaaagtcgcaaggccttcgaccacgcatcagacttgcaagagacttttgacaacctccgcgcaaccagcatgaagctaaatccagagaaatgtgtgtttggcgttcgtgctggtaagtagttgggattccttgtgtccgaacgggggatcaaagcaaacctcgaaaaaatcgatgccattcagcaaatgaagccaccatcgagcgttcggcaagtacaaaagctcgaggggcgaattgcggcacttagtcgattcttgtcaaaggcggccgaaaggggcttgccattcttcaagacccttcgaggggcaggaaagttcagttggatgccaaagtgccaagcagccttcgatgagcttaagcggtatctccaaagcccacaagctctggttagcccattggcagggattgaactgtggctctatctagcagcttcgcccgtggctgtcagcatagctttggtgcaagaaaccaaagcaggccagaaactagtatacttcgtctccgaagctctccagggggcgaaagttagatacattgaaatggaaaaacttgcttacgccctagtaatggcttcaacaaagctcaaacactacttccaagcccacagaatcatggtaccttcgcagtatcctttggacgaagtgcttcgaggaaaagaaatcacggggtgcctaagtaaatgggccgctgagctatcacctttcgacctacactttgtcgctctcactgcaatcaagtccctagtcctcactgatttcgtggccgaatggacacgcacgtccgtcccagagcccgagccagtcgaacagccatgggtcattcaatctgacggctcgtggtctcacaagtgggcgggcatcgcttcaatcctgacttcaccagggggtgtaccaattcgttacgcagcaagactgcagttcgacacaaccaacaacgcagcagaatatgaagcagtgttaatgggcctgaggaaagcgaaagctttgggcgttcggcgtttcctagtccggacggacccaaagcttgtcgccagccaggttgacaaatcctttaaagcgaaattagaaggaacgagaaaatatctagaagccgtttagtatatgggtaaatgtttcgccggcataacggtcgaacacttgccctgaggccagaatgaagaggctgatgcgctagcgaaatcagctgcttgtggagggccgcattcgccaataatctttttcaaagtcctgtatacaccaagtgtgccagcagatagccaagacatcatggcaattgaccaagtctagttgggcgaagacccaaatgactggcgaacgcctttcgtcaagcaccttaaagagggatggctgctagatgaagaatctatggcgaaacagttgcaactcagagctatgaattacaagctaatctccaggcaattgtatcgaaccggaatactgcagcccatgcttcgttgtgtctctttctccgaaggtgaggagatggtgaaggaaatacactaggggatatgcgaagcgcaccaggcagcaaggaccgtcgcatcaaaagtattttgctaaggcatatattggccaaccgtacttaaagtacgtgttgaacatgtcaaaaaatgtgaaagctgtcagcgacacggccgaagtcaaacagcaccacagtacgaactacagctaatcgcaccaatctagccagtcgcaagatggggcttagacatcaacggcccattcctagtggcgcggaacaattacaagttcgccattgaagccattgagtacttctctcgctgggttgaagccgaaccacttggcacaataactgcagctgcggttcagaagtttgtatggaaaaacattgtttgccgattcggggtaccgaaggagttcatcactgacaatggcaagcagttcgattctggaaagttcaaggaaatgtgcgaggggctaaacctgcaaatcagattcgcttcggtcgcacacccgcagttgaacggggcggccgaatgagcgaatggaaagatcctcgaggctctaaagaagagactggaggtggcggcgaagggaaaatggccagatgaaatgctatccattctctgagcccttcggacgacccccacaaggccaacaaagttcagccctttcatgctcctctgtggagatgaggcgatgatgccggcagaactaggggctaactcaccaagggtgatgttctccgggggcgaagatgggcgtgaagtatcgcttgaactcctagaaggggtgagagtcgaagcactagaacacatgcgcaagtacgtggcaggtacttcggtaacctacaacaaaatggttcgaccg

SEQ ID NO: 830 - DNA, 2022 bp, Oryza sativa
acaccactaaactcaccaactacctaacactcgaaaacaaaccaacgcatgcacttacatcccaccactgatgtaatcacatgcgagacacacacaaccaaacctaaaacaagcaaactaacacaatgatctaagacaacggtttgacaaggcactctaagtcttccgggcatcggagttgattgaaggctcgttcggctcatcttcatcatcttgagtggctccccactcgattttggaatgggtgcgcttggattcttctacttcatcatcacttacgttgacaaccggaggatccgctagggctggggtaacttctttttccaccacacgaacctttggcgccaattgatagcgagggacaaatagagctctcttccttgcggtaagagaatcctggccttctgcggtggtgcttctcccttcaaggcggctagttctttctccaaacgatccactttgtcctctagcttgcaaatcttaccacgattccgatcttcacgatcttgagctgctaacacagtctctgcacgggtttcatccatagcccacagcatctcaaccaaatgccttgggtagcatcattctcaattccgtcagtctcaaggtagctgccacggtcacttccctgtggtgacgaggatggtagcgatactcagtgtcggccaactgatcactgtagcgatcgcgaagctctcctatggcgatccttgccacctcctgacatgcatggatgtagtttcttcctccagcttcgaacatcactgaggggatatcttcgctattactgtttaaggtgactttgacccggcacttctcttcatgacgatcatgaggaatctgggcataaaaaggggcagtcccaaatcctatggcaaaggacatcgtacgcaactcctggacaaatccctcaacaccaaacaagtactcagccttgtagcgcggcatctaaagacaagtgaaaggagggagttaagacatttatccaatcaatagcacaagtttttggattaatttgaataaagttagaaaatcaaagtaaaaagtaaaccaaacttgcaggataatttgaaacagttggaaacaaggccacaaattttgtgcttttgaataacaggtttcaaaagaaataaaagaaagtcataaaatcaacatgctaaatttatttccttgcagcaagattaaataaaacaatgttgtagaacttttgctggtaaatgagccattagtacagtaatagatgtacagtactaataacactggaataaattttgaatgagaacaactaaaagagattacgaagtgcatgtgccattattttggtttaattaaaagagaaggggaggagaacagttctacttttccaatatttttagagggcttctatgggtaaccatttggcataacctagggtcaaggaggttctgataccaacttgtcacgcccggaatttctatccaaaattccaaacgcttacatgtgtgtgaaccctcgtccaggaatcagccgaggcacacaataacaaattgataatagagtacaattattactctaattaataagcgaataaaatgtcattacagaggtagatagttcctctcaatcaataaagatctaagcagcggaaaataagataaacggcgcagacgactccattccacaggtagcttgaccagggctacacctaatcctccacaccatcagcatcattgtagaactcttcctctgatgaatgattgcaaggtgagtatatgacatactcagcaagccacgcagcaaatatgcaagtgctcaggataacaaaggatggcatagtagggtttcatttgcataaacagcatttaataaacatttcagaatttaataaaacagttaagtgataattaaacaatattaatccaacgctatacaacataccctgttgcataggcccaaccattctgaacaaccatcccggctgcacagttctatccccaaaccaggaatataccattccaaaccaggagctaatcaaattattat

SEQ ID NO: 831 - DNA, 591 bp, Oryza sativa
tggagtgacggcgacgagggcggcgttaggtcacagggcgctaaagctcttccgacggcgagacacaaaggcaagggtgccggtgggtaaagcaaacaccgggggtccttatataagggttggagggcagcggcgaaggcccacggcggccggcgacgcgaagaaaacttcgggaaaaatgaatccgaatcaaactcgaatccatgaatttccaaagcgatttagacgatgattcgaaaagagaaaaggtagaggagatctcgaagattgtttcccctcaattgatttcaccggagaaggaaagacgcggccgaatttggaaggagacggcggcggcgcggcgatagggtttcgggcggcggcggccggaggtaaacgatgagtccgacaagtgggacccacctgtcagcgacagcgcgctcgcgcggctgcggactggactgggccgacttgggccggggagagagagagagagagagggttttgggccgactttcggcccaaagcccaaagagacttttaaaaacctttttcaatttaaattattcatgaaatgcaataccatttattaaaaatacttccttagctcaa

SEQ ID NO: 832 - DNA, 526 bp, Oryza sativa
taatggaagctcacgatggtcaatcgtgattggttaattaattaatttgccaaataaaacttgataaaggtgggttgtgagcacatggttttgatggtcgtgctcaaggcaattaaggaccggttcacgagtttcggttgtgaaacattaaccgtgccaactacaagccagcgtgggcaacggctttaccatttgtatagcatggttcattgcggagcaccagactgagaagtggcagagataagcccacgggggtcgctggagagtccatgccttgtttataagggggtgattatgatccaggaacggtgcactgtggtggattgtgttgtgcgaggggtactgtcatagctcctttccgaggtaccgtggtggtattgaggcgtatggtgacatgtcgtggggctgtgtcttgtgggtacagtggtacacctctggccagagtaaaactattcgaatagccgtgcccgcggttatgggtgggtctaacaatgtctttcgtgattagtctcacacttctcaccat

SEQ ID NO: 833 - DNA, 10924 bp, Oryza sativa
aataaaaacaattctaaattaagtaaagaaaacttctctaaatcatcatcaaattcaacgtacagctaaaaacggagttttaaggttcgtgaacgataaatgtacaccgtatcacgttaacggaatggttttactaccgttaacgtatatacggccgattaatcggttggtacggccgtttttccataacactggtatttctttaaaaaaacatgaaatgcgtagctctttgcttaatgtatttgtgattcatgacatgaggtgaagagaactctcctggacctaactatggttttatgtatccatactacaatttatgcttactaatgaaattcaaatattgtatattgtttgtcgcttagtgagtagtgagttagtgacttcagtgtagatgtaaatgacaacgaaaatcttatcttatagcttttttgacttgtattcctttaatttatagactttcttttctcttgttttggcatgactggggttgagaagagtgttcactacaattactttcaacaagaaagcatgcttagactttcttctagatacagtggtaaaaatgatacattttgattgtatgttgaatccttcacaaaagaatgaaagagagcattttatggtgaagatattaggtccttatgattatcttaattggagcttgcaaaggccttttgactgtgatgcaagtatatgaaagatgtaagaatatgcaagctagctcatatatcttgataaaagagatactcttttaagaatcaatgtagcacaaatcataccaaagtcaatcatttttcagttaatgttaataataatctcatgagaagaatgtttttattgcctttctaaggggagttattcttagtataagaattgagcaagaagtggatgatcgcccctctcattttcattgttaatctgtgtactatgtgaagaatttgttttttcctaacaaacatttaatttcatttagtaaagcattatagcaaattagcaattgattgcttgtggtagcaacaactgactttccttgttgcacttgagtgttgaatttaaaactttaacaatcaatttttagttcttcatttgatcaattttgttaataaccaaacccaaatattaggctttaaattatttgcacgagggggtccatttgtttacatctgactagaaaaaatacccgtgcgttgcaacgggtgaagtctattttaatcttattattgttatatggtttacttaagatgaaattcactgtgagagttcgcttggatatatatatttttagaaaatcataagctgcagttaggagtctgattgtctcaagttagcatgcgagtttttttaaacagatttcttatatgattccttttgtattaccaagagtgaacgatcttaaaaaccgactcaaatacggatatgtatttccaaaagcaaacgaacttaaaaaccgactcatacacggatgacgtatcaaaataccagcaaaaacatcttcaatttttataatagtagagataagatggttgaaacctagacgaataacattatcaaattcaccctagtctatattttatttcagaaaacctctttacaattcttggttttgctgactatgcaggtccacctggctctggaaagggaacacaatcgcccattattaaggatgagtactgcttatgccatttagctacaggtgatatgttgagagctgctgttgctgctaagactcctttaggagtcaaggcgaaagaagcaatggacaaggtattgcacttggaaatcacccacataagcagcagataaaagttagatggccaaatgaatagccagccagctctgaactcctgatttctcaaagcaaaacatgttccataagtatttttcactaacttcatgtttgttagggagagcttgtttctgatgacttggttgttggaattattgatgaagccatgaagaaaccttcatgtcaaaagggtttcattcttgatgggttcccacggacagttgttcaggcacagaaggtattcgatttgtacttttattaatagttcagccaataaaaatatttttctttaggcaatgtagctatgttttgaactacactgtttactttcgggttcataatatttttcttcttcagcttgatgaaatgctggaaaagaaaggtacaaaggtcgataaggttcttaactttgccattgatgattcaattttggaagaaagaattactggccggtggatccatccctccagtggcaggagttatcacactaagtttgcacctccaaaggttcctggagttgatgatgtaagttgaatacagaaatatggacttaataattattatactttccaaatttattttattttgcgtggatttttggttcagcaatttaattgttggatattttttcctatatatcttgtacaattctttagacggtcttcataaaattatgtcacggtgtttaacctatgtgatatttatgtcatggtgtcttatctacataactatattatataattctatacatcaacaactttgtaaagtattcaatattgcattatcacatattagtttgccaaacatctgttataactgcattgataatgatacaagttgcataaggatttctgttagttcattatttcctttatcaagtttttttttgtttcttaatccatttagtgacatattttgtgtggaccttgtatcccttttgagtctgcatagttgtagatattttgcttccttgcaacaaatatttttccagttaataaaggaactaatagtatataaataatttattcatccagtttactattttctttgtattgcatcaacgtttcttctgcggtactgtttctttcactgccctttttctatttaagaaaactgctataaaatgttgactgatgctttcatttgtcttattcgcctaggtcactggagaaccactaattcaaaggaaagacgacacagctgaggttttgaagtctagacttgaagccttccacaaacaaactgaaccagtatggtgctctttctagtgaattataatgttttaaagtatttaggaaaagttggttgtttttttaggcattatgacacgtgtagctatttacagttcttgagagtgtctgcctagttatatcgttctgaccgtacggttcccatttgacatcttctggattcttttctcatgtgttctatgattgcatatcctttgatagccaagacttcgggagggtttcatcttgttctctaaaatattgctgcttgtgaagattcagtattttttacttcaatgttgatttgctcccaccaggtgattgactactactccaagaaggccttggtggccaatcttcatgccgagaagccaccgaaagaagtaactgctgaagtccagaaagttctttcgtaaatgtaccaccattttgagacgaaaattcgacagattacccagacacactgggtccggcttttagatgttcaaattgacgctgacatgcaaggtgtagactgctctctttttgtattgggtactcttatcagatttgatgagcacagtgctttgcgttgttttagttctaataatctctatggcattgatggaaggaacatttttttgtaccaatatcacagggttctttcacccttgagagttcccaaaaaagctttgcttatgattatgtgctgttagtgtgttcctatagtacaacattgcgttacgctagagaattttccgctcccaatttgcattgccataatcaagtttcttcgctgcaattgtgtggttatttgcatgtttgaattattatcaatggcaatgactccattatgttacaagatctggactcacatttaagtatagaatcctatatcctatatatcataggtggttccccactaagtgcaatcttataaaccgattccaaggttagaaccctgattcttgatccccagtgggggggccctaatgagcgtctcatcgtgtgggggcgtgggtgcatgactagctcgctccaactactactacaacaacagtactactatatgtatatatacgggggcgtgggtgcatgactagctcgctccaactactacaacaacagtactattatatgtatatatacggcagatcctttaacttaactgcacatacagttgagtcactgacatgtgggtcccactttgccatggcccatatgtcagtgactcaactgcacaacagttaagttagaggatgatatatacgtatgtacatactttatatacacaactttgttatggaataggttatagacttaataaattcgtctcgcgaattagtccaaggttatggaatgggttataggctcaataaatgtctcgcagggttatgaaatgtgttttggaaatgggttttgtcagtagtctacgtttaatacttctaattagtgtcaaacatccgatgtgacaggtgctacaaatttttagccccatccgaacatccccttacgttatcaaacacctttcagagtttccgcctagaatcatgatttatgaaatttctctttcaatggccacaagtgatcaaaaagttttaatggccttgggatatctagcaacttcctcttccaatggccacaagtgataaaaaagtttaagtggccttgggatatctagcaacttccttgccattccatcaaatgactgatatttattctccttttttttaaaaccaatcgtatggccattatttatggcatgacgtgactctttcttttttcattctttgatttctcttcctttcattctcgatgcgccaattgagtttttattgagatcacctcacgaaccacttccagcgctaagccaatcgctggtgaggctcgggagttatctccaattctgttaagattgattttaccgatcacaaaaacaaccttatctcttaatttgatttctgttaggaaccggataagtgggatttatccttttccttaacaaacagaaattagcctaaaaaatcaactgcatcaaaattgtgtaatttacgtgttgtaatagtgacataattcagcagtaagtgtgtaggagtgtcatggtgtttctggataattatgcagaagatcagaggggaaaacaatccgttaggctcaataaaaagtttcaagtttcaatgcctttgccgcacaagacaaagagggcttacatagggtcaatccatcagaaattgatatcaggaactgatttccctgttcaaatagtccacaaacatcctcgttgcgctatcagcatctgctggtgggggaggtccactcaagctgtactgccctgccagcttaatgaaagtgcgtcgcaggcttcgaagctcaggcagaccgactgatctttgaagacatatgtaacaaccagttaaggatataatggttctttgcttatactccctccatcccaaaaaaacaaaaaaaagacaaaccctgagtttccgtgtccaacgtttggctgtccatcttatatgaaattttttttataattagtattttcattgttgttagatgataaaacatgattaatactttatacgtgacttgtttttttaatttttttcataattttttcaaataagacggacggtcaaacgttggacacggaaacctagtgtttgtctttctttgggacggagggagtacaacggatagaaggtgcccctacctttgaagcttacatatcaaggcttcctcgtagcataaaagtgtggccaattattattcaatgtgcaaaactaccattttggaagtattttcacctacttgattttcaaacagttgcaaggtgaaagaaatgtggataaagctctatatgaaagggtgtttttgtatcagaagattattttacactagccagttaagattgctagatcttcatatactgcacttataatatataaaaaagaatcaattgacacacaaagcttaagagtatattgtttaaacttatatgtatacaggataaaagaattggctcaaacagtaaaggatatagttggtaggtcaggaccaagagaaatcttattcacgggaagcccaagaccacaagattgtgcttcaacaattgcattgatcacctcctgcaaatcagctcaaaaggtatgctgactaaagagaaatccataattgaaatatcagatatcaaccaaaatgactgtcattacctgcgttgctttgtccatctcgtaaagggaattagcttctgttgtccgagcctaaaatatcaccaaggctgtgtttagttcagcgcaaagtttggattttggttgaaattggagatgatgtgactgaaaagttgtgtgtacgacaggttgatgtgatggaaaaggactgaagtttggatccaaactttggatctaaacacaacccaaatcaggattcaattccaacagctacaggtacaagcataaatgcaatagcactacacttccagcatcataaagagagtacagtatctgcagaaagtgactaaggcattgattcttctgattttttgtgcatttacaccatcacatttagattttgacagaaattgtttgccaggggtacaaagagctaatacacaaaaaagataggaactaagctgtaagagtatatggtagttagagtcgtattaggataggattgatttgtgtggactccttccatatctgtaatccttccttgtctcctccctatactatccaacataagcatattcattgaagaacatatggagttaagactccatatcacaataccaagccaaattatgagagaatggaataatttggaaaatgaattatttggggattatatgatcacgcggcagtttttcaagaatagattgcacttacagtctgagtggctattgtaggttggagaactttcacatctcttgtcttagagtccactttcttagtcaaatatgatacagcctcagcaataacaggagacgattccattactccatctattcaaaatagtacaaaatcagttttgagttttgacattgcataaggcaatatgcatatctatggtaggtactgatatagatatactgattacctctagatggaaacaattcaaaaagaggagaatcccaacgattgcgcctatctggcttctcaaatctacttaccagatcatcgaatctgtcacaatagaaaaaactggtgagcggacaatagtacctggttatgtattgtattaaatgccagggacacatgctttgttatattcccaaggaggcaaaaataacaatggatttcatagcctataaagaatgccaagaagcaccaaaaatttgaatcagacgtgacaaactagcagcacgttccgtagggccaatattatcagttcagtttgttgcattagtttagattcttttgtcatcatattaaattggtgttaggagttggattagtaaggatcagtgagtaatgaatggggaaagcaaggattatcaatttattcacccattcctacctttcccttctatcccctgcaacccttcccccacaatactcttcttctgctctaacctgccaaagcctccctccttccatgattacccaatatgatctctagaccataatacaactacatgcaacatatctgtagtttgtggaatcaatctatagaactaaataaaaaaaactgagaaatcatgcagcatttcctcatttgaatttaataggtcaagaagatccaaaaaatatgaaatctctcacatacatattattatcatacgtgggttctcctttctcctgacgcttggtgttccattccctacaatggtccacttctgtatcacagaaaagctgaaataaaatagaagcaggaagttatcagtctgttatatgagttttcactatatcaaatggtgtaaaaatcatagtaaattgcgtattggaccacctttctatcatagcagtgttttttttcaccttgggatagcaatttttacaaaatgttgcacttaagacctacctatctaaccttcaggtcaagattcacatgcttgatcatagttggtactggtggagatggagctcaagctccgctagcttgggacatgctcgaggtcgacctcaaccttcgttaccctgccccatgcatccgtgctcaagactcattgtgcagtgttggttatgtgccccagcccccaatcaagctggtgcagccgcggatgaggaacttgggctagcatagactccatttgactagctgttggtggggcagaagtgtggagagatgagatccatatggagttagaatatcccaccatgattcattagctatgcatgcgcttgaactcaaactagagctctgccgtgccgcatcgagctcaagctggagaccgccagtgctgcactcaagctcaggcgctaacgtaggtcaagaacgtgggtggggcctgttcattggcgtggtgagcttgaaccaaaaaaggggagagagaagagaagagggggagagccagaggaagaagaccggttcaatgtgaaaaaaattgcaaagatttctggtccaaagtgaaaacaatgccctacctatctagtccaagttgcaacaatggttaaaaagagtggcccaatatgcgcttattccaggcacacacacacacacagaaaataagaaaaaaagagtccatgcaggactgctaacatgattctcagttgcaaataagcagattctcaggcacatgaattgcctttttgagggatttttgagagagagagagagagagagagctcttaatcttgggcttgatgccaggagaggattagtcacgctaccgcaaccacctaagataactgtccggacgaaacatgcctccaggactcttatccaatacttgatcatcagggcaactcaactaatcctagaaaaacatctccaaaccaaacttatctctagtccataactcaattacagcctgttgtgcacagccagtgaagcagctgccagtaggactcatgtccatgacaaatttaccgtgtgtctgagtatcgaaggaagtaagaccgaggatgcaaagaatccaagtgagatcaataaagtagtggatgccaacagatcaaaacaagatatgtggcaattccttccgtacactttactactccctccattttattatattatataagtcgttttcacttttttcaccctgccccatgcaagttttggaggaaatttaacatgaggtagaacctcatggaaaaaatcctttagtctttatctctcctcgaattcatgtgtttttcctgcagcccaatcaaacaatcattcctatgtttttctatgttttgcaatcctctgttttacatttccattcatgtcagaatcctatgcttttcttattcctccgtttttttcattcctatgattcaaagaggcctttataatatgaatggaggaagtatcttatttctctgtaaagcttattttactttgtttctcaactgtcattctaatttgtgggtcttaaccagatcaagattatcacacattatttacaaattaatattgagttagttctcttgttattgccatcaatgttatttgatcgctgattgatcctgatcaccaagggaccgaccaggaaaattaatcgtcgatcagcctcgattagtcgacctgatcagtactatgaatactagaacctatattctatatagtgcatagtataaagcaatcacagcactaataattgatggcaagatggtcacttgccctagtataaagcaaccagcagtagtagcacatattcacatgtgctaaaccctaagaattgttcaaaaggtgatcgataggtgctctgatcggacaattaattgtgcctgatcgacgattaattggaccaacaatttatgatcgagtgaatgtccctgatcggagtagtcaggagactgatcaggatgattaagcacgattaatcggacgatcagataacattgattgccatcatacatgatctttttcctccaaattggttttgtacctaacttgtagtgttaactaaaatccataccttgatgacacgtgatttttaacgctatgctagtctttgagtaaaactaatatttaaaaatctaaaagaatagaagtagacaaacaaggcagcaagcaggttaccacacagtatcttattccagatgcccgtgcaagacaccacaactcataccggtatccctgcatattataggtggaattgattatatcaaaatatggcaacacatgcacactaatatctcaaaatcatgtttcatttgaagcatcatgcgttaacaatatgccaacaaatcacagaatttactacatattacaattttcatgagaattcgcaaagcatgtagctgtttattagtaacgatagaactgacaacagaaagcaacacatatttacaaactagattgccacttaactgattcatgaaatacccatattgaaataacttgttggttggaaagcaaactttgccagttacatatttttggtattgttcaacattggcttgcgcctaacttttgcaataactaagttcagccaagtatgtcttgacatactatttgtggccacattggaagtgaggcaaattatataggaacttctcaagatctcattggtgacgcttgagcttcaagcagaaagatcaataaaaatgcactcatcacgtcctctacatggcttcagcttgcattcatttgctaccctaactatgactacaatcatacttggcaaatatttcttatttttccaacttaacgtgctaaaaaccatcccacttaggctttgttcagttaatttttgtgccaaagaaatccgcaaagtcaccagaaatgatatcgtgcttgaaaaccatcccacttaggccttgttcggttaatccccatgagg

SEQ ID NO: 834 - DNA, 595 bp, Oryza sativa
attgtactctagtcaaataaaatcacccatcctatcatttgtgaggtttcctcctattcttagaaaactatatataattcctacatttgaaaggtggaaaattaaactaaaccgcttgacatcattagaagataaattcacaattggcaatagagagattttttagtacttaagatactcccttcgtttcaaaatatttgacaccgttggctttttagcacatatttgaccgttcgtcttattaaaaaaatttgtgaaatatgtaaaactatatgtgtacataaaaaatttgtgaatcaaatgatatgaaaagaataaataattacttaaattttttgaataagatgaatgatcaaatacgtactaaaaagtcaacgatgtcaaacattttgaaatggagggagtatatagctatacatacctcacagtgttagttaagttaggaggtgtttatatctgccccagaagggatatacctactcccccacaaaaaggggaaagttaagatcatatataaaagatgagttttcaatattattctaatcggattagattagttttggtaactccctttatttagaggtatcttctgtat

SEQ ID NO: 835 - DNA, 940 bp, Oryza sativa
ttcctgtcttccatagaataggaacatatccttagttcttctcaagtacttaaggatattctttacagctatccaatgactctcacctagatctgattggtatcggcttgttgcactaagcgcatatgaaacatctagacgtgtacatagcatagcatacatgatggatccgattgccgaggcatatggaatcacactcatcttgtttcgctcatcagtcgtttgaggacactaattcttgccaagattaatgccatgtgacatcggtaagaaacctttcttagaatcttgcatgttgaatctcttcaacaccttgtcaatgtatgtactctggcttaatccaattagcctctttgatctatctccatagatccttgtgcccataatatatgctgcttcccctaagtccttcattgaaaaactatttttcaacgatgtcctaacggattcaagcaaggaatatcgttcccaatcaataatatgtcatctacatataggattagaaacaccagtgcgctcccactaatcttcttgtatacacaaggctcttctttgtttttaacaaagcccaacgtcttgactacttgtcaaaacgaatattccaactccgagatgcttgcttcaaaccatagatggatttctacaatttgcatatctttttagctaattgtggatcaacaaatcccttgggttgtgtcatgtacacatcctcatcgagatttccattgaggaaagctgttttgacatccatttgccatatctcataattgaaataggtagcaatcactaaaacaatccgaatagattttagcatggcgactagcgagaaagtttcatttgtcttaaaccttttgttaccaatcgtgccttgtagatgtgaacatttccagctacatctgtctttttcttaaagatccattttgtcacgaccggaaataac

SEQ ID NO: 836 - DNA, 1910 bp, Oryza sativa
ccacaattcgtgtgctactttccctagcagcctcacatggtcttctcgttcatcaaatggacgttaagacagcttttcttaatggagagctggatgaggagatctatatggatcagcctgatgggtttgtagttgaaggtcaagaaggcaaggtgtgcaaattgttgaagtctttgtatggtctgaaacaagctcctaagcaatggcatgagaaatttgacaaaacattgacatctgcaggcttcgcagtcaatgaggcagataaatgtgtgtactattgccatggtggaggtgagggagttattttatgcttgtatgttgatgacatactaatatttgggacaaaccttgaggtgataaatgaggttaaatcattcttgtctcaaaattttgatatgaaggatttaggagtagctgatgttatcttaaacattaagctaattagaggtgagaatgggattacactcttgcagtcccattatgtggagaagatcttgaatcgctttggctacattgatagtaagccttctccaacaccttatgatcctagcttgttgcttcgcaagaacaagagaattgctaggaatcaactagaatactcccaaatcgttggctcgttgatgtacctggctagtgcaactaggcctgatatctcctttgctgtgagcaagttgagccgatttacctctaatccgggagataatcactggtgtgcgcttgagcgagtaatgcgctatctgaaaggtactgtggaattggggcttcactatactgggtatcctgcggtactggagggttatagtgattctaactggatctctgatgtggatgagataaaagccactagtggatatgtcttcacactgggtggtggtgctgtttcatggaggtcttgcaaacagaccattttgacgaggtcaaccatggaagcagagctgacggcactggatactgctactattgaggtagaatggctgcgtgatctattaatggatctgcctattgttgaaaaaccggtgccggctatccttatgaactgtgacaatcaaacggtaattgtcaaagtgaatagttctaaggataatatgaaatcgtctagacatgtgaaaagacgattgaagtctgtcaggaaattaagaaactccggagttataacgttggattacatccaaacagctagaaacctagcagatcccttcacgaagggactatcacgaaatgtgatagacaatgcatcgaaggagatgggtttgagacccatgtgagttatactatggtggtaacccagtctatgtgatcggagatcccgtgaattagaatctgggaagaacaaaccattagtaaactagaggagagtaccaatctataccctctctaagtgaagatgcatgtactctcgtgagctgcaaggcaggttggctatgccttaatgagttctgttggctttaattagcgaagatgttgtcctgcatagcattcttgaaagaactcacctttgtgagcttgactgttggtcgcagtctatggagattttggctgaatcttctaggaagcttactatagacctaggagtatgacttatacgctccacccgaggggtagtctacaaacggtctagtaccagataagactctgagtgaaacttgcttgcataagacttgcaattcaaggcatagtccattgttcaatttgtgagtaagtgtagcttggagttctaggtggatgttcaaccttaatcggtctccatcgaaccgctggtatataaacagtacattggaaaaggcaaatctcagtgggattttgagatttggtgggggattgttggaattaatgaatgagccttagctcactcgaagattaattatttggaaaatcacaaaagcccacctcatgggatgacatgcatgtgg

SEQ ID NO: 837 - DNA, 1685 bp, Oryza sativa
atctaaaaaattcctgtaaaaatgccttagcccagttgttaagagaagaagaagttaaatggtatcaaagagcaaaaacaaaaagaatagtaggagataggaacaccaagtactaccatatgatcacgaatggaaaacacagaaagacaaagatttttcaattagaacaagaagaaggggtgattaagggagatgcacaactcaagaaatatgtcaccaattattataggggtctttttggagctccggatggaaattgtttctccatgtgtgaatctcaaaaggatgatatccctcaagtgtcaatggaggaaaatactttcttaacaaaagaatttacagaagaagaagtgaaacatgctgttttccaaatggaacataacaaagctccggggcctgatggtttcccagcggagttttatcaagtgttctgggaagtaattaaagaagacttaatggctgtctttagagattttcacagtggcgagttacccctacatagactgaattttggtatcattaccttgcttccgaagaataaagaggcaaaacagatccaacaatacaggcgcatttgcttacttaatgtaagcttcaaggtattcacaaaggtcatggcaaacagaattgctctagtagcacagaaagtcataagaccttcgcaaattgcttttttaaaaggtagaaatattatagaaggggccataattctccatgagacattgcatgagatgcataagaaaaagtcaaatggagttattctgaaactcgatttcgagaaagcttatgataaggtaaattggaattttcttcaacaagcgttgagaatgaaaggtttctcggacatttggtgcaagtggattgatcaagttgtgtcggggggtagtgtagctgtgaaggttaacgatgagataggccactttttccagacgaaaaagggtttgagacagggggatcccctctcaccaattttatttaatttggtagcggatatgcttgccattctcatcaatagggctcgagaccttgagactctaaatggagtaattcctcaattggtagacaatggtctctcaatcttgcaatatgcagatgataccatcttgtttatggaccatgatttggttaaagctaataacctaaaattggtactagctgcctttgaaaggttatcgggcttgaaaattaattttcataaaagtgagatgttttgttttgggaaagctaaggaggtggaaaaggattacaccactttgtttggttgtaagatgggtacttttccattcagatacctaggccttcctatgcatttcaaaagactgtcaaacaaagattggaaggatctagaagataaattccagaagaaactcagttgttggagaggcaagtttttgtcgtcaggaggaaagctggtgctcattaattcagtgttgagtagtctggcaacattcactagtaatatgcacgtgctaacgctacgacgatatttaccaatgtattgtaacacattttaaagaaaaatttctttcacaaaagaaatttattgtcataatatagttttgtagataattatatactttgattcttatctccatacagtgaatagcaacatgcagtatattatctgtttaaaatgtaatccccaacaatcagaattaagaaatcaaatctcaatttttcaacca

SEQ ID NO: 838 - DNA, 4074 bp, Oryza sativa
attaagctggaggatgcattacaacaaaggccatggagttaaacaggttatacaataaagcagtagttctaagaaaatgcatttagttacctccaaataaccatctgccaactccatctactacacttagccaaccgtcaataactatctgccaactccatctactacacttagccaaccgtcacaacttatgagctaaatatacattttcaccacttgtatgcaccttaagattaataaagatgatgttgtcaaaaggatagaaatatgaggtttatcttgatattgcccctgctaacaaaacaacacacggagggcaactatctgagttaacgcatatgtatagaaatattaaaaagcatattagttcctataccagtttaaggtagctatattggtaaaaacaaggtgcaaaaagaataattaatatttgagggatcagagaatcaagagaataactacataattaattagttgaaaatagctcaaattggagcggtacatgtgcagctaaaataacccatgcatggaatacctacaagcatgtgcaaacaggtacatataaagggtgcattttgtagacaatttctgctgaatgaaagccccactgatggcaaccagatgcaagattgcctgagttgaccatattaataattctaagcccagccccctccataccatcaatcaatttgtaggatatgaatagtgaatattgcacatgggttttcgaggacaacctcattttcttttgatacgagtcttatctttaatatacggagttctggttgtacactcaaaagtcgaattttatataaatatcaacatgtaacagtgatataaatttgtagtttccaatttccagtacattaacagagtggtcctcatttaactataacatcagcagcagcagtgataaactcacacatataaaacctatgaaatttcatcaccaattcagaattgcatggtaaacacgaatcccattatatacctgttctactccgtacaactaatttatatatatatacttgccctactccataccaaatttagtaattgcatgctcttagggcatataatttgtacctctatctgtccatgttcaaatgtcattactgaagatataaccaattgctaaaggggagctcttatggtataatagataatgttttttttgttttgaaatgaggcattcatgagctgcaaagaatgtgaagaaattggttcacaaaggcggcacgaaggtggtggtgcccaggcgcggttccaatccggtggtggtggatggtggcaccggcattgtcggcgaagactggaacccaggcctggcggcaggcttgttacctgcaagaagaatttcactgattagtttgcctcttgacctcttattctgattaacaggaagaaaatttgatatagacaaatcaaaatatgaactcagtttggtagatcagaaataaatcaagaaaaatcacaagcagatttcagaatattaaatccacatgaacacagattctacattaagctgcattgccctcgacattatgaattcatctatgaaattattccatgaacaaacaacacatcatatctgactttggattgtacccagcaatttaagatcaacactaaaagatgtatcacatctgagctgacttcaagggtcagtgatattgtacacatttcttttacttgtaaatgacaaatccatttttcttctagggtcactgatacttgtaaatgacaaattcatttttcttctagggtcactgatattttacacattcctttttctagatattcagaagaaagatatattaacccatgccaagttttgtttttctgaattcatttttcatccgcccgattgactcgaacaagaaaaaagagaaactgaagacctggcagttcaatcaaatatatactctccatcaatttttgtacaacgaagacctggcagaagaggaggaactgaaggaggcactcacggatcggcgggcggcgtggtcgtggtcgatggggatcggcggtggcgtggccgcggaagacgtgcgggcgacggtcgatgggatcggcgacgagggaggcggcgtcgcgagggaggggatcggtggcggcgcgcgatggaggatcggcgtgaggcgtggtcgtgctcgacggggatcgacggtggcgtggccgcggaagacgtgcgggtgacggtcgatggggattggcggcgagggaggcggcggcgcgaggccggggatggagggcggcgggtagggaatcgcgaggggaggagggcgataggaatcggtggcgctgcggagcaaattgaggggcggcgcggggcgtggagatcggcggcgagattgaggcgcgtgacgggagttacgggagaaagagagaataaagggaagaagttacgggagaaagagagagggggaggggaggccaatctgcgcgcgagggagagccggagaggtgggtgatctagatcgttggttgcagagcatatgattttggccgttggatttgtccaatgatgaatgagtatgagtaagatgagttggtgcattatagggtagatgttttttttctttgaaatccctaaaggaattttaaagaagctggatttttacagatccagatttttttggcaatgtgatgagcacaaaaagaagtataggttagctaaatggagtgtgttgtgtagacctaaggaatgtggggggttgggaatccaaaacctagaaatgcagaacaagtgtatgcttagtaaatggattttcaggttgatcaatgaagacggaatttggtaaagtttgcttaggaaaaaatatttgacaaagaaaaccattttgcaagtccaaaaaagaccaggggactcacatttttgggctagtctcatgttagccaaagagtcttttcaaaggtttggttccttctttttacaagatggctcagaagtaagattttgggaggattgttagataggagttcaatcctttgagaaggagtatcctaacctctacaatctagttagaaataaaaatgaggtggtggccaaggtaatgagtggaataccaatgtgtctttcagaagatcaatagtgggaagaaacttagaagcctggtatgagctagtgtcgaaagttgttaacactgtattgacagatcagaaagatcgcttctcttggaaaaacaataaagaaggcattttcacagtaaaatctatgtacaagttgctcatgtatgaagggctggttcctaggaagaatttcatttggaagctcaaaattccacttaaaatcaaaattttcttgtggtacctcaaggaaggggtaattctcactaaggataatctagcaaagagaaggtggaagggtagcctaagttgttgtttttgtaactctaaggaaacaatacaacacattttctttgattgctcaatggctaggtatatttggagtgcgctcctttttacatttgggattaggcaaccgtgtagcatgtctcaaatgtttgggaattggctgaattttgttgaacctaggctcaagagaatattgtttgtgggcatagctgtatttctttgggcaatttggttatataggaatgatgtggtctttaatggctccaatcctacatctttcttgcaggtcattttcatggaaacacattgggcaaggacttggtctttgcttcttaagggaaccgatgaagaaatagttaagaactattgcaaagtgctggagaagcgtgtggtgaaattcttctccgtgtatggctggaaccttagaagaagatgggaagcctagtcttttcttcgtttgttgttcttaaaacctttgtgctgtcatctcttatgtaatgggagaggtcagttgatacattttgtacccttttattagggagagtcttatgtactcgtgttcggatttttggctgtgtacaccccacaaaggtgtagaggccgggtttgataatcctttatcttaaaaaaaaatggtgacgatggcggctcagtggtcgacattggctcacggcggcgcgtggcacagctcggtggtcggcgacgacgtgtggcgcg

SEQ ID NO: 839 - DNA, 703 bp, Oryza sativa
aaatgttgtgtccaagcaaagcacaaagtttcatttggcttctcatgtaagataggcttaacagaaggaatcttctcaagagaaaagaaaatgcttatgaaaatgtagtgtccaagcaaagcacagccctgttcgggggagcttaacattctaagaagcagctggttgatagtcagcttttgagaatctggaaaagctagattttccagcttctggcttctagttcattttctggattctacaataacagcttctcagaatctggaccaaaagctggactgtttgggggagcttctgattctgggagaagctgcagtagcttaaagctcccccaaacaggcccaaagtttcatttggcttctcatgaaagataggcttaatagaaggaatcttctcaaaagaaaaaaaatgacaggctagatttcacttgtgcagttgtgctatgtcagcaccagcaagaggaaactttgcaacacctgtttttcacctgtgtccattctcacaaagatgctggaagcctggaactatatatatgtacaaaaaggacagttgacatctcagtgcaaaaagcaatccaagatctacaagataaattgcaagtcccattctttatggagattatcattctaatggcctggagcatttggattactagaaacaacaaattttcagagagattaattcttccatacagttctgtaaa

SEQ ID NO: 840 - DNA, 787 bp, Oryza sativa
agtgccgcactccgattttgtgggatcaaacgggagaacgtcaggttttcgggaccgatatcctgagggaagccgaagaaaaggtgaaaatcattcaagaaaggttgcgtgtggcccagtctcgtcataagagttatgccgacaatcgtcgtagagatctaagttttggcgaaggagattatgtgtatcttcgtgtcacgccttttcgaggagttcatcgttttcacaccaaaggaaaattggcaccgcgttttgtgggaccttataagattgccagtagaagaggagaggttgcttatcagttggagttacctcaatctttggcaggagtccataatgtgttccatgtttcgcaattgaaaaagtgtttaagggtacctaccgaggaagctaatcttgaacagatagaagtccaagaggatctgacctatattgagaaaccaatccgtattttggaaatagatgagagaagaaccacaaatcgagttatccgtttttgcaaagttcaatggagtaatcactcggaagaagaatcaacttgggaacgagaagatgaattgaagtcagctcatccgcatctgttcgccagttcttacgaatctcgaggacgagattctgtttaagggggtaggtttgtcacaccctgaaaatcctaaatatataaattgttgtttaattggaattattagaatttattttaaaagtctagaagagaagatctaattttaattaataaattccaatataaaatggggccagataaaatttcattaaatactttgcttaa

SEQ ID NO: 841 - DNA, 716 bp, Oryza sativa
ctctagaacctcgcaatcccagcccaactttcgaaggaaggccgggccccatcaggccgatagcctgctcgaaatggtgaagctccggataataaaagggataagccggcaaacatcgactgaccgccgcacttaatcccccccttccctacctccctccgacggagcgccgtctcaaaatgggcggcaccttctccaccgccttcgccatggcggtggccgccacctcccctaccattggcactgcgccattctcgtctcttactatccgcctttggcttcggcccaaaccccttctctttaatttttggctccttcttcccgtacccaagtgcttctcctgggttgaatccgtctcggaggaaggggaggaagaatgcgttgaggaggattccgaggaatccggtgccgggggggaagacgatgacggggaggacaacgacgaaaagccgcggcctgagccggtggccgcctctgggttcgagttcgcgtcggccgccggagggctacgtggagcccgccccgttcgacgagctgaccccggagtcgcccgaggacgtggcaacggcgtacgaagcgctctacgggccggcctttagcggcgagacggtcatgggcaacaacgtcttctaggtcaaggtggtggatcccgtcgacatggaccgggagcagcgccctagcgaccagttcaacgagcgggtcgagcatgtcaatcg

SEQ ID NO: 842 - DNA, 1711 bp, Oryza sativa
tcgttcaccggtgtagtttatccctagggtcttaatccaatctaacctaatccgatgtttgtctagcgtagtcgtcgtctccgtgtgttgccgccgggtggccatcgtcatctctccctctccgatcattttggtttggtgagacttctattcgtgttccttcggtttaggttttaatctctcatatgtgtcgtcgagtagccacgttgtcgctgccacaccgccgtgccgcgcttagctgctgctttagtgtgcgctagctgcctagccgccgccgcgtcgctccctgcctcagtcgtgctgttgcgccgtgccgttttgccgttgccggccaagctgctggtgttgcgatgccaccgctgccgccagcgccttgttcccatgccgtcgctggtgtgccgtgtcgcagcttgtgtgccgcttaaacctagccccccgctttagccgttgctcggtaatcaagttgtctagccgtaggtgcatccctaggttcctaccggcctatcatttgccgtaccggggctttaccgtgaatcgtgtctagcccaccggtttagccgcagctgttgttgagtcgttcgctcgttcgttcgaacgaggtgttccccgtgcttcgttcgttcgtctgtgtggagtcgtcctttagtttagagctgtccagagccgccggttccgttcgcctgtttcggtttaacatttggatgatctcgtgtcacgtagaattgactcgttgagtcggtatctcgtgaagcccgcttgccggatcgacccaagccatccgatattggtcaactcttggtcaagattaatctcagccgtcaaaaattgatataaatccgttctctcttttcagtggcatattatttctttttaatatatatcatctaccaaatataatctaatctttttccggaggttgttttaatcttttatctcagttataaatcattcgtaaatgatttaattaatttggaatagtcttttctttaataggtttaattggaattaaatcttgtaaaattcgtaactaattcatatgaagtcagaatgaggccgttcaagtctcataattcatctaaaatcatgatctacatgtttgtttactttaattgtactattcatttggtttttattagtgttttttcttgttttgcgttttaggtttagacttcccgttgtttcggaggatcattcgttcattggagaagttcctgaagacgaattgaagatgcttgtttgtaaggcaagtcacacagatcccccaaacaaccctttgagcatgttgaacatgtttaaagctattgatttatttcaacttatgcattgttttcgaatgtcattgggtggtgagcctttcccatttaattatggccgaacatgactttattttcctatgggttataatttgactagcatggaccttatatattggattggttcagctagatgttatttatagttgcttagccgtgcttagaaacattagctcattaatgggataaatcatgcttcactatcacttatggatatttaatggaagctcacgatggtcaatcgtgattggttaattaattaatttgccaaataaaacttgataaaggtgggttgtgagcacatggttttgatggtcgtgctcaaggcaattaaggaccggttcacgagtttcggttgtgaaacattaaccgtgccaactacaagccagcgtgggcaa

SEQ ID NO: 843 - DNA, 2792 bp, Oryza sativa
aaccctagccgctgacgcaataattcccttttccttttcaaaaataattcattattgcgtcataattcaattaaaatccatataagtgttttaatccgatttaatctttaaaaattcataactaattcatcttagctcggatttagttggttcaagtctctaaatttttctaaaattgagatctacatgttaaaaatatccacatgtactgtttatgcttgtttatgtgctgttttggtgattttgctcttttctgcttagattccgacgtttccggagagtccgttttcgcaggagaagaatttgaagagttccaaggccagcaaggcaagtcacacagatcccaaacaaccctttgagcatgttgatcccgattaaagctattgtttctattcaactattgcatttattttcgaatgtcattgggtggaattaacctattgtttgttatagcccttttgttcttgattactttattccttgataccttgggttattataacttgactagttgggctttatatattggttcagctagatattagatatgaatgcttagccatgcttagaaacattagcacactattgggataacttatgattcactattaattatttaatgaggacttaatgatagttcacgatggtcaatcgtgattggttaattaattacttgccaattaaaacctgataatggtgggtttgtgagcacatggttttgagagtcgtgctcatgacaattaaggaccggttcacgagtttcggttgtgaaacattaaccgtgccaaccacaagccagcgtgggcaacggctttaccttttgtatagcatggtttattgcggggcaccagactgagaagtggcggagataagcccacgggggtcgctggggagtccatgccttgtttataagggggtgattatgatccaggaatggtgcgctgcggtggattgtgttatgcaaggggtattgtcacagctcctttccgaggtaccgtggtggtattgaggcacatggtgacatgatgtggggctgtgtcttgtgggtacagtggtacacctctgatcagagtaaaactattcgaataaccgtgcccgcggttatgggcgggtctaacaatgtctttcgtgattagtctcacacctctcatcataataaaagatgctataactggtaataatttgtttagctcctggtttggaatggtatattcctggtttggagatagatctgtacagccgggtatggttgttcagaatggttgggcctgtgcagcatgggtatgttgtacaatgttgattaatattgatgattaattgctctactgtttcacaattctcaaatgtttgctaaatgctgcttttgcaaataagccctatattatgtcattctttggtatccttgtgcacttgcatatttgctgtgtggcttgctgagtatgtcatatgctcaccttgcaataatcaatcaaacctcagttgaagacaagttgcgatggagaagacgtttggcttataccccagttgagctgcctatgggagtggagccagagcttcgctagattttatttttccgctgcagttttcttcgtggtgaggactaagtgcctcttatgtaaatatttattgctttagttattttgatgaatctgtatattaaactgtcagttggtgtacctcggctgattcctggacgaggatttcatacacaaattagttcggaaattactagtgaatttccgggcgtgacagcagcaaaggaggctgtttggataaagaaatttgtttctcaactaggtgtgatgactagtgcttctagccctatggacctctattgcgataatagtggtgccgttgcacaagccaaaaagcctagatcgcatcaaaagtccaagcacattttacggcgttatcacctcattcgcgagatagtgggtagaggagatgtgaagatatgcaaaatacatacggatttgaatgttgcagatccgttgacaaagccactccctcagcctaagaatgaggcacaaactagggcaatgggtataagattcattcatgattggctcgagtgcaagtgggagactgttagtgatatgccctagaggcaattatagagatgattgtatcacatactatgtttacatatttatccgacattgttccttgaaatagatagctcattattggttaatgaatatgtgattcgtttatgagactctatatgttttttgttactatttctaaaggatctctgatcaaatatcatatgtggaacaaatatgtttatatgatcagcatatgtattaattgatgatcatgtctcatggatcatggtatagagataccaaattaataatgtggacacatgttaatgaacatgttgttgaatagacccaacatgagacactgcaagagatatatgtgtcgtgtcatcaatgatctcatttagtgttggtgttgaatccttagacctgagatataatctatcaagttatataatctatcaacaggttcgagtgaatgattgagctattagaggatggcacatatctagccttgagcttaatcgatatcgtgaggcaaaggggttcacacaagtatacactagaggttcagccgatatgatctttatgtatgcccgatgggtcaatacgttctgctaggggtcactgttgacacgtggactgaaaaggagttttcgggttataaccgagtatacatgaacctacagggtcgcacgcttaacgggccggaataagaggattggatggatatccaatatgagctta

SEQ ID NO: 844 - DNA, 679 bp, Oryza sativa
  unsure (1)..(679): unsure at all n locations
aggtctccgggtcactctggtaatgactgcccgtaaacccgtgaggagccnatgtacatggccaacaacatcatcgggtatcgtccacaagaaggtcaggggtggaaccactcacgcctatatcatcaaggaggtaacatcatcgatccagagaagaccatgccgcaggagtactgacacacgattgctgtcgtttcctcaatggagtaggaaaccgtcagtgaacgagcaattcgctcgttttgttgaagtaatccagaaaatccacatcaacgtgccgttgttgtatgctatgcaagtgccaacatatgcccgttaacaaaagtacatactgaccaacaagagaccgctcccaacatcggaggtagtcaagctgacggagcaatgcagcaacttggtactccacaagctcccagagaagatcaaagatccgggatgtcttacgatcacttgcttgatcagggtacaacagttcgaccaggccttgtgcgatcttggagccagcgtcagcgtcatgctaaaggacgtctttgacaagctcaacttcacgtgtgttggcaccaacaccgatgcgtctacaactggatgactcgtcagtccgttacccggcagggataccgaaagatgtgccagtcaagatacgggatttcttcatcctggttgatttcgtggtactaga

SEQ ID NO: 845 - DNA, 4829 bp, Oryza sativa
ccattctcacttcacacacacacctcaagcaagagctctctcatttctctcaagcttattttattagtatctaggataaactctgtaaccacaatataccaggagtatttctacgtcattgttgagtattatatttctagtaatgtcgttaagaaataccaacaagcatttctggcgccgttgccggggaagattcataatagagattacatgaactaatactttatatttacctctgtataatcattttcctttgcaggcttaccttggttgttttcgcttttgttgtgaaaacagggtagtgcacgactggtttcaacttgacggaaaacttcaaagaaaatctagaagctttcttccggtgcgtcaggccgcgagtcgttgctccacagaaaactctaccgacaaagaaaccagtcgtaccagcgccaccaaccttcaagactatggctgacaagacccttcgcgagtttgctgctccctctgctgacaatgtggccattgggccacaaatcaacatgggagacgtggatttcgacttgaagtccagcctcatcatgatggcgaaggctagcccattctgtggcaagcctaacaaggatgccaatgctcatctgcagcagttcctggagatctgtagcacgtacaccatcaagggtgtcactccagacgccgttaggctaaggctgttttcattctcccttctcgggagagcgaagcagtggttctatgccaaccgtgctgctgtcaacacttgggacaaatgttctacggcattcctcttgaaattcttcccgataggcaaaaccaatgcccttcgtggaaggatttccagtttccagcagacgagggacgagtttattccgaaagcatgggaacgactgcaggagtatgtggccgcctatgcctgtcctcatcatgggatggacgactgactgatcctgcagaacttttacaatggactcaccccgatgtcccgtgatcacatcgacgcgacagctggaggagcattcttctctaaaacggttcgaggagccgttgattttaatagataagatggtgtccaatatgggttggagcgaggaacgactccagatccgttagcgaggcatgcacaccgtgaaggagtcggaattacttgctgccaagctggacctcctcatgaaacgcttggacgaccacgagaaacgaccacaaggcaccattaaggccttggactcacacgttacgtgtgaggtctgcgggtcactctgggaatgactgcccgtaaacccgtgaggaggcgatgtacatgggcaacaacaacaacgggtatcgtccacaaggaggtcaggggtggaaccaaccacgcctatatcatcaaggaggtaacaacaacgatccagagaagaccatgccgcaggagtactgacacacgattgctgtcgtttcctcaatggagtaggaaaccgtcagtggacgagcaattcgctcgttttgttgaagtaatccagaaaatccacatcaacgtgccgttgttggatgctatgcaagtgccaacatatgcccgttaacaaaaggacatactgaacaacaagagaccgctcccaacaacggaggtagtcaagctgacggagcaatgcagcaacttggtactccacaagctcccagagaagaacaaagatccgggatgtcctacgatcacctgcttgatcagggtacaacagttcgaccaggccttgtgcgatcttggagccagcgtcagcgtcatgctaaaggacgtctttgacaagctcaacttcacggtgttggcaccaacaccgatgcgtctacaactggctgactcgtcagtccgttacccggcagggatagtggaagatgtgccagtcaagatacgggatttcttcatcctggttgatttcgtggtactagacatggacacgggaaaagagacgccgttcatcctgaggcgcccgttccttagcaccgcgggagtcaatattgacgtgggaacggggagtgttcatttccatatcaacgggaaggaggaaaagtttgagttccagccaaggacggaacaatgctccatggtcaaaataaagtacgggccgaacccacagaatattcaagtggtcgaagtggagccacccaagacggacagcctggtgaagttcatgcagaatttcctggagaagaaaacaacgatgcccaggaaccgttataggaagacaccggtaaaagcaagtacaccggccaagaagctagagcagctggctcaaaggaagccgccgtccgcaccaaagccaaggaaggtgtggaaggaaaagccaaagacgcccgctccatcacctccgaagacgggtggaaaatccatgaactgaatcagaaggaggtacaatcttgcacgtcgaactttaaatgacgcgaccttcgccaataggtaaattggtatgtatccgcatatttattttcaacaatttaattcttgcatcaatacatgtttgaatttcaaaattgcatttaggatttttgaattttcaggaaattcttcaaatgattttttcagagcaagccaaaataaaattttcagcgaaaattcactgtgccataaccacactaaccgttggaatccaacggccgaaagtggggccggttgggcccaccaggggttcggccgaacccactggttcgaccgaacccgaacccactggttcgaccgaaccagccaggcaacggttacctgccacttttggcagggtaacggctagtgggtcccacatgccatttctgaccgttgtgggtaccctataaaagccagccggccaagagagggaattccaccccatttcaacacattttcattccctctccaaagtttgttctcaagttcattcaagctttgataatttccctcaaattcaaacgcttagttgcatatatacaagttgctttggtgaaactaaccggcgggtgaaactcttgctattctaacccccgccgagttagtccgttcttattccattgtgcagaatgaggaggtgattgtctcgtctgttcaaggggtccggctcttcatcaagtcatcatgacgagtctagtactcgttcatcagctattgtctcaatggaagacgccgaagctccgcgacgactcctgaacgacaccgatctcgaccttgtcggtgatcgggagagacaagcctactacatgctgagcgaccgggagtatgctaacacgcgagaatactctccggagctgctgaaaaagataggtatggatgttgaattttgtgctatttggaaagctgttggttggcagaaatttgttgtagtagatgagcctagttctcgtttgcttactttgcaatttctgtgcactttgaaagaaatagaagatggaatttcctttcgctttttccataaggagtatacacttacatggaaaggcttaagtacacttcttggttttcacgtatcctgtaaaatcgatctttagaaaggaatttctggattcgagaaaaataggtcttgggaagatatttctagtgctccaatttgcaagaaacctaggacgaatgatatccataatcctacacttaggcttatacacaaatggattgctatgacttggtttcctagaggtgatcttagacccattagggaggatgaattgattatcatgtttgccatggttagaaagatcaaaattgttcctatgaaatatatgataaggcaatggttagaaagtataaagttctctgctcctgttgagtgcacttctctgattactcggatagcaaaagggctaggggtcgttagcgaccaaattgcttttatctcagccactcgtccctgtattgatgagacctatctagtgcaagggcatattgtgaagcatggaataaatggatctttgatttactttttccccggttgtacaaatgaaatcccattgccaaatgcggggtatcatttgtacaactgccatgaactaaccattcccctgcagaccatagaagaatctcgtgcaggtggagcatacagggagacgcgcaacatgacaaggaacgaaagagaaagttcatcatcctaacacccgtgcagatgtatgaggcaggttgggagtcaactagggatgcacccggatggatccaagctccacgccacagcatcggagtctcaagctgggcgagtgctagtaaggcccggtggcgtgcgcctcatgacatacattcgggggacgaccaaccttccagatcaagtgacggaggagatccagtacaacctcatggaacacatcgctcaaacgcaagaatggcaacaatctgttaatgctcagttcgccagcatcaacaacatgatgcagcaacaacacgatgaccttcaagcgtacttccgctttcaagggtttaatccttatcaaggaccctgagcgaaagctaagcttggggggagagacatctgtatcacattgcatatttccctttccaattgcatatttgctttccaattgcatcttataaaacttgaaaacaacataaaaatttgcaaaatagaaaataccaaaaagataggataggtttgagtcatgctaggtaagacaagctagttctctttgttgaaatgatggatagttgctctgttttatatctcttatatattggttcataggtaagtgctctctcaaaggttaaatataagtagccaacaattatctgggaacctgaggtaaatgagctgcacttgctgatctgagtctaagttattgtaagatatgagatggtaaataagagttctatgatcttgatactagtttggcttgaattccggatgttttgtttttcaatgata

SEQ ID NO: 846 - DNA, 1260 bp, Oryza sativa
ccctagcgacgagttcagcgagcgggtcgtgcaggtcaatcgcgtcaccaaggtcgtcaagggcgggaggcagttatccttccgtgcgatcgtcgtcgtcgccgacatgaagggccacgtcggtgtgggcgttggcaaggccaaggaggtcaccaaggccatcaccaagcccgccatgaacggccgtcgcaatctagtcaccgtgccgctcaccaagtattcgaccttcccgcataggtaggtgacatcccttgctttattcctaattttgcatacgaggttatcatgtggatgctcttatacccatcgacccactagtttcaacttaatgtgcaaacagccggccgactagtactaattaatactacaagaaatgagttccatggaaactaaaacataagatactgtaaggatcgtgatttgttaatgatattgtttattagttgttactactagtttttgtggttttagccagcacagcaatttgtaacctgatttgctattatgcccaaatggtgtattcttattttctgttttacacagaggcactgataatttgcacaacagttcatggttgatagtgaaattggtagtatgcatcttcccttcgggcaggcattgcactcctatgaacaaatattttgtagaagatatcaaaatcgaaagtacaaaagattcagacttaatcttgtgccacactgtcacctacttcctccatccaaaaaaaattcaacctaggtgtggatgtgacccctccagattcgttgtactagaaggggtcacatccaattctaggttgagtacttgagtttttttgggacggagtacttatctgcattttcatggatatatgtattttgaatgctcctcctgtttgcatgagctaatgtgcaattatatttttcatcaaaatgtacctggattatcataaattgtggtgtcgtggtagatacctgacattgatggagtgattcttgacaaaggcatttgtagctcgtagtaagtgtgatcgagaacacattttcaactgcaagggttgttttatttaaattatgttaattgtactaaaattcaattcggactttaaagaataaagtgttgttaaaactcaggtgcatactagcgactctggtttttgaacattgatacgattgaatttttagcgaagtgctacaattgaatctggactgatgtgttctattctcatgctgattgtatggttacgtagttgtctgaaagctagttgataatcataaaaca

SEQ ID NO: 847 - DNA, 832 bp, Oryza sativa
tgtgagagtcttcagtttgtaataatgaaactcacttaagatcaataaaagttaaattaattctctgtcctaagtagttttccccggtttctcttcttgtgctctgtccatgccagatggtgctcactcgcagcaacgggaatggccccaacaacaacaacaataacaataacaacaacaatggagagaatcccacacttgcccaagtcctggctcaacaggcacagcttatgaacatgatgatgcagcaactccagaaccagcagaaccagggaaataaccatgcacctccccagaacaagttagccgaatttcttcgtgtgaggccgcccattttctccagtaccactaatcctgttgaagctggtgattggctgcatgtcatagagaagaagttggatttgcttcagtgcactgatcaggagaaggtctcatttgcatcacaccagttgcatggccctgcctctgaatggtgggatcacttccgcctgaatcggactactgctgaacctatcacttggcttgaattcaccgctgctttccggaagacgcatataccattgggagtggtgtctctcaaaaagagggaattcaggtcgctcactcaggggtctcgctctgttacggagtatctgcacgagttcaatcgtctggctcgttatgctccggaagaggtacgcactgatgaagagcgccaggagaaggccttaatgatgagctttcttatccacttatgactggagattatcctgatttccagaagttagtggataaggctattcgccaggaggccaagtacacccgcatggagcaaaagaaacgccggattgct

SEQ ID NO: 848 - DNA, 4558 bp, Oryza sativa
ttttatccctctccttaatacctgtgcccaactctgaaagtcattatatttggatggagggaatatttcttttgctgaagaagacaggaacatctctgagagagtgtttaagtctagggacatactagagctggataactgagtatatggaaccagtaaacccacgagtggtgttttgcatcaggaaggcatggaccttgggaacaaggatcagtggcaaatccagggggcaaaaggaggtctggcctctcccagcatgttgcttccccagcctggcctggcgaaaccattagatctctaaagctctaatgcaacccgcgggatatttaccaattattttcgtaatcattgtcactcggcaagtcgacccccctcatatctaaatcctggcttctccactgacagggatgccaagctccttgtcagtggcagtgcagagtggattggatttgaggagagcatgcagaggggattagattgtgcatggaggtgaatatggaaatgaaaattcgaagtttgacacagccttgaggtctcttcttcctctctcctaccatttgtatttggtatgactgttttgcagaaggaagaatagaaaaataggaaatgcaagtgatattcaggttaagaagttgaaagaatggaaagggaaattcaatttagtccaatgtggcacttcttagaccaaaccaatcaaggagttgcattttttcaattagcttttgggattggcaaatcctagagtccccatctaaagcatatgatcagttatcccagttctattatggtgttttgttttgtgctatgagatgtctaattttgttactgacattaggcagatgacaaaccgctgatgtggcctgtactttttggatatggcaagacctttttaaaaatatcagaactttagttttgtatgttgtatccttttgtttggaaaataactcttcccaatctatttcttcctgcatttggctaataaacatgtgatgcttaaaagcttggccgtacatttaattgttctgatctttgaagattaataaaaaaaattctttggcggagcaattttataggtgttcttcctgtgatggtatcaataattggaatttctaacactcaaatcttgtgcatatgagcatatcgacaataattgtgcatctcctatctttctggcagttatgtctatctacaataattgcaattctgagtattatttcatcttggtttgtcctgcacaacaagcagagcagatgcagactatggagcagccagggtcatgttgaggcctgcttgccctggatctggtgtaattgcaggtggagctgtgagggtcgtgctggagatggctggggttgaaaatgctctggggaaacagctgaggagcaagaaccccctcaacaatgcaagagctaccatctaggcgacccaaattatgaggcagttcaaagatgttgctgcagagcgcgggcttccaatggagcagctatggaaataatcaaataaataaaccttaaattgcctccaatattgttctgttctccatttcttgagatcattttcagttgtatctgtcagtggggataatcctacatttaagtcctctccccaccctaaatgcattatgtgtctccacatatacatggcaaagctttagatgaattgatctgcgaatacctttagcttcactagtaatagtgcatgtgcaagacacgttccgcacgtataaatgcgagtttattatgttttcccactatgcatattaaacagaccatataaatgtgaagtttaatatgccacatatctctctgtttacaatttgtcgtataaacggaaaacaatcaatgataccaaaaatacaatttgttatagtttgataaatgtttggcataatatgaagtgtataattgcagagaggagagagagagagagagagagagagagagagagagagagagagagagagtttttttatgtaagttatagcttccttggtcacctggttatgatgtgcatatgtggcttgatgacattgcttgccgataagaaaaccctgaaaaacaccaaatagaatgggagaaaaagcaaaaagaattactcgcagaaagtatcggcaagcactaccactataataaaaaagcattatattctttttataatgatgcatttagcataattagttactactcttgtctaggtagcacacaaattaaactgagtcatgtcgcaccaaacctgtcagatcagttatttttcataatctataccacaagatttcagcattatcttgctgctatcgtttttaattttggtgctacatctacgcctattgtaaagaaaaataatgaactgacttaaaaggaaaccaacctacactaaatctgacacaaaggagccatgaaatgttgtgtcaaaaaatataatatgaatatttgttggaattattttctggaaagatagtgctctatagctctatctgccctaaaagactacatttttttcttgaacctttatgttcataaacaatgttttagctaatctttattaaggcaaattattatagtttcagcataatttcagcagcaacgtcttggataggaaattgtattgcatgtatctatactgggcttcaaaatgcaggataaaaataggatgggatctacatattttataaatagattctcactgtttatcatgggattacatggagtcgtaccgacaatttttaattcagatgttagggctctcggttgtcaacgtaagcaatattattcttccctcacaataatatctccagaagcttctgaaacctgaaaaagacatattggtttgcataaacaaccactgagaaaaggaaatgctttgcagagctagtaccaagaaaaataaaattaaaagttgccatcagtaacttaagaaacaagagctttatttgataaaaggcagatacatccagcaccaaccgtctatcaaagccaagatctgtagcagcattttgtaataatgaaaattttacatatacacaaattgtggttccatgttgtttctaataaaaagtattcagatcagcttaaacatatatgcctattgagatgcagttaacaacagaattcacaattatttcagtagcattgatatggaggattataggacactccgaggaaattaacaaagtacgtcgcaggaagaagttctgtacaatgagcatatttgtatctcaagaagcttcctaataagcaaaattcaagggaactcaatggtgttcctgacctggaaactcaatcatgtgtcaaattgataggagaaacaatgcaggtccaaactgaatgaaacttgctatacaaattgatctatgtaggcaggggaaatactacatccaacactcttgcatgaatatgtcagtcatgcaagttcacatacaaagaatcatgaaagttctaccagtttttaatatgcttggtgagcccttgggttactaagggagacaatgctagcggttcagccgaacgaaaggaggttctttgagcccttaggtcagggtcagatcgagcaggactaaccagttaagttgtacgaagtgtcaacaaccaaatttggtaatttcagtatcagagatggagataaagtcgaagcggaatccaagatggagatcgttccgcaaacagaggaaggatcggctaaagtccgaattggctgtgaccgggatcggcagagtctgaattggacaaggttagctgatcgagccgagtccgacaatatggtgcggtacacgttgttctttttgagttaatgtgcttcatgaggattgccatgcacggattgagtcgtgagaaggcaattgtatctattaattaggatatttcatgtaatttccttagagatatgtttgggcaaaagtctgccgcaaagacttatggtatctaatagtttgttagagataagagtcgtttccgacacggacatattttgtaatctcgggtataaatagaccccgagcctcatgtaatacaacaacacacgttcaatacaatctcggcgcattgccacccctttactttcgttttgtttcgacaagttcttgctttcgggttgagctgcatcggtttcgatcttcaactagaggtaaaacttgttatggaggcttgcgttatcgggattagtgcttccatatttatgatactctaatcttgttcatgtaattcgtcgagttatcatatattctatataatctttggcaatattgttatctaacctctaatcggctaacatctgttacttgaaggcagccgatcaggttaaatactgacgttggcttagattatataggatatccaccactctatgaaacatccagcggcttgattatctagatgttgtccttcttttcatacttatagctgcatcagttgagtttgaccttataagtcgtgattagaatcacgatctctagcctgctttctggttgccgattagggtagtatcggggtttcagccaatcttacctgatttagctttatgttccatatgcttaactgatatgctagatctgccctttatgtta

SEQ ID NO: 849 - DNA, 670 bp, Oryza sativa
caagttctctttgtaggtttggtctaaaaaccttccattccacccacaaggatgggtgtttatccgtatttgtttaacaagcttcgcttggcgggtttgaccttctaaacccatattgaccaggggatttccttaaggttaaggtggttggcaactgcatattacgggaaagatttaaggttattcgggaacgtgtggcggcgtgccaaaaaagggcataaacagcagggggtcaaggttgtcacgcgtgggcgacagggcgaggcacctcatagcaagcagtaactccggcttggagccgtcctcctgcccgaaaatgaatgacatgccaaactcctatcggtgggtgaggtgctggagagagaaagaagagaggggagttttggaggaaaaagatatgtagtcacttatatgtgccacacttacattgttttaattacttcgattattggacagcatctggacgccacgtgagctaaaaaggctctcaaatatttgagggagtcgaaatggacgtttttcctattttgttgagttggggaatggcaatcccactggcaaaacaaggcggaaaaagtacaccgaaggtccctcaacttgtcattgaattgcataatcgtccttaaactgcaaagctggatacaacatgtcctccaacttataaaacaag

SEQ ID NO: 850 - DNA, 696 bp, Oryza sativa
ctttgttcatgccatgattattgtcttaatattttagattaaaatatgtcagtatatgactatattgtcaacaactgacaccgatggctttggtaagacctagcatctggcactactgcatctccctgcatactcgctccatgtccatcaccgcaaggtgctccttagcgaacacagccgatggtgggccttctggaactccaaggctcaccggaaagtgaaccaggtacaagtcgatgtactccacttgcaaattcctacatacatgaaccattgctcaaaccaactacgaaaatgcctgcctttatcaattgtcaaacatatatatgaacatactccctccttccctaaatgtttaacgctgttgacttttttaaacatgtttgaccgttcgtcttattcaaaaacttttgtgaaatgtgtaaaactatatgtatatataaaagtatatttaacaataaatcaaatgataggaaaataattgtgacatccccgcccagagcttaataggattaatagaatactacaacttctttttcggaagccgatctcagaagaactctaaggttaagcgtgcttggcctggagcaatttcgggatgagtgaccgaccgggaaattcttagcgggtgcacgagtgaggacaaagtgtgcagaaaagatttgtgttggtctgcgagggctttctatgacctat

SEQ ID NO: 851 - DNA, 695 bp, Oryza sativa
caggtcgactctagaggatccccttttttgtcatgctttttttggctttgtacaaccttggtcgatgtagaggctaggagtttatcacttcctatatgtatgaaaaagtgaaactatgtgtgtgtaggtaattttgaaatgaattctaacatgtatatatatgaaacattttgcaattgtagtgcaggtatgcctaagatgggtgtatgagtgtatgagcaaggtgactgcataatcgtcaagagcttcaatgagaggaggttgcgagagaatctaggtatctttgattgggagctcactgatgttgatcgccacaagataagcaccctcccggagtcaaggggatgccttgattttttcgtccatgaatccggagtcaaggggatggtgagatcactggtgacaactaaaaaccttaattgttcttgatcaatattatgctggtccaaccaattatgtgttgagaagatcacctctggtacatgttaagaacaggcaatggtacatcgttgaaggtttgtaacatgaaccaatattcatacatcactaacagtgatactatgtactccatccgttttatattataagactttctagcattacccatatttatatagatgttagtgaatctataaatatatatctatatgaatgttgtcaatgtttgaaagtcttataatatgaaacggtttaaa

SEQ ID NO: 852 - DNA, 535 bp, Oryza sativa
ctatagggcgaattcgagctcggtacccatactagtggatggaggtgccgcggtgaacttgatgccgtactcattattcaagaagttggggcgtgaggatgatgagttgaagaagaccaacatgattctcaatggtttcaatggtgaaccaacggaggcaaagggtatcttttcggcagagctcaccgtgggaaacaagacgctaccaaccgctttcttcatcgtcgatgtgcaaggtaactacaatgttattttgggtcgttgttggattcatgccaattgttgtgtgccttctaccttgcatcaatgtttaattcaatgggacggcgatgatgttgaaattattcaagcggatacatcggccgaggttgcaatggccgatgctacttttgagtggcgccatgggaatatccaatgcttatcggggagggatctttctagctacgattttattagtatctccgatggcaaatttgtatctatctctgtaaagccggctagtatagcacgactaagccatataaatttgtataat

SEQ ID NO: 853 - DNA, 3260 bp, Oryza sativa
agatcgttgccgatcatacaatagatcttggcttgtcgggttattttctcggcctctgcatcgtcctcgggcaactcgtcggtactcaggaacttgatgagcggggtccgccagtcctctgtggtctcgatgtcggcaatgacgtgttctgcccctatagcccccgagctaatgtcggggacaactgtgctatcttcgtcatttgctttttcactgatggctttgtcaagacgtccagaaaagtaccaggttcgagtggctctcgtctagacgcacgccgtgctaggtcgtttggttcaatgttgtccttgcgatatacgtgccggacctcgatcccatcaaaccttttctctagcttcctgacttctgcgaggtacttggataactcggggctagagcacttgtagtctttgtgcacctggttcgcgactagttctgaatcccctttcacgattaatcgcttgactcctagtgcggctgctgctcttatcccgatgagtagtccttcgtactcggctgtgttgttggtcgccctgaagttgaggtgaattgcatgcttgaactgatctcccgaaggtgatgtcaagatgaaccctgtccctgctccttggctattgaatgcgccatcgaacgccattgtccatgtctcgctgtcggtctgactgtctgacctgttgtcgagcatagtccagtcagctacgaaatcggcgaggacctgggacttaatagttgttcgtggcacaaagtgaacgtcaaattggcttagctcgactacccattttgcaatgcagccgacgacgtctctgtttctcacgacttctccgagggggaaggaggaaacaactgtgactctgtgggcttggaagtagtggcgtagctttcttgatgtcatgattactgcataaagcagcttttgaatctgtgagtatcttgtctttgcgtcgtggagagcttcgctgacatagtaaactggtctttgcaccttctctctcttgacaacaatgacggtactcacagaatatggtgtggcgacaatatagaggaataattcttcattaggttggggagcaacaagtacagggggatttgacaggtagcatttgagcgcgatgaacacgtcttcggcttcctgtgtccacacaaatttgtcttgtttcttcagcagagcgaagaaaggttgtcctcgctctcccatcctagcgacgaatctgctcagtgccgccatgcatccagttagcttctggacttccttgagtcttgtgggcgactttatgttctcgattgccttgatcttctcgggatttgcttcgatccctcttccggagacgaggaatccgaggagcttgcccgatggtcctccgaacatgcacttctccgggttgagcatgaggcgatattgtcagaggttgtcgaacgtttcctggaggtcatcaatcaatgagtcgcttgtctttgtcttcacaacaatgtcgtcaacgtaggcctcgacattgtgtccaagttggtcattaagtgccccttggaccgtgcgctggaaggtatttcccgcggttatcagcccaaacggcattttgatgtagcagaatacaccgaatggcatgatgaatgttgtcttctcctcgtcctcttttaccatgctgatctggtggtagccggagtaagcgtcaagaaagcttaacaactcacatccggctattgagtccaccaattggtgtattcgaggaagaggaaaatgatccttaggacactccttgttaagatcggtgaaatcgacacacatcctccacttctcgttggccttacgcaccatgattggattggctagccactctgggtggaggacttctcggatgaaaccagctttgagaagcttgtcgagctcttctcatatggctcatttccgatctgatgcgaatctccgcagtttttcctttactagcttggcatcggggtcgcaccatgagtttgtgctcaatcacctccctggggacccccggcatgtcggacagctgccaagcaaacacgtctgcattgtcgcggaggaaggtgatgagcgcgagttcctatttctcatccagtgacgccccgatcttaacagtcctatcggggttggcactggagagcagaacgatcttgattgcgctgtctggcttcgacgtcttgttggttttgttcactttcttgggtggctcagctatggcgggcgggttgggagcatgctcgaccatgtcgaggctccatttgtcgcactgcaccgccagcttcgcgttttcctgaatagtgattgttctcttcggcccaggcatcttgagcacttgatacgcatagtgagatgcggccatgaacttcgcgagtgcagtcctcccgatgatggcattatatgttgtgtcaaactcagcgacatcaaaggtgatctgctccgttcggaagttgtttgcttggccaaaagtcacaggtagcgtaatcttgcccagtggcttggacgatgagtgaggagtaattccgtggaagggttgatcagtgggcgtcaactcacttcgtggggtccccatcgcgtccaaggtgctggtgaagagtaggttaatggagttgcctccgtcgatgagaacccgtgcggaataaatgtgcttagggacgtcctagggttgccctagggcgcacaccccttgggctaagcccacgacacaattacaaggcccaaaactcaaaatcagattcggactagatgagatatgtgtcttgttttgctgattgtcggcagctcggtaggaattttgacatgggaccaaaaccatatgaaagtagacttcataatctttccaacaagtgctcatgggcctctaaattccttctagatcagcggctagatccgtttgaagttgatgctatcaggaggcccgaatccgaatccaaaacgtgtacaacttgatctcttgtcttctatgggctaaaagtgacatggtgagatgaaagaagacttggagaaggtcttggtttggtccccaatcaatttcttcaatcatccatgcattccttacgctcagtctcttttctttcacccaagcaagtacctctgcaaacgaaaacacacaaaactcattgtgttgcaacatttgttcaaacatataacaagtaaatctaatatcacaaatcacaaatcaccacccaaatccttgttaattatcttgcaggcatgcagcccctgctcacctccccacctcgccgcatcaaagggtaccgagctcgaattcgccctatag

SEQ ID NO: 854 - DNA, 2737 bp, Oryza sativa
cgagctcggtaccctttggttgattaatacataaagtagccatggttatatccaagctagttgtgtcctcatcatcctctccttcttgattggaaaccatcctcggtttcaccttgtcatggagcgtattacacttatctttgtctatcacaacatcctgcgcggaacatttcttgatggccatatgattggatcctagaatctttgtagtcgaaaaaccacaacactccccttcttgcaaaccaacctgtaactcatttaaacaactagaggaactagatagagaattacttatatgcatgcggtcctctagataatacatttcatcatgaaaaggaggtatagtcaaattcgaacaaatatatactcgatgcacattatattctcctttactatcataattgccaataatatgaaaaatcacatcagaaggacatggcaattcaaatctagcaaataatttcttctttagacagttgagtggacaaatatcatcaaattgaatataaccccaagtatttaaagaagatagcaatttaagctcttcattctcactagcaatgtgaataacatgtttaaactgaacacatggtggctctactatagaactaacatgttcattcactagttgtggcatggatataagtgaagcatcgcacaacacttctttatcacaagaaacatcaaggaaattgttttgtgacaaaggtatttcaacaattgtttccaccgtgggttgctctaatgtagcataagtagtggacatagttggcacctcataaatatgcataccttaagtagctgtagcaccattatcattaccttttttctcatcttcagaaattataggtgcttggttaattaaacattcttcaagcatgcatggagctaaagataggtctttttcctcttcgtctttcttctctttcccattaccttgtttattctcagatgcctgcaaaatattagtatccaaaacaataggcacaacattacgttcattttgtaataacttagacttagttgaaggcatcataatagtatctttcctggtatctctgaaaatctcatcgattctatttttcgtcctttcaatactatctttgaaaatttcctcgattccattcttcatcctttcaagattatcttcgaaaatttcagtaaaactcataggtaccaatttcattttccgaccattatgtttaaatgtgtatgtattagcaacaaaattatgcgatccattattatcatatacccatggttgacctaacaacaaagaacatgcttgcatagggacaagatcaaaattggcagtatcatggtaatttccaatcgaaaagtttattctcacaattctatttaccttgaacttaccacaagagttgaaccatttgatgtaatatggatgaggatgcggttgtgtaggcaactcaagtttctcaaccaaatctgaactcaccaagttattgcaactctcactatcgattatagtacgacatgctctatccttaaccacaaactttgtttcaaataattcatggtactgccattgctccgctttctccatttgagaacttagcaaggtaaatctaatatagaacatatgcacttttggttgattaatacataaagtagccatggttatatccgagttagttgtgtcctcatcacttctccaacgccagttgcttcgtgagtgcctttttgaagacgaaacaagtctcgagagagtgcttgtccgactcgtgtatcgggcaccatatttgcttcgtgtcgtcaccttgtgggtctaggtgcttgggtgggtcagcatattctgctgtgaggacctctgtttgagctttccttttcctactcctgcgactcttcctcttgcttgcctcaggtgcatccttggctggtttcttctctccccctgtcttcggcttgtcgttcttgcgtctcagggcgtcgtccgcgtgagtgcattgatcgacaatctcgaataacttacgagcagtcgtgatccatcttgtcgccaactcctgggtagtgtagcgatctcgaacatcagacttgaaagcgcggattacggaagcatcggtgatctcggggatcgtatttctgcactcattaaagcgccgaatatagtccctcaatgattcgcccggattctgcttcaacgcgtgtaggtcgtcttcgatcgcgtggcgcttgtatgttccttggaagttagcaacgaactgctgccacagatctgtccatgaagaaatcaagtagggtgggaggtgaaccagccatgaacgtgtagatcccttcaacgccgccggcaaataatttgccaatgcgttgtcgtctactccggcagcatagagtactgtggaatagacctgaagaaactcctcagggtcggtgcttctgtcgtatttctctattgttcctagtcgaaatttctcaggccatctaacctctcgcagaaaacgagtgaaagctctgcacccgccgctaggggcggtgggttgtcggtgatcatgtgctcgtcgtggatgcctgttcgatgatgaagatgatgaagatgacgaggatgatgacgagtcactcggcttcggagtgcgattacgaggatgacgctcaggttcttgagaaccttgtcatcgcccaccgttgttgtcccggcgctgatctccatcgtcgtcgtcattacggcgtcgtcctcgactggtatcgcccggcatttgttgcttgcgattagtgcgtt

SEQ ID NO: 855 - DNA, 2796 bp, Oryza sativa
ccgcgaggcagaggggtggcttgacgaggtggcgtccgctgttcaggctgttccccattagcgccgcctgtcggcggttgttctggtggtgccctggcagcggcttcctcgaacgcgttactgaggttggccactgattcccgtagtcgtttcatccactgatcaagatcagcgttcaagacgggatcataaggggtttccctcagtattgcattgatggttctgatatgttgggcctgcgtagccaattgatcctccgcttccgtgttgccgcctgtagatgtgctggtcccatcaatagcgtacacgttgcgtgctgtacttgttgatgatgaggcctggtcttcgagcagatgtaggaagacggctcgtgggggtcgatatcgattaccccgacgaatcgatctgaaatagtcgccactcctcgctccttgtccgcatctctaggggagatttgtgactgctagaccttaggaggcgacgtcctcatggcactgagaaggaccttgtagctcgagaggtcgtgagtcttgccttgtgaatgggacaatagacatcacgagtgggggaagtacgttgaattccacgttatttgcaggcacggatttcagcttgtacgtcgggaaaaaccgagcaagcttgcaaggtgtgccttttggtcttgtggataggacaccaggtccttgtcgcctcggaagttatccttgtcggctcgtgcttctcgtcggggagacaagatttggccgtgttaggatccttctcgggctcaaatgtgggcgatgttccgttctccgcttctgcaggaggatctttcgacgtggagtcgaccggggtcgtaaccacgccattctcgctcctggtaattgctgggccattcgagatcggcatcgtggtgtagaccgggaagacgatttcgccgacttgagtccacaccagcatcgttgaagttgaggctccttggttgatgccggggtcgacgctgtcgtcgaagaggcttgaagtcatagtagtagaaccttgagcaccaagtcgccctacctggcgcgccactgtcaacggaggatacccgtagacctggggtccgttggaacgaggatctacgtagtacggcatcaagcaaacagaaagcaatgattatactggttcaggccccttgataggtaatagccctaatccagttggtatgggattatatgatggaaatcacataatacaaagggaataacagaactcgatggtaccgacgagagagtagtcgagttggttcgactagatctcccggcgacttggctcctatgcgctccggcttcgtagctgtggtggatgtgtttgcggtgagattcgatgccctaggtcctgcccagggggtcccttttataccgcgggttagttgatctccaagtagaactcggagatatcggacctctcacgatatggtaaagacccggtcttgcccgagtaggactccttacatccgtggattctgtttctatcacgtgatagatttccttaacatatactggaactatccgtatacgcgtgggtataccgtatcaatactcatcgtacgtctaaggatagagggtataccttatccgtaaccctgacaatatatatatatatatatatgtatatatatatgtatatatatatgtatatatatatatatatacatatatatatatatatatgtatatatatatatatatatatatagacacacacacccctaataaaaaatacgtaaggtttccggattttttttccgtccgtcatcctgttcaaacgttgctaaaatcatttttaatcggctcaatagtcgagtcggaccattttcaatctacttcaaaatcacgattgatatagaatatgtattaattgattgaattattgaacacaactagcagcttgccaacttggttagcggagtgaaactttgctttggccagctgggttcgattcccaccaccctaactttttacatttataggtggtttcacttacgtggcatcctagtcaggaaaaaatatatatatacgtgaggtatatatgggtggtttcactgacgtggcatatagtcaggaaaaaaaatatatacgtgaagccgatatgtcagctgcacatttcttccccttctcctcttttctcttctctcttctcttcttctttcttcttcttcagtgagggatctaagccggccgaatttataggtggtttcacttacgtggcatcctagtcaggaaaaaatatatatatacgtgaggtatatatgggtggtttcactgacgtggcatatagtcaggaaaaaaaatatatacgtgaagccgatatgtcagctgcacatttcttccccttctcctcttttctcttctctcttctcttcttctttcttcttcttcagtgagggatctaagccggcggccggtgggcggagcggctgcgggcccacggcagacgagcgcaccggggcggcgaggagaacggcggaaaaggcgggtgaggcgggcggcgaccttgctcccgttcgcgtacgtggagttcttccgaccttgctcccgtccagcggtgcgtccagggcgcgcccggcgccgtggagttcctcctgtccgtcgtcaaggagcagcacgccaccaccgtggacaagacgacgtccacaccgctggttcgttctttccaggaagagactacgtgtggcgtgcaggatttggcaaaggtgagctcgccggaggaggcggctctgagcatcctgcatgcttaagctcttcttcttcgcctgttttcgcatactccttcgcc

SEQ ID NO: 856 - DNA, 5660 bp, Oryza sativa
ttccggttaatcattcgtccgtcgttaagcatgggcccacacaatattttgtcgctaatccacaatccgtaagcgtgatggagatctcttacacccacaaataaaagagaaaagaaaaaacagaaagctagcaagcagcccaaccaaagcagtataaggccggcccagcagtctcaacccaacagccagcccacataacagaggagcaccagccagcacagtactgcacggtactgtagcaaccgagactgtagcatcgtggtactgtaacacgaataacttccccacagcttgagaagcactcaagcacctgcttaaatatgaggcttgcacgtcgttataaacactgaattataaagtttggactcacgtgtaccagagatcagataaaaatagatgctattttactatttaaaaataaaataaaaaacaacgtaatcaccaacaaaatgatttactttttaaaatataaaaaacaatcgcatgctttttttttcaagaaaaacacgtaatcaccaacaaaattaattgtgtttgcatcaagattgttttccgcgtcaatttctcattcgccgtaggacacctaaccacgtcactttttttttctatttatcgtacgatttccttctgtttttttttagtgaaaacgattctgctactggagtgcagtgagcttgatctgatagctagctaaaaatatttcttctactatgggtactctttatgatataaaaaagtgtttatcaatatcaatgacaaaaaaataaccgtacattgcaactgactcatgataaaaataaatactttttatggtttcaaattttagtattcactataaaaatccccgtgcattgcaatggatgagagttattttaatcttattattgttatactgtttaattaatgtgaaattcactatttaaatttgcttagatatatatatttttagaaagtcataagctgcaattaggagtccgatcatctcaagctagcatgcgagtttttttaaagagatttcttatacgactccttctatgtttccaaaaacgaacaaacttaaaaactaactcaaatacgaaaatgtatttccaaaagtaaacgaagttaaaaaccgactcatacacggatgacgtactaaagtaccggcaaaaaaatttatttttttatattatagagattttatagtggtattaattgatttcttataataatccatgtaagtggatttagagcattcttgcaccgggaatattcgatttgactatgaggagctcaattaaccttggtggctttacactcctcccacacacccattactactttttcttttttttgcttcacccaatgcaacgcatgggcattttgcttgtgtgtgtgtgtataatgcagattcgcactcgggttcatatgtacctacaatctacactgttgatgtgttccaagattcctgctgcaaaatgtagctaaccttaacgaaatgaatgcttactatagggagaaaagataattaggattaggttggttcactatatgtataacatgtatgttgcattttttaccaaataaatttttcaataataatcatatataacatttatatatctagtgcattgtatttttctaacccttattttgtttataacatgatatttagtcaaaatgagaaaacaatatatctactatatcaccaaattgtcatcttgcaaaaatgatatttccaaaatgatatatatcctaccatcaaaaactacataaacaagataatttatataaacaaggtaaactacataaacaagttttgcataagaaatacaaaaattatataaacaaggtattttacacttgtaaaaaatatagtataacatgtatgttacattttgttagcacctaatatactagccttgtgggtacatgtgaacttgcgtgcaaaaaatccaactcttatatatatatatatgataaaagtaacttagtatataattaaagtgatttacaagcataaatatttttttcatcataatataatcatgtaagatcttgatgtacagatataattgcaacgaaacgatgtaatcgggtcgtagatcagataagtaatttaagagaaaaaattatttgaaatttagatgggtaatgaggatgcaagtggcaggtgctactacttttagtaagaagggtaacaagttgattacacactgcactatttttggtaaaaagcatggtcgctggttagcacaaccgagtgcatgcgctccctgtagtcgcatccataagaaaaataatcaaaaaaaaaaaggaaaagtactagaacgtgaggattttatcagccaggcctccgacattgttgctacccaccaaaaatggccaccatcgccccgcttctagtgtggcccttccctctcccgcgttcatctcactaccgctagttccatccccttctccacttctccgaggcgattccccttctccaatccattcattccaccctcttccgatccccaaccgccgctggtccgtatccattccactctcctccgacccctaccgctgccggagtgctaggtgcgtcaggatctaatccctctttgtgtgcttcgtttcctacggcaattttgaattgtttatacaaaattttggggcgcatgatttgacagtgagaccgtgatggatcgatcttgaggcgctgaacgtactgcttgccaaaatttctcggttttgcgtcgtggtgcgggtgtgtgaggagcgttttgcattttaattttagggtatgaatattgacttgtcagtgcataattatatgaaatcatggaatagcattttgtagaaaaaaagaaaatgtgagtcctaggcactgttggcatgattgatagaaaactgtgtacattttttatgatgcaaggtcaggatcatgtgatgagtattaaaatcaggttatggattttcttttcacattatattatctgtgcattcttatgtaatagctttcttgtttatttgacatttatagttatccggtttgatttccctatctatctattgtgataaaaaggatacatggcagggtaccttccctggcccttttcgtcatacttgtttggcttcttgtctcatatgctctttttgtcttgctatatgcgatatgatatgatcatcggaccatggctatctaacagttctagatgctgaaggatgttggttccatggcccacaaatcccaattagttttttaaggatgttagtttaatgtgcatgtgtttgtattctatgattacaataggcttatccttactaggaaaatcctgacacttgtactgttattggttattttaagagcacgataacattattcaggtattcatctgttactattgttccagtatattatgggcatcacatgtcttgactggttatatctgtggcccatatttatcattctgatgatttaacatttactcatgtattcctctatcagggcatcacacgatgagtgttgcaactgaagcatgcccttcaccaaagctacacacaagactaaggctgtgggagtttgcagaccgttacgtatttgaaccagttgacggtcttgctgatttgttcctgtcagttgatcggacaaatggatcaatgagtctagtggaagagttgccacctcgtggtccctctacaaatcctaaagttagaatagtttttggtgtgattggagtgctcaaacttgcagttcggtcgtactttcttgtgatcactggccgtgattgtgttggatcctacttggggcatgcaattttcaaattgacgggactaaaagttctgccatgcaataactcgttaaatacttcttctgctgagcaggtttggaagtgattatttgggccttatttacaatttctttccatccatattccattagtcattccataaagctcttgcagaagaaaatggaatcagaattttcggaacttctggatgcagcagagaggactataggcctgtacttctcctatgatgtcaacttaacactaacgtgggtacctcaatgaatattatgcctttttttttcttgcaaacatttgcctgaagtgtatagagggggttccatctttcttttttttttgttatcttcctcttctttcgttttaagttggttaagcatttatctctgccccttatatgttgtagttcacagaggctgcatgatctaggagatcagtttaagtcacttccactttggagacaggtttgttgcctagctccttacataattccgtggtttgcttgtgcatgaaattcctgatcttttttatcctttcttatataatctgcaagcttctatagcttgtcctcaacatcttcacatgatttataccgctttccttattatggaacctaattgtatatttggttattacttattagatcagtggattacacttgtgatgtagaaagatggaattgaagttaaaattttctaaatgcaatgtgtttcatttggccgatatttgttttttagataatggaagctttattaagactcagttaaatacaccaagatgatacattccaactgagtccacccccggcctctgcatagaatgcacacaaccaaaaaactggacctaagaacacttccccatcacaaaacatagaaactagtggctatcaatccgtagactagatcgccacccatgctcctgggtaaaaaactcctgtgccacctaatccaaacgttgcgataccaccgcaatagtatcccgaagtccctgtttgtggaggatggcccaggagcgtagccaccgggtgactaaagtagtaacctgcaaaggagaagacaccaccttgttatcaaaaattacctcgtttctgcttagccatatggaccaacaaagagatgctgcacccatcaaaagcagatttctcatgtctttaggaacacaagtaagccaacgcccaaacaagtgagtaatattttgaggaggttgtatgttcgaagccatatgaacaacagaccataccaagcgagaaacacgacattgaaaaaacaaatgttgaatggtctcttccttgtgacaaaagccatgttgaatggccgatatttgtagttgcagctaaaaatttttgatgctcaatttgtggttaatattttttcatgagaagtcacgtgtgacaaaattgtaacgatgtgattttccatttaagaaactcaatttataataccacacactcctagttagcatattccttcctgagaaaatagctatcatacaaatccaagcgaaatgaaccaaatgcatgaaagctatatcggaacatgtcacacaatagattcttacttaatttgtaaattatagtttctagttttaaatagactgtcaaatggaagattctcagttcaatgaacaggtccaagaagcaagcagaagtccatagcgtacctagaataaaatattcatgtgcttcagtttaaaaatattttctagatgtacaatatagtatgtttgcttttatttccttgtcctgatttcttaagaaggatgtggtgggagaaattagcaaaagctgatgttacattttgatttttccgtgatgacatttgcaccgtattttagaatattgctaacactgtgcccattggtaatgattctactagcatcctgcaaaatctt

SEQ ID NO: 857 - DNA, 646 bp, Oryza sativa
ggtcgactctagaggatccccctccgtctggtattgggaaagttgcgggaacatcaattgtatgccaaacttagcaagtgtgagttctggttgtccgaagtcaaattcttagggcacgtgatatctgctaaaggagttgctgtggaccccgaaacagtgaccgccgtcaccgattggaagcaacccaagacagtcactcaagttcgcagtttcttaggtttggcaggatactaccggagattcatcgagaacttctccaaaatcgctcgacccatgacacagttgttgaagaaagaagaaaaatttgtgtggagcccgcaatgcgagaaggcgttccaaactctcaaagaaaagctagtttcctcgccggtgttaatcttgccggatactcacaaggacttcatggtgtattgtgacgcttcgcgccaaggattggggtgcgtgctcatgcaggatggttatgtggtggcctatgcctcacgccagcttcggcctcatgaaggcaactaccctactcatgatttggagttagccgcggtggttcatgccctaaaaatctggcggcactatctcattgggaatcgctgtgaaatatatactgatcataagagtttgaaatacatcgggtaccgagctcgaattcgcc

SEQ ID NO: 858 - DNA, 1094 bp, Oryza sativa
aaagcacctcatgccacctctttgggtattcctcaatcttcttcttcactaacttcaacaatgttttattactcgactcggcttgtccattagcctgagcgttgtaaggagaagagctcaacaatttaatatcataagattcggaaaaattcttcacttccttagacataaaagaagcaccttgatctgtagttaatgtttgtggaataccgaatctatggataatatgcttcaaaataaagtcaactacctccgtatgagtcatattcttcaaaggcacggcttcggcccacttggtgaagtaatccgtagcaactagcacgaaccttttctcctttaatgacgaaggataaatttgaccaataaaatccaaagcccattctcggaacgaccatggtttgattatagggttcaacatggcgacgggcgccaattgaacattgccgaaccgttgacaagcttcacatcctctataatatttgaagcaatcatcaatcatcttcggctaatagaatcccgctcttctaagcaaccaattcatcttgtgggccgattgataagttccacaaattccttcatgcacctctcccatagccactttagattgatcttcatctaagcacttcaacaagacaccatctatatttcggcgatataaatcttcatcaagcaatgtgtatttgaatgcttgccgccgaattttccgatcaaccttaagtgtgggatctttcaaatatcgaatcaaaggaattctccaatcttcttctgcttcctgggcacaaatgtccgaattcacaattaattcggcctctaaattgattgaaacgtgccccccagcgctctgcccagaaccggtcagaccgaccacacagggccggtcagaccgctcggggtcgccggtcagaccggcggcatgtagccggtcagaccgcccctggtcaccggtcagaccggccacgcaatgccggtcagaccgcccctggtccccagctttgccaatttcgcacaaagatttaaaagcaagcaccggctcctctaatatcagaaataatcccttcttcacattatagccagatgcttgttgtgccaagtca

SEQ ID NO: 859 - DNA, 4209 bp, Oryza sativa
gtgggataagtttgcaatcacaccagtaattgaagaagaaagtttcgagccaaaaacaagaaatctcatgtggctcaattaaaagaagatatacaagagaattattaaaggcaagacccgagttgacaaagggagaattgcaacttcaagtatatgaaaccatgtttaaaagattggaagaatcaccaaaatctagttccacatgcagaagtctagacgaagatatggtacaatacagccaaattaagccatcttcgccaatacctccttattactcaattaagcaagataatgattcagatgaaggaacatcagatttcaatccaacgcacatttagtcaaggtatgacgacagatcttgtcaccaagataatgaataaagatcctgtcatccccgacaaagatcactattcaagataaggaatctacactattctagataagataagcctatagtcaaaaggcgatattatgacatctttattgaaggtcaaaagcgtcatcaccaaagattctctccatgaagtctaaagggatatcataaactctttgaagtcaagaagagatatcatgaagattctctaccgagtgctatataaggggctcaccatcgcattccacaagcatcgcattattcacaagaacaacaaccacaacacatctcactcaaccattcctctcgcctctccaccagccatcacactccactccactccatctaagtgtttgtactatagtataacctaaataaaagactcatgagagtctaagtgtgagagtctatgtaagagtccttgtgagagtcctgtacctgtataattacgaacgtgttgtaccaagtccttggtgtaatcttcagaaggatctaccttcaacttatcaaggtatatgaatgaacacctggaccgttctatataaacctactatgttctaagtatctaatttacattatatcttgtacataattcatatttacagcttgtctttatttcctgtactgcatttatgtttgcataataataataataataataataataataataataataataataataataataataataataataataataataataataataataataataaattcaacaacctggattaccatccaattgccacataccaatctcacatccaagattgcatatagatactgcattccttatatatatatatatatatatatatatatatatatatatatatatatatatatatatatatatatatatatatatatatatatatggaatttatttttgaagtggttttggagatgattggaatttacaggtgaatctacaggatactgctgttatttcatgtgaccggtcagaccgggctgtgtatgccggtcagaccggcgcaacccgcggactgaccggctgaccctgtgtcagtttcggtttcggattgtttgtttggatatccgtgattgtttcatgattatggcttctagatggatactatatgtatgtaatactattgtttgctactaatgagtcaagttggagatagcttggtctcggaatatggtttctttgtttatttcatgtgtaggtgtctcgatgcctcgggagagtatttgcagtgatggaccgggagtcggcttggggataagacgacgtccgtggtggtcagagatcatgcgggatacctaggctagagttgatgcacgtggttgatggagattccatatggcatacgatggagttattgtgtgcgtatgggatgcggagtcgaatttggaaggagtccaaatttggtatgattggttatgtaaagtttgtgtcttgtactagagggtttcctaaggtgtttaggactcttagtatgagtttggtttgtggctttatactgccgacctcatgtataaatagagggggagcgtgaggcttccctgtatcgcttttgagagcaattgagttgagttttgagttagggtttcgagtttagtcgagatttttgtaaggagtgctgttggtgcactttgtaaacacagagagaatcaataaagtcgtcatctactttaagaattcttcgatttgtgtttcaccgggtttcggcggtctaaccggtaactcatcggcggtcagaccggcgacaagtcggcggtcagaccggcgggagcacggcggtcagactggcggcatccactcggtcagaccggcagttcaatctcggtcagactgacttccgtcgatttcgagggtaacttttatttctgctaaaagttttttggtttttgggtataccaaccattcaccccccctctgcttggcttagttcttgtgtttcgatcttacaagtggtattagagccttgtttttttctttggatttttatcgatctagagtttttgccatggctactcctattaggttttcaactaagcctcatgttttcgatggaacggatttttctcattggtgtagtaggatgcaatcttacattatggctgaagattatgatatttggagaaaagtttctcatccttatgtgattcctgaagctattaatactactgctgaaaaaactgcttttgaacaaaattgcaaagctcgcaacattcttttgagtggtatttctcgttcggattatgatcgtgttgcgcattttcgaactgctcatgaaatttggaatgctttgagtaactttcatcaaggaacaaataacattaaagaacttcatcgtgatattttcaaaaaggagtatattaaatttgagatgaaacctggagaagctttggatgactatctttctaggtttaataaaattttgagtgatcttagatctgttgattcttcttatgatgctaattatccacaatctgagatttctcgtcactttttgaatggtcttgatatgtctatttaggagatgaaagttacatctattcaggagtctgttaacatgtctactttgactttggattcactttacacaaaattgaaaacacatgagatgaacgttctttctcgtaaaggtgattctaagtcgagtgctttggtttcttcttcttcctctttggatgttgatgcttcttcatctaagtcttcttttcttgctgtttttaatgccacatccgatgatcaactcggacagattgaggaggaggatttggctttggttgctaacagaattgctcgagctatgaataatgctaggaacaggaaaagaggtgatctaaatcgttgctttgaatgtggttcaattgatcatcttcgtttgcattgtcctaagtttgggagaggcaaaagagaagacaaagatggtgagaagaccaacaacaacaagccgaagggtacatcccaagggaggaagttcaaggagaatcttaggagggtttttgatcaagtctacgccgcatttgagccatcaagcgatgtagatggtgagagtggagatgatgataagggaaagaacatctccggtgtttacgtcatggtgcgtggtgaatcggacatagagtatgaagatcatgaggtaagtacttttgaagaagctattaatattttgagtgcaaaaaatatgaagtgtgagaagatgtatagaaaacaggaatttatcattgaatctcttaattctgaaattgctaggttaaaatctcttattcctaatgatgatgattgcaaaaattgtgtggttttagtgaatgagatttcgaaaattagagatgttaatgttgcacatgatttgaaaaacaaatcttctcttgcttgtagttttgctttgcacacacgcactttggatgagttgtttttaactaaaaagttgttgcaaaaatatcaaattgcttttcatgctagtttgatgtttaacatgatttctctaaaaagttaaaacaacctcatgatgttttggattgctcaacatgtaatttgaataagatgaaactaaaagatgctttaggtcgtgttgagtacatggaagatgttgtgaaaaacaatgaagtgctttcttgcctcaaatgtcgtaaaagcaaaggtgtcatggtagattgtgaaaattgtgctaatttggaaaaagaggtttcttatttgaaaaattctttgctaatattttctgatggtaaaaagaacctcaacatgattttggatcaatcaaaggttagcacacataatcgtggtttaggttttaattcttatgcacataatactagatatcctcctgttgtgttaggtgttg

SEQ ID NO: 860 - DNA, 827 bp, Oryza sativa
tcggtcagatcggcccccagtcagacgggctgcacaccctctgtcagacgggcctcgaagaaatttttctgaaaattctcgaattgattttgcacgtggatatatgcctattggatcttctggtcgtgtgtctcagtactggattcctaaatttttattatcagctaacccctgtactgaggcttcgacttctgcttgtgtgttggctttggtggcaaggaaggagaacgtgtggatcgtggattccggttgttcgcggcatatgaccggtgataaaaattggttctcctctctcaaaaaggcatccaagactgaatcgattatctttggtgatgcttctacaagtgccgttctcgttacaggtttggttaaggtaaatgaaaaatttgaattgaagaatgtagttttgtttgaggacttaaagtacaatttgctttcggtttcacaaattgttgatgaaaattttgaggttcactttaagaaaactggaagtaaagttttttattattgtgatgattctgtgttgaatatttctcgctatggaagattgtttaaagctgattttgaaaatcctgtttcacctgtgataacatgtttggttgctaagtttgataaaaatgtgatgttttggcatcgtagacttggacatgttggttttgatcatctcactaggttaagtggtttggatcttgttcgtggtttacctaaacttaagaaagatcttaatttggtttgtacaccgtgtcgtcatgctaagatggttgcttcttcatatgctcctattgtttatgtgatgacggatgcaccaggatagttattacatatgg

SEQ ID NO: 861 - DNA, 601 bp, Oryza sativa
ataatctttcaaagtagataaaagccaaagaatctgtgaacaacaattagcagcagcaacatattcagattcagcagttgattgagcaacactagattgtttcctagaagaccatgcaatcaatgatgtaccaagaaaatgacatgttccactagtacttttcctatcaattctacaaccaccaaaatcaacatcggaatatccacttaagcatatagaagatgaagtagaataccaaattccaaactcaagtgtatgattcaaatatctcattattcgcttgaccacttgatgatgtgaagcacgagaagaagcttgaaagcgtgcacacaaacacacagcaaattgtatgtctggcttagaagcagttagatacaacaaagatccaatcatacttccatattccttttgatcaatagcttcaccatcttcatcaggatccaacacagctgtagaaccaattggtgttgaaattggcttgcaattctccatcttgaaccatctcaaaagatccttcgtatacttcgtttgatgcacaaaagtaccttgaggtgtttgcttaatttgcaatcccaaaaagtatgataactcacccatcatg

SEQ ID NO: 862 - DNA, 1127 bp, Oryza sativa
cgaagggcctgctggtagctggctgctctgacaacaactctttctcgatgttcctcgagtagattcacatcgtcacttcgctgcttctcctgttcctcgtcagagtacttctgtactcgtgtgctctgatgccgtagctccgtggggagcatagcctatgagccatacacgaggaagaagggtgtctccttattgaacgttgtcggtgtggtgcgcacggcccatagatcagaggggagttcttcgacccacttcttgtcgtgtgacatgaatctgtcgtagactcgggtcttgatcccttgtagtactatgctgtttgcccttttgacctgtccattgctctgagggtgagaaaccgaggcaaaacaaatcttgactcccaatccaatgcagtaatcctggaagtcggcattgatgaactgggagccattgtctattatgatgcggtgaggcaatctgtatctgcagaatatcctttgataaacttgatggcgtcgtcagccttgatttcccccgtgggcatcgcttcaatccacttggtgaacttgtcgatcgccacgaaaaggaacttgtagccgccctgtcctcgtgggaatggtccgagtatgtcgagcccccaacacaagaacggccatgtaagagggatagtctggagcgcttgtgccggtagtcttgtgtgtttgctatgaaattgaaaggcttcacaccgctgaaccatgtcgcaagcgtctttacgcgcggttggccagaaaaaaccttgtcggaaagcttttcctaccaacgtccgaccggcggcgtgtgacccgcacatccctttatgtatgttgaggaggagatgtttgccgtcatcgaacgagatgcatttgagaagtaccccttttggcacctttttgtacagatcgttgccgatcatacaatagatcttggcttgtcgggttattttctcggcctctgcatcgtcctcgggcaactcgtcggtactcaggaacttgatgagcggggtccgccagtcctctgtggtctcgatgtcggcaatgacgtgttctgcccctatagcccccgagctaatgtcggggacaactgtgctatcttcgtcatttgctttttcactgatggctttgtcaaga

SEQ ID NO: 863 - DNA, 1479 bp, Oryza sativa
tatgttgattgctttgcatgggaatatcatgaaatgctgggtcttagccgtgagcttgttaagcatcggctttcaattaaaccgggttttaggccttataagcaaccgccttgtcgttttaatcctttgctatatgaccgagtaaaagaggagattgatcggttgttgaaggcggggtttattaggccatgtcgttatgcggagtgggtttctagcataatcccggtggagaagaaggggagtcgtaagattagagtttgcatagattttagagatttaaataaagccactcccaaagatgagtatcctatgcctatagccgacatgatgattaatgatgcatcgggtcataaggtaattagctttctagatggtaatgctggctacaatcaaatctttatggcggaagaggatatgtataagacggcttttaggtgcccgggatttgttggtttgtttgagtgggttgtcatgacttttgggttgaagaatgccggtgcaacctatcaaagggcaatgaatttgatctttcatgattcgctaggtattatcttagagatctacatttatgatattgttgtcaaatcggatggtatggaaggacacatagcagatttgaggttagcttttgagaggatgcgccggtatggtttgaagatgaacccacttaagtatgcttttggtgtgtcggcggggaagttcttaggatacatggtgcatgagagaggggttgagattgattctaagaagatagaaaagattcgtgatttcaaagcaccgacatgtaagaaggaggtccaaaagttgctaggtaaggtgaattatttgagaagatttatttctagcctagcgggtaaaatcgatgcttttattcctatacttcgcttgaaaaaagaagccgattttacttgggggcaaaacaacaagaggcgtttgaagagttgaagagatatttgtctactccacccgttgtgcgagcgcctaaagccggaaaaccttttcggttatatattgtctccgaagacaaagtcattggtgccgttttgacgcaagaggaagatggcaaggatatatcattacatatttgagccgccgtcttttggatgccgaaacgaggtatgtctttatagaaagactttgtttatgcttatactatgcttgtaacaaattgaggcattatttgttatctagtacatgcatagttgcttgccaagccgatgttattaaacacatgttgcaaaggccaattctaagtaggagaattggcaagtgggcatatgctttgatagaatatgatttggcttatgaaccattgaaatctatgaaaggccagattgtatgtgattttatagtggaccatcatgtagatattgcttatgagaaagagatttgcctagttgaagttatgccttggaagatttattttgatggttcttcttgcaaagaaggtcaaggcataggggtaattttgttttcacc

SEQ ID NO: 864 - DNA, 1033 bp, Oryza sativa
cccgtcgccatgttgaaccctataatcaaaccatggtcgttccgagaatgggctttggattttattggtcaaatttatccttcgtcattaaaggagaaaaggttcgtgctagttgctacggattacttcaccaagtgggccgaagccgtgcctttgaagaatatgactcatacggaggtagttgactttattttgaagcatattatccatagattcggtattccacaaacattaactacagatcaaggtgcttcttttatgtctaaggaagtgaagaatttttccgaatcttatgatattaaattgttgagctcttctccttacaacgctcaggctaatggacaagccgagtcgagtaataaaacattgttgaagttagtgaagaagaagattgaggaatacccaaagaggtggcatgaggtgctttctgaagcattgtgggtgcataggatatctaaacatggtgccactaaagtcactccttttgagttggtttatggtcaagaagccgttttaccggtggaggtaaatcttggttctcttatatcaagcaagatgatttgtcaagtgaagattacaagatgttgatgggagacaaccttgatgaagtcatcgacaagcgcttgaaggcattggaagagatagagaaagagaagaagagggtggccaaggcgtacaacaagagggtgaaagaaaagttgtttcaagttggagacttggtttggaagacaattttgcctttgggtactcgattcaaggagttcggtaagtggtctcctagttgggagggtccttatcgagtgtgcggcattgttcgagggaacgcgtactttttggagacacttcaaggggagcgttttcagcgagcgattaacgggaaatacttgaagaaatacttcccgagcgtttggcaagacgcttaggaggtactatggccggtaattgggttatcgtcctaagaccaaaaacgtgttctatgcttttagattcacgttgttcatcaaaaagataggggggcatgtgtttacaccca

SEQ ID NO: 865 - DNA, 1102 bp, Oryza sativa
ggaataagtatagttgtaataggataagaataaggcaaaagataggtttcagattgaggtctagatacctcaaattgagagtgggaagaaggatcttcatggcttcttagaataatgggttccataggaattgttttggaatcttgttgttcaggggatagatcttgagttttctgttgttctactaaatattctaggaaattattctctgtggatttctcataagtgctttctggaagacaattttttcctctgatatcctgagattgttgaataagtttaaaaggagaataagtaatataagttttactggttgacccataatctgaaaagaccttaattactgacttgtcatgttcttgttttctctcttcattgcataccccttttcctttcttctgggtcttaaaaaattcttcaaaatatataatctggctattctcatactagtcaaagaagaaaatattcctcctctgttctctcatttcgttatgccaaacttctcttatcttcattctgaatgatttgtcaacctcttctagatatcttttagttttagttctatttttggggagtcttagttctctcataagcaattctttgtcaatttcaaactcgtcttattctatggcaataacaaagccaacatcaagctcgataacattgatatcgaagtctgagattgaaggttcgtcggagttgtcttcataggtagcatagacaacattttgaggttttgtcctaggcctagaatctagactgaccgaaggtctggactggagaaaggctttctgttgtatcaaaatagatcacatcgtgtcttaagatgagatttttttttcgaatgtagaaaatgctactgtatcgagacatcctaatagatcaaaatacaccttatacttcttaaaagtaggtagcagtaaatcctaccgatggccggccacgtctgtgcgactttgatgcggcgaggtggggaggtgagcaggggctgcatgcctgcaagataattaacaaggatttggatggtgatttgtgatttgtgatattggattcttggatttttggttggtgatttgtgctagagtatagatgacggcagtgg

SEQ ID NO: 866 - DNA, 2973 bp, Oryza sativa
gtctggactggagaaaggctttctgttgtatcaaaatagatcacatcgtgtcttaagatgagatttttttttcgaatgtagaaaatgctactgtatcgagacatcctaatagatcaaaatacaccttatacttcttaaaagtaggtagcagtaaatcctaccgatggccggccacgtctgtgcgactttgatgcggcgaggtggggaggtgagcaggggctgcatgcctgcaagataattaacaaggatttggatggtgatttgtgatttgtgatattggattcttggatttttggttggtgatttgtgctagagtatagatgacggcagtggaggttgttgctactgtctgatttgatttttttgggggggttttttaagttttctgatttgggttgcatgttcgtctctaaggaaagcaggtagacatctgctcaacctttttgtttattatttttggaaagcaatattgcatattatatttcttccatcttgcaagtgcatgctgtcgtgaacttattttcaaaatattgagctacttgcaaaggagcatgaattatgatttatgattggtaatttcgggattagtaaggattcttgattcaattgagaggaacagatcaagtgagctgggattgttgatttatgattggtggttagtcatactaactaatttctggtctctctcacctgtcagctccacgagtaaaaatctcagtatatgtgctttttttccatatatctatttttttaagatctctgtcacctgatttctgattggggcatatatctatctttttttttcatatactctgcaaatttttgttttgggtttctagttcattatacgatatatcgtttgtggccctatttttacaggtaatatcaaacccagagtgtcatttatagatatgtcatgctcttatcgtcgtctagagttatattgttggcaaattaaaagaaatgaggtaatatcatgcatagaatattatgtattttaagtagataacatttgtgaaatgtcatttggaatgtgtacaaaatttaaataagagcacaaaattaaagtatcgtgcgggttataccccttctggttcagtttgctgttgggcagcaccggaagtttctggtgccgctgcttttctgtggatcttgaactattttcctcccattttttaccggcaagattcatatgtataggttctcgctctgaattttacatgcattttcagatttagtgataagtcacatgtagtagttctctttactttttggcttttggtgctcggggagataaatttcgatgttctcgttactagtagcttctgagatttaagtaaatatgtcagtatcttgtgagactaaatttccccgttcagaagttgataggctcactgttttctgaatttttcttgttcagtagtgcacacaaatgatctttctttgaatccgccatgtggtttagcttttgactgaatagtacatacttcgtgatcttttctccttggatggatcttgtgttctctcgattaacaagttcagtatttttttttctccttgtttatatggtcaatttatttggcatcaaagctctacatgttgtgcgggttatgggatatagagtattattttctcgatgtcatttgaactgggacgagaaacctgctgacaagcttgcgtctatgttgatacggagtatattatattttgcattttccctctatgaacggatgaaagttcttggttgcatgaaaaagaaaatctcttggttgatgatattcccctgaatatttttatatgctcccttgattttatatgcttgcacagatgacagatttatgttcagctaaatgtcagcatggagatataacagagatacaccatttatgaatgattttttggaccggcgaatgagcacacataatttgtgcacactttaggttgtcattttgtatatttcacttttggacatcacacggtgaatgaacaaaatatcaacgggggtaccggttgtttttaataataataactagcatggtggcccgcgcagattgcgcgggctagcatcattatattttctctcatataataacatatatgttttatcaatttattattaaaatatattcaaatgacaatataattttaaattttactaactttacgaaactactaatctgtatattcatattgtattttatatacgtgttagttattaattatttttaatatcaaattttagttatttacaaattatattcctatatggactctagactcgtctttcaatattttttattttttaattccgaactttcgttatctataaattgtatttatatataaactctatgctcttcttccaatattatttatttttaattctgaatttttattatttctaattgtatttccatgtggactctgaacatatctttcaatattctttaatttttaatttcgaatttcagttacttctaaattgactttagactcttcttcccatgtttttttaatttctaattttaattagttgtaaattgtatttttatacaggctctatactctacttttaattttattatgtttattccgaattttagttagttttaaattcctatatggactctatgctctacttctaatattttttatttattcattccgaatttcagttattctaaattatatatttctatatagactctatttttctttttttttgattaatatgagaatttctatgccgtaagagcaaacgtggaggctcttttttctattcctttaataataataataataataataataataataataataataataataataataataataataataataataataataataattataatagatatacttgcataatacatgtcacttttgaatattatcacatggtaagtgaatataaaaggccaaatctttatatgttgtaacggaatgagctctact

SEQ ID NO: 867 - DNA, 2434 bp, Oryza sativa
tatatatatatatatatatatatatatatatatatatatatatatatatatatatatatatatatatataggacactcgtatggggcaccatggtgcccgggcaccatggtatctaatgcacaaaatcactcaaatttttcaaaattttcaaattgtgagtatatacctagttataataatttgattcatacctatacttatcaacaaaacaactcaaatttaactttatttcacaatccatgattacatacctaactaattattatgtatttgggggaaatttgggggccccctttttaatttttatacctagaatcaaaatctaacaaaaacaagttcaaattcagttcaaacttgctttaaactagttagtaaaagagttaatgttaatacctaagtaattgaaaaagtttcatactcatttgaattgggtatatactcaatttcaacaatggtgcccgggcccatggagcaccaaaaaatatatctatatatatatatatatatatatatatatatatatatatatatatatatatatatatatatatatatatatatataatacgtaacaaacactagatgcaacttatcatctccaaaaccgaccagcaaaaacttctgaaaactagaaaaatagaaccctggcagaaagacgattccgttttcgtaggtctcgacgacaacaagcacatgacgacggcgacggcagtggtacaaaacgtgactagaaactcaaaactctaaacggactagacactaagaccagcaactcgacgcgacgatgcaacgcaaaactcaaaaaagcaaaaactgaatgaacaatgcaatggcacaaatatggctaggcacaggatgcaatttttttgaatggtaattttcttgttataggtagataaaaactcaccaagcaacaaaagctctgataccacctgataaaccctgaggttcacttgaagcaattcaaggtggtggttagccggttctttggttaagttaataataattacgatttggaagaaacattaacgaccccactacaccggtattaaacgttgttgtgttgcgccttagtgatcgatacacctctctgtgggttgttgatcttgccggtgcagatgaaccttattcttgcaagcaaatcgaagaaacaagcaagaccaagataaaagcattctgaattgcaaataggaatcgagttcaaatgataagttggggattctgtaacgagcaaaccggcgatctaaccgatcacgggattacccggcaaagtagcaaagctaaactttaatctaaacaaaacccaagaaatcctgaaggggtacctaactatttaaggaggtgggacgatgacctaggggtccctagggttgtgctctatctggttggggcgcaccccacatgggccccacttgggccagggtcccattggcccaatataggtgacgcggcaccttgtttctacgattgccgtcgactgagatggaatctggggacaagactggatccattggaaagaggatttggagggctttccatcaagtactcatggacccaaaacggagctcgtatgcaaatttggcggccgcttgaagtcagcagtgtagcaggtagccgaattggattccagaactttgtcaacttgatcttgatgttaactacggttgtatctatagtagccatggtcacatgagtgaaatggctgagaatgggaacatgggaacgttggtgttaaatgtgcctatatatacaaatgttgcataggggttacaattgtaaatgtgcgttccaatctcttgttttttatgcctagctactgttgacggctgttgaccaatctaattggtcactgtttgcagcctgtgccgttccaaggatgctctaccaatctcagcgcatatcaacggctgtggacgtgggagcatatgctcccatggtccaaacgacattttcatatatactagagggtggggcgcgccaatggcgcgccgtctgtgcacagttaggttaaaaagaacaggtgataattagaatagtcgaaagaatgcaggcaaacacgaaaattatcgtcagaggtaagcacacacagcgctctggattacatacgcagagacattgcatgacatttctatgttcattcaccccagtgctaaccgaactaaacaagctgaaataggagacattgtatggcatttccatgttcattcaccccagtgctaaccgaactaaacaagctgaaataggaagcctaggttttctttggtagatagtatatcaagcttctagatagtatgtacatacgaagtgcacttatgctggatcatatttacagtagaatagtgaccatgctgcctgcaaaacaaacatatataaattgctataagtattcagtagcactataactgtaaaaatggacagttttaaaaaaaacca

SEQ ID NO: 868 - DNA, 2658 bp, Oryza sativa
gaagtcaagagagaagagagaagagagaaaagagcccagaagaggaagaccagagaagaaaaaaataggcaaaatttgctaacagtacattcaaaaaacgtgtaattagctagaagacatcgcaataacgcgtttttgctgtagggactgcaaaaaattggtaattagctgctggacacccgcggaattattttattatatctaaaaaaattagagagagaaacagctgtgtaagtacggttctactccctttgtcctataatataagggattttgagtttttgcttgcattgtttgaccactcgtcttattaaaaaaaattaaaattattatttttttgacttactttattatccaaaatactttaagtacaacttttcgttttttatatttgcacaaattttttaaataagacaagtggtcagacaatataaatacaaactcaaaatctcttatattatgagacgagggagtaccttttgattttttttctttttcttttttgtttcttccttatccttttctccctctctcattctttctctctctctctctctgttctcaaccgctgccttcaaccttgctcgccgccgcttcgcctatcgtcgtggcgctcgctcacctgccgtcaccggtgctactactccatggcttcatgtcctgcaagcgaaggaggaggagcaaccactggtgttattgtttcacgacgaccaccggcgtgaaagcggcgccgaacgagcagtctgtggcagcctacgagtgcagcgtgctcatgaccgtcgcgccctcgaggaggtcttggaccgccttggtgtagtacgcgcgcagccgccgcagcgagcggcggtacagcgccactagccaccgcacccgcagccgccggaacgcactgaacagccgcctccgcccgccggcgccgacgccacgcctcgcacggtcacatggcggcgcagcggcaacttgcggagggagggagcggtggtggcggcggcacagctgctgcacgcggagaaaggaaacgacagcggcggcggttgcttcttccggaaaatgggagctgcgacgatggttcctatgcgcggagaaagggagcggcgacgacggcgcagagggtgcacgtggtccggtgcgcggtaacgacagcgcaaagggagcggcgatggctgcgctcgagaaagcggcgatggcagcggcgactgctgctgccctcggaggaaacgacacgactctgctgctgcgctcgagagagcctcctctctcttgctctttgcttggcgatgagaatatgtgattagtgaagactaactaatttgaggcaagggtaaactggtatttaatgcttgtttctctctcatattcctccaaatataataaaataatcttgttggtgcccatcagctaattaccagttttttacaatgccctacaacaaataaacattcttgcggtatcttctaactaattacacgttttttagatgtcctgtagcaaattttgccaaaaaaaatatgcagggctgacatgtgggccccacgtatttttttaattatttttgctgactaggatgccacgtcagcgaaaccacccatatatactgcctagggagcttgagtgaacggttttgtatagtttaggggtggagatttctggttttgtggttaagggacctcagaaaatctcgctgttaagttgagggacctccggtaaacttattcctatgcctaacctttttcactgagtatgggctggcctctcatatgctgcactaccgttgcactgagtatgggccggcctctcatatgcctaaccttttgcactgagtacgggccggcctctcatatgctgcactaccgtttaaaaaaattgaacactaattattactcagaataagtctattttgcctctcacatctcaaattctatttaatcccaatttttttctctctgccactagcacggaccatgcactgaaaaatcaaacgtttaacaccgctttcttcaacagatattttatgattcagaaatcttataatgaatcaattttaatttgaaaattaaacatctttttttttcgtcatcaacaaaacacgacatattagagtccgcagtacctaattaaaaaaataagtaaagcttccggttaatcattcgtccgtcgttaagcatgggcccacacaatattttgtcgctaatccacaatccgtaagcgtgatggagatctcttacacccacaaataaaagagaaaagaaaaaacagaaagctagcaagcagcccaaccaaagcagtataaggccggcccagcagtctcaacccaacagccagcccacataacagaggagcaccagccagcacagtactgcacggtactgtagcaaccgagactgtagcatcgtggtactgtaacacgaataacttccccacagcttgagaagcactcaagcacctgcttaaatatgaggcttgcacgtcggtataaacactgaattataaagtttggactcacgtgtaccagagatcagataaaaatagatgctattttactatttaaaaataaaataaaaaacaacgtaatcaccaacaaaatgatttactttttaaaatataaaaaacaatcgcatgctttttttttcaagaaaaacacgtaatcaccaacaaaat

SEQ ID NO: 869 - DNA, 1353 bp, Oryza sativa
gatctaagccggcggccggtgggcggagcggctgcgggcccacggcagacgagcgcaccggggcggcgaggagaacggcggagaaggcgggtgaggcgggcggcgaccttgctcccgttcgcgtacgtggagttcttccgaccttgctcccgtccagcggtgcgtccagggcgcgcccggcgccgtggagttcctcctgtccgtcgtcaaggagcagcacgccaccaccgtggacaagacgacgtccacaccgctggttcgttctttccagaaagagacgacgtgtggcgtgcaggatttggcaaaggtgagctcgccggaggaggcggctctgagcatcctgcatgcttaagctctcctccttcgcctgcttccgcatcctccttcgcctgcttctgcgccgaccccgctgccgatgacctcatcacgccattcccatacgcgtcccacccgccgccctcgtctcctccgccattgccactgctggagcttgagctggtcgtagtagagcgcgctcagcgcctcagcaccacctaaccacaaaactgttagtggtgtgcatgcatagcttagttagctgattagttagagctagtcaatacatgaatgtgttgcatgagttgtgtggcagttagcttcgtgcatgcggccagctagtggctgccaaattaagttgatcgcgtgctgcgtgcccgtacgatgtgaccgaagtttgttttcttagctataaaagtcatgtaatctcggcttccggcttccgactccggccgttcatgccgcccgaagatgatgtggcgcacgttgtcgacgttctggacgcgctcaccggcgccgtcgagcgcgatggtcagcaggtcacccgcggtggcctgctcgagcaccgccgccacgcgcgcggggctccaggtcgcggcacgtattgggagccagcaagagatgacgccggcgaaaccacccgccactccacctgccaccgccaaccgctgccgctcgctgcccgccgccggcctccctcacccaagaagtcaagagagaagagagaagagagaaaagagaacagaagaggaagaacagagaagaaaaaaaataggcaaaatttgctaacagtacattcaaaaaacgtgtaattagctagaagacatcgcaataacgcgtttttgctgtagggactgcaaaaaattggtaattagctgctggacacccgcggaattattttattatatctaaaaaaattagagagagaaacagctgtgtaagtacggttctactccctttgtcctataatataagggattttgagtttttgcttgcattgtttgaccactcgtcttattaaaaaaaattaaaattatt

SEQ ID NO: 870 - DNA, 745 bp, Oryza sativa
cggccgtcccttagtttacttgttcttttcttagcactttatcgaagatactataaatattcagggatatttactgtatcataaatatgatctatcaaaggaggaaaatccaagcgaaaaaaccatgttaccaataacgtcaccaatatgagcatatcagtgattaccagctcctaagattcgatcggtccaaaaggcacatttgcacctaatcaactgaagcagatgcaggatccgaagtattcgactccggtccggctcagacgaaccgagggatcatctccactggcgtgctttctcccccccccccatcgtttcgccaacaaagaatgaatcccttgagtccggccccccccaggtatcgacacgcggcttaatcccgatcacatcctgaggcaataatagagcgaataattctgagagtctgttgaattggaatggagctcacgaccgtgaaacccctcgttgtttcttgattgagtaaaaaagggatatatgaagttcgttctcttcctctgtgcatctcccttatgggtaaatccccataataaagggacaactttcgtgttaccctaagaaagaagtcactataaaacagcttgccctcctgaagtaccaaaggtgcgcggagctcggtgaaaatgaatttcccaattcactactaagtaagttcgaacgaatacgaaaaaagtgctctctgaaccgaacatgaaagttgttttccatcagacggctgttcacgtaa

SEQ ID NO: 871 - DNA, 682 bp, Oryza sativa
gaaattgattttgacaatatgcaaatataatcaacatttgtaaatactaaatgatttaaaatggaaatatggtcaacaacaaagttgatcctctcatcaagatctataacttttattttgggtcattaatctatataactttgtttctaacagcttgaaattgattttgcaatatgacaaatataatcaacatttgtaaatactaaatgatttgaaatggaaatatggtcaacaacaaagttgatcctctcatcaagatctacaacttttattttggtcatttatctatataactttgtttctaacagcttgaaattgattttgacaatatgaaaaatataatcaacaattgtaaatactaaatgatttcacatggaaatatggtcaacaacaaagttgatcctctcatcaagatctacaacttttattttggttacttcttcatccgacaaagtgatagttatattattcataaaaatcacatttttctcatctggtttacaaatatcaacacagatatgttaattttgtaaacattggtactatcactttgtcagatgaagaagtgaccaaaataaaagttgtagatcttgattagctgtacaagttagctgtttatggctttcccatttaaagtcatgtaatatttacaaatgctatttagatttgtcatattgtcaaa

SEQ ID NO: 872 - DNA, 652 bp, Oryza sativa
ccatgttaattgagacttcaatatttaatttgtggtgcagatttgtttgaggtggatgtacgagcagggtgatgttttgttagtgaagacatacaatgaaaataggatgaaggagaatcttgatattttcgactgggagctcactgaggaagagagagacaaaatcagcaaactcccccagcagaggggtctgactggaatgcagttcgtctgtgacaatgggccttacaagtgcgtcgaagatttgtgggatggtgcttaacatgtcgcaggctggccctatgcaccaataatctggatggatcatgcttgctggggatctagcaaaataatttgtaattcaattttaatcttctgtcttctcgcaaaataattgtgtgaaatggagcgccagatgtgctcaattgttatctttcttctattcgtaatcgataaatatggtattttccaaaataatattgaaatttcgagatattgataccgaacatgaatacttttttatctagcatttcttaaaaagtcatcaatagatatcatcttggtcacagcctaggatggtcgtttcaggttgatgtatgagtattgctgcaacgattttacctgccgcattcaattattctgttcagtattagcttgttatgaaaatggaaca

SEQ ID NO: 873 - DNA, 688 bp, Oryza sativa
aatagcactacctttggattcaaattttttggcattggcctttttccatccttggggggccaccttggcccactcttggctattagaattttaccgataatatctaacaaattattattttggaaaaagtcctggtaaaaaaaaccctcccgatttaatttttattgtttccaaaataaatatttggaaacctatggatggtaaacttttccaaaatggaccgattaaagtcaatgggatcatatatttatatacgaaaggagtatatatctagtttctgtagattagggtgttcttctcgttttcctttgccaatggccggtgtctatgtttgccttttggagctaatccaatagataaagtgatttctaacaacaaaaaagcattaaagatggatgaagattgaagagctataattaagaatagagaattctggagttttatcttacgagatggtgggtcaaggaaatcaaacttcagtatgttgatatcaggtagatctaacgattttagatacaaaacacttccggcaagagaagaacgctggatttctgggattgtagcctcgagaaactccttttgataaatggaaattgggtataacctatagcacttcccaggccgagttcttccagctcgcccagctcgctggtcagcctgcactcttgttattcaagaagtagtatgg

SEQ ID NO: 874 - DNA, 533 bp, Oryza sativa
tgcttttaaaataaatatttgaaaactatcgatagttaaaattataaaagtttgacccaaccatgtttaaaacgtcaaaaattatggaatcaaaggatgtatatcaaaagtgatcaaaacccgaaagtttagaaattaaatgaatataaaatatttaattaaaccaaacaaaaaatcaggtcaaataaagtttcactatataattactctgtcgtgcagatttgtttgaggtggttgtacgagcaaggagatgttttattggtgaagacatataatgagaagagaatgaaggaaaatctggacattttccactgggagctcacagatgaagagagggagaggatcagtcagctgccccaactgaggggcctgcctggattggaattcatctctgaccatgggccttacaaatcagttgaagatttgtgggatggtgacgtctagcaagctacttagatacagtggagtatatatctaaataatcatgatggatcatgatgtggatctatcttaattatgtgcggcaggcatgg

SEQ ID NO: 875 - DNA, 1938 bp, Oryza sativa
ccaacgccattctcacccaaatcctcgcccagcaggccaacatgatgactgctttcctccaccacctccaaaatccgccacaacttaatgctccaccaccaccctcacaacactttaaacttgccgagtttctccgcatccgcccacctaccttctctagctccaacaaccccgtggatgcgttggattggttgcatgccgtggggaaaaagctagacactgtgcagtgcagcgatgaggagaaagtcatcttcgccgcccaccagctgtagggacccgcatctctatggtgggaccatttccaggctacgcagccagagggacagcctattacatgggctcgcttcaccgccgctttccgaagaacccatgtgcccgccggagtcgtggcccttaagaaaagggaattccgagagttgaagcaaggcaaccgctccgtgatggagtatttgcacgagttcaacaacctggcccgttacgctccggaggatgtgcgggaagatgaggagaagcaagagaagttcctggcaggaatggaccttgagctgtccgtccgtctagtctccggggattatccggatttccaatgtctggtggacaagagcatccgcttggaagccaggcacaaggaactggagtcgcacaagcaccgcttggcgaatttccgcaaccaacagggtgctaaccaaagggtccgctacaccaatccctatccagggggatcctccttgcagcagcaacaacagcagcagcaacctcgctccgcgcctcgacctcaattcgtggtgcgcgtcccacagccgcagcagcagcagtatcaacaagggactcgtgcgccccgtcctcctccaccgactgtgcagcttggtcaaggccgcagggacgctcaaggtccgcagcgtctgtgcttcaactgcttcgagcccgggcactttgcggataaatgcccgaagccaaggcgttagcaaggccaagcgcctccccgccccaacaacggtggtaaggacgtcattcggggtcgtgtgaaccatgtgacggccgaggacgtgctgacaactccagacgtcatcgttggtacgttcctcattcattccatccctgctaccattttgttcgactctggagcttcccactcgtttatatctgtgccattcgtggggagaaatcagttgggggtagaaaggcatagaaaccctctgctcatcaccacccctggaggggttatgacagcaaagtattatagccctgccgtccctatagaaattcgggggattccttttccctcggatctgattctgctagacaccaagaacttggatgtgatccttgggatgaattggttggctcaattccaaggagtagtggattgcgcgagacgcactgtcactctgtaccgagggccggaacaaccggttgttttttttgcacccccaacctcagtcagaagttcagaacttcatcagatagaactgtcagaaattcccatcgtcagagagttcggagacgtgtttccggaagaactacctggtatgccgcctaagcgagagattgagttccggatagatcttgctccaggaaccgctcctctgtacaagcgaccctaccgtatggcagcaaatgaactggccgaagttaagaaacagttggaagagctgaaagaaaaggggtatatacgtccgagtacttccccctggggtgctcctgtgatttttgtggagaagaaagacaagacaaagaggatgtgcgttgactacagagctctcaatgaagtcaccatcaaaaacaagtaccctcttccccggatcgatgatctgttcgatcagcttaaaggtgccactgtattctccaagattgatcttcgttccggatatcaccaattacgtattcgcgaagaaagatattccgaagaccgcattcaccacgcgatacggactgtat

SEQ ID NO: 876 - DNA, 1424 bp, Oryza sativa
tactcagtcttgctcaatttttcccaaccccagaagaggagttccaggaggatgaaggcttcggtgtctagctcgtgcctgccgtcaagcgcctgtggtcgtcgccctagtcttccgctgtttctcgtttgtctctgtgtgtgctgggccttcgttgcccatgtaataagttatctatttacgcttccgcttgttaaactctgaattgtatcaacttttggtgtaccttgcctcctgggacaaggattaatgcacgcacgtaaggaatgcccgttgggttatttccggtcgtgacaagttggtatcagagcccccttgaccctaggacgagccgtagatcccaagccttagcaatattttcgaaataaaaatcctttgtatttgtgaaaatcctctagtctctctctgtcttgctgcttcatttatcgccaaaatctgacctttaaaatgttgcttttctttttgtttttgtttgtagatggccggcagcgtcacccgtcgtggtttggacatgactggtttcgtcttggagctgcggggcatgtgcgtggccgtggggtatccacacggagtggactaccaggccaggccgcttctggagcaggagggtgacgatgcagagccccacgctgcttgggaggtcactgcagtgatcctcgctggctctcccgagcggacttcgctgacagtcaccgcgggtggagactccttccccgccgcttgccagagcgccgctctcctcgccatcggcactcttcaccagcgctacccggacgagttgcagcactcgccctaccgctaccaccctcgtcgcggaggagcccgcgaccacgccaccttccgggatgctagctcggaggatgacgctaccatcgtgcacttggcgcgcatggtggaggcgtacgacgcggctcgtatcgacttccatcagatggtgcgccgtgggatggtcgagaacaacctgaagatcctggagctgcgtcaagagaacctgcagctcaagaaggacctggacgcagtggaggcgcagctgcatcagctcaagatcgcccagggagagatctgccgccccaagcgtcgccgcgtctgccgcagcctgaagatcaccgcccgcaagagcacctccaggcccgagcttgttcgtcagtccctggcgtggacttgcttcgtcgagacccctcgtgccgagcccgcgcccgtggttccccaggagggggaagcctccggcgttggtagcacagaggatgcgctgttgcttaccttccgtcctggcccgtcgcagcagtagacgagcagttagtaggcttgcgcgtgtgttctttctcgtttgtcttcttgttgggttgtgtggggcacggttatgccggtgtgtggtgtaactgtgtcggagcctgtctttattttattcgcctaagcaacttgaa

SEQ ID NO: 877 - DNA, 2480 bp, Oryza sativa
gggttttattttcctagggtgaacaaggtaataataaggtcataacaaaggtaaataggcatggctaaataaaacagtgataacgcgggaatttaaataaagcgataatgcattaatttaaatcaaaataattttataaactgggattcaatatgctcaaggatgatgtgacttgccttgctcgcttttccaaacgtcggcttcaacctccacgtagagcggatcttccgaagctacagcgtctacacgaccaaagaaaaggaaaaagtattttactctaataaactccatataacaagcaggaacaaagtacaaaaatgggttcttgacttcttgaggaaaaattagagacttgaacggtccaattccgagttcaaatggccaagttatggccatttgaagtttatatgctctttaagtgaatatttgcgaatttcttcatttaaattttaatttaaaaaggatttattgcgtcagccgaggggagagcgcgcgcggaccgggtccacgggggtggggcccacgcggcagcctcacggtccacggtggactgggtgcacccgggctcacaccggccggagccgtgggccccacgcgtcagcctcactcgagggcacgggcggctgacggccgggccccacgcggcggccactcggcgcgcccgaaggcggccacgacggcgcggtcggcggcaggcggcacccgcgcccctatggtcgccggcagcggccataggcacggcggagcagcggtcgagagaggggaagggaagggggaaaagaggcggtggtccacggctcaccctaggtcgacggcgacgacgaaaaaggcggccaaaacggaagaaggcggcggcgcggctcgggtcgacggggtcggcggcgttccggcggtcagcgagctcggcgtgggggtggacggggtcgacgccggtgcggctaacccgaagaagccgaccccggggcggaagacggtcctggcgagcggagaagcccgcccggaggtcgtcggcgacggagaagagagagggcaacgacgcgagctcgattccggcgaggagaaggcgcggcaaagggtggaaacgggcgaaggaggtgcggggagggtttaaatagggttggaagggggagaggccggccggaggggaaggaaaccggcgcgggaggtccggccgccatcaatggcgccggcgagatttgcgggggcaaatccgcccgtttgaacgcgagagagagagagggaaaatggggggaaagggagaggggatcccggggagtgatttcccccactttattgcacgcggggacggcgggatgcggtggatttggcggcggcggcggcagcgcttggcgcaggcggaggcggcgggagcggcgggaggaaggggatgacgggtgggccccacccgtcagcgagggtggcggacgggcccgcccgtgtgcggcgcgcgcgcgggaagggaggccgaatgggccgcgggggagaggagggagagggggggagagatgggccgggccggcccaagggagggaagggggactttttagggtttttctttttataaaacctttttaactttgtttatttcttaataattattatttgtgctctgaaaattccacgaaaatttatttacgcattttaggcttttaggaaatatacaaaaatcctctaagccttatttgacttttaactttgcacattttaattgttggaggctttcatacggattttaattattctaggcataatttagagaatgtattttagagtcgttttgggacgtgacacatttgcactcaatggcttttacaccatcagggggatcaaccaagctccaaactttattgacatgcatggattctatttcggagatcatggctccaagccatttctcagagtctggtcccaccattgcttcctcatagggagtaggatcgtcgttgtctaacaacaatatatcacgttgtcctgtagttaacaacgcataccttgcaggtgtacgccgtatcctttcggacctttgtgaagccggtgctttcacaactggttcaacaacaacttattcaacttgttgaacaacatcttgctcagcttgttgtggttgtgtggacgttgaatcgttttccggtgtttcctgaatttcttcaagtcgcaccatgctcccactatcctttcttgaaatgaactctttttccaagaaaacaccgtgtcgggcgacaaacactttgccctcttcccgattataaaaataatatcctttcgtttccttaggatacccccacaaagaagcatttatctgatttaggtgtgagtttatccgattgcaaacgttttacatagacctcacagccccaaatctttaggaaagacaagctgggacgcttccctgtccatatctcatatggtgtcttatccactgattttgatggaactctgtttagtgtgaacgcaactgtctctggagcgtaaccccaaaa

SEQ ID NO: 878 - DNA, 1125 bp, Oryza sativa
agcagacgccaccaagcaagcaggttgtgcagccgatccagcagacgccacaaaggcagcaggttgtgcagccgattcagcagcaaggtttgctaaatgcatcggccgggttcagaacacccgacaatcagccaaggcagcacgctgcaaatcaagttgtcccagagcatttagttcataatgtgcatccagatcaaacggtgatacctcaagtgattcccgaacatttggtgtgcaatatacagccaaacttccagaattatcaagggggcaatttgaattatcaatatcagcctccatcaccgcaagttcagtatcaataaggaggatcggctcagcctcagtttgctcctcaatacaatcaattcgagcccgtgccacaacaagcacagggagtgtctcagcaaaggcaatgggccgatatgattgcagatgtgataagagaacagtttgggctcaagccgaagaatgctggaaacttgtatcggcatccataccctgagtggtttgagagggttccattgcctaaccgattcaatgttccagatttttcaaagttctcaggacaggacagcgtttcaacctgtgaacacgttagccgattcttagctcaatgtggggaagcatcggctgtggatgccctgagggtcaggttgtttccattgtctttgtctggatcggctttcacttggttttcttctttgccatgtggatcaatcaacagttgggccgatttggagaagcattttcatagctatttctatagtggggttcatgatatgaaactgtcggatttaacggcgattaagcaaagacatgatgaacctgtgcaagattacatccaaaggtttagggagatgaggaataaatgctacagcttgagtttaactgatgcctagttagccgatttggcttttaagggtatgatagctccgatcagggagaagttctcgtctcaagactttgatagtttgtcacatcttgcacagaaggtaactctacatgagcaaaggtttgcagaagccaggaaaagctttaaaaaggtcaatcatgtctttccctacatctatggatctgatgatgatgatgatgatgatgatgatgattctgaaatagctacagccg

SEQ ID NO: 879 - DNA, 2881 bp, Oryza sativa
  unsure (1)..(2881): unsure at all n locations
attcacctaggcacgagaggggactgcccgctgcgttgcgaggagtgggggtgaaacatgaggtgtggtgcgattggttagagggggttatgcgaagggtcctgtcacagcctctttccggtatgtcatggtggcatgtcggtacacgaaaacgtgtcgtggggctatgttttgtgggtacagttgtacacctctaatcagagtaaaactattcgaatagtcgtgcccgcggttatgggcggtcgaccagattcaccgtgattagtctcacccctagttagctaatggaactggtgtagttcaggtggttggttgggcctgttgcaacgtggtgtagcgttggacagtgattggttaatattgattaatttctgcaactgttttactactttcaactactacttttaaatgctagctttatgcaaaagaacctttagcctcctttggttatatcttgcatcataccttctcttccggtgtgacttgctgagtatagtgggtagtactcagtcttgctctctcttccccacaccagagctgaagatcttcctagttggagccgtctcgttgaaggttggtttcgtcgctgccgtcaaggatgcctgtggagtggagtcgcctcgctgcaggagtcaagtcttcaggcttagctcgcttttatatttttcgctacatttgtaatcttttgtatttttctaagacgtggatctgtatgtcaacaattgtcgtttgtgtatcctggctggtcctggacaggggtttaatgcacattcagcttagaaattctggtttgtgaatttctgggcatgacagcttccaagcgaagatgtcggagttcacccgcaggaaggagatgagcgcgctttcctatttggcatccaagttgccgccaatcttggcggtcttggacggatcatcgccaagggtgatgtccttgacgggtacctcatcgcccgaggtaatgcgcttcttggaggcgtgggatgcggaggcctccggggatccaccggcctccaccggctcggtggccgccgccaagctatcggcgcgctgctccgcacacgccaaggcaatcttgacgtcgccagagatggtgatggggctgttggggcccggcatcttcatctggaggtaagcgtagtgggtggcggccttgaacttgaccagcgcgggccttcccaggaccgcgttgtagggcaaattgagatttgccatgtcgaagtcgatccgcttagtgcggaagttggtggagtcgccgaaggtgactgggagctcgatgtggcccaaaggccatgtgtgccctagtgtcatgccaatgattggcaacgacggctgaagcctcatccccgcggccttgagggcatggaaggccgcatgggagatgatgctatggctgcccccccacccccgtcgatcaagacacgagggccagcttccctccatgggcgagcaccgtccgggtggtcgctctggtcgaatgtgagcttcacttccgaccatcgcgcccgccgcgccaccttctgggttgggacagcggccagaagctcatgcctcatggccttgaaactgcgacgggaggcgtgagcgcaagccccccttgtcgagtgtggcgactgtcccctgaggtacctagaactccatatcctcgctgtcgtcatcgtcatcgacgggggccttttccttggcctactctcgctggttgccgaccgaggtcgcggaggccttgccctccaggagaccctgccgactttgcccatcggtctttctgtaccgatcggacaagttcttgaccgtgcggcaatcaacgagactgtaccgataggtgttgtgcatcgagcaccacttatctgacgaacggctttcgctgggggtagtggcggtgctcggcttatcgacggtggcctttttcttgcgcggggtcgggaagggttcgtcccaacaaagaacgtggccctcgcngtcagagtgggcacgatgcatctcttgggaaggaaaacctttaggccacggataagcttgagatatcgactctggaggatgagagaaaacattccacatatgagcatgaaagtttctctttcaaaaacccctaggattcatgctcacaaaaggaatcccagaggaccacttccctgtgtgaggaccgcaaccacctttcggtcctcatttctaacatgtatagaggtgtggttgtggacgcttatatttatcacaaatactgcaaatctcgtacttgtttgtggcactaatcttgcagagtgatgtcccaatggtcgagcttgtgaccataaacaaagcactactgggagatagcccggattaatatggtaagtttcctttctaataaaagcaagaaccagttcttaggataatatgcacctttgggtattcttggccgctaaccatttcaggttgagattaagagcgagggtcatacaatgcctaagaacatggtagctacttcaattgtacactttggtgacccttggtattggaacacactctataggagaatccgacatcacacacttggtttttgatgtcttgcgacacaaaagtccaagtgtgaggtggagatcgacgagcttttcatgacaagttccatcaaccaaagtcatcttggtttgaacttggttttagtcctagcttgctagaaaaaaaaaagaaacaaaaagataataaaaaaagaggagaaaagagagacagaagaaaagaagaaaaaatatgggaggtgaagaaaagagcaagagagctgacgagctacatttggatcaaaaaccgcattaagtgcgtgtctttgaaatatggctgtacacctgggtagtagcaatcatgctgcctggctatatctagtccctctctcgagctcatgtgccgtctt

SEQ ID NO: 880 - DNA, 680 bp, Oryza sativa
aggcatagttgtataaccaaaggtgcctacaggagtaatgaaagcagttttttctttatcttccctagccatgcgaatctgatggtatcgcgaataagcgtctaggaaacacaaaaggtcgcacccggtagtggagtcgactatctgatctatgcgtggtaaagggaaggaatccttagggcatgccttgttgaggtccgtctagtcgatgcacatccgaagcttgccgttggtctttggaacgaccaccgggttcgctagccactccggatggatgacctctcggatgaagccgggcctccaggagttgcgttaccttctcgcggatgaaggcttgccgctccagggcctggcgccgtaccttctaccggatgggtcgggcgttcggccgcacggtgaggcggtgctcaatcacctccctggggaccccgggcatgttcgacggcttctgtcacgcgctgaagttcccctcccttgctttaaattaataaaataaatcgcctcaagtagttggtaaaaattaacctagagttgaatccttaattaataaatgcatttaataatcgaattcggcgtggtggaatttttctttagttccccatgctctaatatattaatagaatttttagtggaattttcagagccttgtaaataattttaaccaattaaaaatgagcatg

SEQ ID NO: 881 - DNA, 516 bp, Oryza sativa
ccgtatgcggagttctcttacaacaccagctatcaggccagactacaaatggcgccgttcgaagcgttgtatggccggaagtgccgcacacctctcttctgggatcaaacaggcgaacgtcaactgtttggaacagaagtgttaacggaagcagaagagaaagtcagaaccgtcagagagaggctgagaattgcccagtttcgacataagagctacgcggacaaccgccgaagggagctcacttttgaagcaggggattacgtgtaccttcgtgttactccgctccggggagtgcaccgtttccagacgaaaggcaagttagcaccacgcttcgtgggaccatacaaaatcttggaacgaagaggagaagttgcttatcagctagaacttccatccaacatgatcggcatccatgacgtgttccatgtgtcccagttaaagaagtgcttgagggtacccgaagaacaagccgattcggagcacatcgacattcaagaagatctgacttatgtggaa

SEQ ID NO: 882 - DNA, 3128 bp, Oryza sativa
cacgttgcagcgactcgatcggtgtccacggcgcaggcgctcagccgatcggcaaagccgaaggtgacgaccaatccattggctcgctgaaatcatatggtaaaggcaaaaagcggcgctggagacatcacagcactgcttacagcatcgacaacagcatcgtccaccgtacatcaatagcatcgttctgggggtaggtactcccgttttgattttcttttctggaaaaataattcccaaaattcttaaatccatgcaaatcgatcggaagctacaaccaacatctcgcataaatctggtggtgaccaatttacccagccattcggtatttacaggttgggtgcgtctgccccgtcagcggcggcgagccgtcgaaccctcttctcaagcggctgacaccaccagcaagaggaggctgcaccttgagcatgtagctatccaggggcctgaagcgttcggggtttatacgcgagcggagcgccggcagatccaaccatgcacatgtttatacccaaatttgacacctatgattaaaataggaaagattgccaaaatttagaagtctaccggtttcctccgagtgggccggtctgactgccgtgtgttgggcggtcagaccgccggttgagggccagtcagaccggcggagtgtggccagtctgaccggcaggtccgagtccgactgtgtttcgtcaggtttcgaggtttccttgctcaggaaggcatgttttgggtttcctttagtttctaccccgagttggacgtggaggagggcctgtagaggacaagaccaacccctatataagggacatggccgattcattgtaaaaaaccaatctacaataaatcaatcgaatcgtttttcatattgcttttagttttctcttagtttatccatctttgtcggtttgcgtcgtaaaccgtccgccgccgctgccagagtgcgacatctctttgtaggtttgtcctgaaaaccttccgttttgcccacgagacgggtagttatctagaaatcggctccgctagccggtttagttattaaaacccatctagatttagctctttgctagatcgaggtggttggcgactctaggatcaccgcaagacttaaggtgctgcgatcgtgcttgttaacttgtcaaaaaagttgccaacatgatttttggcgactccgctggggaagagatccgttcatcgtcaactcaacttcgatttcgccatgatgaagccgccatccaagacggaggtggagccatccaatatgataccggtcacattggatgatttcgtaggagaagaccgcaaagctatggaggagtacatcaatgaactcacacgggagacgttgatgagggcaagcaccaggactcgtcaaggtgtgatcatcaagcccgggccacgtcctaagctcgcccccgatttggtaagcaatgatgaggtaacacaatctatccaacaacaagtagcatctacaatagattcatctatgattgcttttaaagataagttagatgcaacttttatattgcgtttgttttctttatctttgtccggtaatgcttttacattgtttacttctttaccggcaaattctattcatacttgggctcaattagaagaaaaatttcatgattatttctatactagagaaactgagcttaggttatgtgatttaacatcggttaagtaaaaatataatgaacctgtcattgattatattaagagatttagggatgttagaaaccgatgttatagcttgtcacgaccggaaataacccaacgggcgttccttacatgcgtgtattattccttgtcccaggaggcaaggtacaccaaaagttgatacaatacagagtttaacaagcggaagcgtaaatagttaatttattacatgggcggcgagggcccagcacacatgaagataaacgaaaaacaatggaagactagggcgacgaccacaggcgcttgacggcaggcacgagctagacaccaaagccttcatcatccaggaactcctcttctgggattgggaaaaattgagcaagactgagtacaaccaccgtactcaacaagacacacccacgagtgcaaaataaatgcaaaggagtacaagggagttataatataggggtggttagggtttgcagtgaacagcattaaaagacacttagttgctcaaagctatttcgtaattacgatcctagagctatacaatattattaatcaaggccatgaacccacacgaacctgccttaacccaaggcctacgatgatttggaccgaactggcaacctgaccctgggtcctagctcgtcccaagccaacccaggccaaccatttcacattttagttgttaagcgggttttaagaattaaaacactaacttgggtacattgctaggcatgcccataaccgagggcgcggctattcgaataggttatactctgatcagaggtgtacatctttacccacaagacacatcttcttcacgtgtaaccatgtgccacataccaccacggtatacggacggaagacgtgacatagtttccaacccatcctagccatagacaagagtaccgacccaaccccacctacggccggaacctccaggacaggtaggcaggactgagcccatagcagtaggacaccagccctgtgccatgacatctcgactaccgggccgcagctcgtgtagccttcatttgccctagagatgtccatcgacccccgacttcgtccatctccatccgtatacttttgtttataaccagactgagccacaaactaagccttacccactagacatgtggaagtacggtagtgctttgcaacagaggcacgagcttaatccttatagtacccaaggtacgacaaacaaaacccaaccacgcacctcgagcccagcctaaaaccattttgggggttttgaatagagggggaggtatgtgtccaattccaccataatccaaccattccatagtgtctaagtgatatgagaattcccaaagtctaaagttataaaaccacctaatgttgcctaattaaccagcgaagcatctacctaagttcatactagtggaaccataaatagagtacccactagttggggttttattttcctagggtga

SEQ ID NO: 883 - DNA, 1325 bp, Oryza sativa
atcccgtcctagtaatcctccatgttcggatacatcatagagctataaccggaaccacgctggcagaccagcaagggtcggtgcccgaagcaacagataggaaattacctttgcttagcttagataattaaaacacatagagagtcctctctagcctgcctacctatagttgttctccttggatcgtcttagccttaggtagattacacacgttccctgagttcgatatccttttgggtcacccgaaggtgaagtgctacatcggtattccgtgcgcttgcgggtttatctatggtcgtaagaaataccaacaaataccaacattggtctctgctgtttccggatttacctaggcatgagaggggactgcccgacttggcacaaggagcgggtgaaaccagaggtgggcatgttcggttagggagggttatatgaagtaccgaagtatcgcggtggtacttcggggcatggtagcatgtgtggaattgttgtgtcttgtggatacagttgtacacctctaatcagagataaattattcgaatagccgtgcccgcggttattgggcagtcagctagctcaccgtgattagtctcactataataatatgacttattttactgatgtagttctggtggtttggttgggcctgttgcaacgtggtttagtgttgggcagtgatgatttaatattgcttaattatatatattgttttactttttcaaaatatgatttataaatgctgcctttactgcaaatatcttgcatcataccttcccattggtatgacctgttgagtatggtggttggtattcagttttgctttatttttccccaccccagaggcagagattggttcagatggtgagttctttgaggattgagcttgttctggacgttgaggatacatgtggtttctatggaggatgctacacttttggtcgtaaagattaagtttagtttatttgtttttccgctgcgtttgtgagaattatttattatttttgtaagacatggatctgtttatcaaattgtcgtttgtgtactctgggtggtcctggacaaagattttaatacacattctgtttaaaattcgggtagcgaatttctaggcatgacatcaacgacaagaagctacagttctcgactatatgttccgttgtttccctactaaccatagagtcgggggctacacaaacacaagactaaaaattcaacagacgttatatcaagatgaagcaatcaatcaatcatggagttctatggaatcaactttgggagtcattagactcgtcatcgttttagagcaggcgttttatttgaacaac

SEQ ID NO: 884 - DNA, 6275 bp, Oryza sativa
cgcagcaactttctaagcaaccaggcactacaaattccctggcctgccaatcaagatttgtaaactagtgtttccaatttagttacagagaatagtagcaagatttactaactgagattgacactgatgtacggattttgtaatctgaaattctgaaagattgttactgcaaatatgcaatggaattgtgttatgtcatttgataatgagattgagtcaagtggaaccataaaattttcaggatgacagatgaactgtcatacttcttgttctgcattttctgcacatgtgctagagcacaacagcttgatacaggtttagtttcatgtattgtcatatattgatggcaaacatgtctcggataagaagctcttgttgcagttcatattttggcagcatctgccggactccatggtggcagcggcgtggccgaactccatggcggcagcggcccgtgacctcagaacgggcgggtttgcgacaccctcactgacatggcgtcggcggcacagtgaaggggcgccggcgagtcgcgggtgggcggtggcgaatcgcgtgcgccacataaacgaaacgacgcggggcgagcaggtggaccgtggacggacgctaggattagggggggatttgcaaaaaaaacagattagcagagctaagggtgggcagttaagtgcaaaattagcctatctctatccctagcgatcggatgagcatcctgtggttttgattgagagtttccaaggttgcatagcaaccctggtttttacttgatacggtgcgaataaagtaagtcacaaataaaataaataataattctaaattttttttgaataagacgaatagtcaaacagtgcaagtaaaatgtcaaaatcttttatattaatggacggagggagtatataagtagtggttaacctaaacttgctttactgtcatgccaggtttctcaagcaggagtcaacattattttattgttagtgtgcatagattctccaggagaagttgggaaaattaaacttttttttggcgccgtggttccaaattaatgtcacgtgttttatggagtcaatggtcatttttccaacatatgaaaactactccacgtcggaaggggcggacgctgggcgtgtccacgtcggattttgctacagtagctacagtgcgaggttggatttttgcgaaaaaaccctccgattcttcgtaatcaggtataggcccctcgcgtactgtgtttgaacagaaaaaatcgcggacaggggattcgttgtgatatgtggaagacgaggggctttttcgaaaaaatacgcccactgcgcatacccctcaaaccctagccgcttgctctccctctctcgcgccgctaccgagcactgccgcctccgcctccccctcaggccgtccccgtcgcctcgcgccgccgcctccacccccgcctccccatcgcgctgccgcctccgcctcccgccgtccccatcgccggccgagctgccgccgtctgtctcccctccgccctctcgtcccccactctctccctctccctttccctctccctccaccgtctcctcccccaccctcgcctccgccttcccctcgcgccattgcctccgcctacgcagccgctgtcgtcgcgtcaccgtctccaagcgcctctgcttccgcctccccctcgcgtcgtcgccatcgtcgtccccgtcgccctgcgccgctggcgccatcgcgtcgccgtctccgcctctggcctccgtcaacgacgaggtcggagcgccgacggctgcatcacaggcggcgcgaaaagctgaggggccaatcctggcggcgggactgccgcgaggttccggacgcatcaactcgagggggagacggcggagggagtgggggttgaggcgcgcgcggtcttcatcctcccggcgccagatctgcttctcatctccacaaggacaccccagcccaccactcatcggcgtcgacatggtcgtcggcgtcgccctcactgtcgccgtcgccaacagactgcgttaagaagccactccaccaccagcagcagcaggggcatccaccgtacgccgcaccaatgccttccccttccctcccatctgtgccctctgggtcacaggtagtcgcttcatcggcagccgcattgccgtcaatgtacaaggccaatgaccagcagcgagcaactcatggcaccagagacggcggcgatgacggtgactactaaactcttggcacaggagcttacaaaggatttgcaggtttgtgtgagttgttcttttaaggttgccatgaggaatagttaatctcgtttttcccctatacaccatgaattgttgcacatcaacattgacagtgattttcatttttttattaatgcaatggagcaacctaaggattataccaatttaccaggtgctctaatgccactgttggtgatgaaattttgagagaccctaatcttgccatgtttatgatgttctacagaacctgcatccattccatctaaaagaactcatcagctgggattgaagtactgatcagatctttttttctaggtgaactcgagaagaaagttcgaaaaatgggacattgcaatcacaacatcggaacctaatatcaacactatgctcattgccataggttctcccatttgtatagcatttagagatttcttttttttaaaaaaaattgtgaacaatttccataaactcacatcaaggtgtctcatgcagtgccaggtaaagaaagggactacaatgcttattcaaaggattatatgtcttccatagtgaagcagtcatgcactaatactagaagctgctttagagatggagacatcccgtcaaaaatctccaattacccaatgagtgagccattttttccccatgattacttactatttcagatttgtatttctatacatgtggcaccttttcattccagtgtttttttgactgggcttttcattccagtgttgtgcctgaggatcatatacatgactctgatcaatcctccaccttagctggttgctctgcttgctgtgaccatgccacgacatccgaaaacacagaggaccaggttggttagccatatttcacactcgttgcactctgaacaatcaatagagaatcacttctagcaatctattatgattcatttccagatgcattaatctattctctttgttagtacttttcttggtattttaggttttcttggggcttagttatagaatagggttttggagtgggtttgtggaggggtgattagaaagttgaaactcttttgccgcgaataaatctgcagtaacatgcctatcatttcacttcagagccaatgcatttgggtaatgtctcaaaatttgttttgtatttggttgtttcggcttttttggttgaaggaatctgcaatatatcatgcttccccaatgagtgagccattttttccccatggttacttactatttcagatttgtatttctatacatgtggcaccttttcattccagtgttgtgcctgaggatcatttaaacgactctgatcaatcctccaccatagctggttgttctacttgctgtgaccatgccatgacatccgaaaacacagaggaccaggttggtttgctatatttcatactcgttgccctctgaacaatcaatagcgaatcacttctagcaatctgttatgattcatttctagatgcattaatctattctctttcttagtatttttcttggtattttaggttttcttgggacttagttatagaatagggttttggagtgtgtttgtggaaaaatttagaagcttcacatactggatgaatttttttagtagttagcgtattggttattggcagtcaaatttttttagtacaactggtaggaggatgagcttatatttggcactattattcagaagatgttaatctcaatctcccattttactgtacttaatgttttcttaaatgttaaatacttaaaatgggactgcagttggtcactgatggttgcttgatagccataaggaaaagagagacaaaaataatgaattcatgcagaggtttcagtcaattgcaaataatatgagattggttgacttaaaattgaggatggtgtggtatgatgagcctctgttgatctgatcattttcctttttcatgtcaggtttgacacctttggattgcataccagaattttccatgttcttcagctctcaataactcatcttcaggtaatatgatggtagtccaggtttttagatgatttgcatcaaggggtgaaaataaattgatcagcacagcaacattgatctttcttatgggttgttgctttagctaccacaatgcttatttgcaagctcgtgatgtgttgcaagatctagagtagtctagcgaaacctatgtcataagtgccacaattccaaaccgaacctcccccagtgtattgttcgatgtggctgctatagttttttactaaaagtatgtaaatttatttgttctatggcttgtgtagaggagaaagggaagtgaggaaaatttgtaagtgaagaatttgacagattgcgatgggcaccagttatgctggtaattttcttgaacctgacactaatttcagggtacgtacattcttaatccaagccacaacaatgtctgagtggttttatatgtcgaccatctgtagtgtcttcttaactgttcattctgtctcaccaagactaaagaatgcatttctcttttacctatgtgtattcagtactatgaggtcagatatgcagatatacttcttctacttcataaatttgtggaatacaaataagctagggtgaagataaatatgtcaggttaaactatccgtggatataaaatatgtcatcaagccttagatttttcaagattatcaggaagtgtatatttcagactatgtatttactttattttgtttcaagtgatgtaaagccatatgagttttggtcttgtttacattgtatcggtccagaggttttgttccttagaatcatcttccattgtatgagcagcatattccaagctgctcctttaaaggaatcactcgctttccatatatgcagtatatttttattacacgataacatcactattaattggtatctatatggaaattaaatcatgccaatatatccagtgaaaccaagtgctattggttgatagcagtaaagatgtgttttctctggcattttaagttgcagtgttctgatgacttctaattactaatgatgtgatgcataaattctatggctggttctgttatttctttttatttgaatgtaatttgcttcaatgaattgatgtggttaaaggagaaaatatttaaggccatgtttagtttctcagggtccaggagttgaagccatgcaaacatgcatcatgctaatgtcgtcctgagcttccagattaggccctgctgtattgatcaatatattcaggtcagttgaggctctaaattaattctgatgataatttttattctgctgtatttgacgggcctcatgcatctgaagatctggattactgtggccgaattcgtgttctgattttggggtgtaaaatactgaaatcaatacggctgtccttgctttcatggggggtatttggtgatttggttacttcgattacatcgagttggaatgtcaatgctctctgaacctcgaatttattactgggttaccgcattagattattggcttcgcaagctggggcttgtgcaaatgatcctgcgtgaaatatgcacataatttgcttccctagacgagtttctgctaactattctatagatcatttgcataacccagcagccagctgtttctctcttcttcctttttccccctctgaacatgtttacttaggtcaatttccagacattgaaatgtcttgcaagatcaaaattcaaggttagtccgctcattctgttttgagagagttcaaggctagaagagtaaagttagtaagcaaataaaaacgatgcaaagaatatacttgatcagagctaagaatgctctcataagtcataagtctgaactcccagaaataaaacgtcaagctcttcgaaacatgatatatgccatttaaaccttaagtgcccctttcagttttaagagtagaagccatgtcttcttggatgctgtcttttgattttctgtcaaatggatcgtctcctttctagagatctaaaatagacttgcacaaaagcatgctgtgtatgctccccaattcttctccttcaactacacaaaaacacagaagat

SEQ ID NO: 885 - DNA, 3870 bp, Oryza sativa
atccgttccaaagcaaaaacatattactaataattataaaattaagaattaatgtaggtgacacatttgtgcgggcatgtatcctagactgagtttgataaatttataggaacggaaatcaaccgtatgacacctacctaccacacttcaatatataatatttagttcatccctataagcaatatttttgtagaaaattttctaacaaacactaccagaataatgttttagagacattttctctttgatttttctcattatttctctttgctttttcgttgtagctgcaggcatgaggtaagctaccttgtttcccgttgaaattgactggttgtgcattctgtattattttggatggttgtgcatatttaagatatctcgttgatattgaatattagatgattaaatcactacattaactataaaagatatgagaaatctatactacattaagtacttgttatgaattacatccctagactattgggagagtacgagttagaattacccctctaaaaaaaacagacatctttcaccctcaactatcaaactattgctagttgaggatgaaagatgtatggttttcgggtttggagggtaattcgtgcattatggtgaattgtgtttacaaacttaaaggcattttataaaatgtctcaatgtcttatgacatcttaatagatgcacttctttatgtttataagaggatataggcattttttagagtgcattacatatataattaattgcacatttcactataaaatacatccaaattaacataaaaaaaacatatctacacaaatatcacttttaaagatgcatctgcgcatcaacaaaacatatatgcacatttccattcccacaaaaaaatgttctgcacattttccattcacagaaagtgttatgtacatttttcattcacacaaacctatacacaaataaaaatacatttttacactctacggcacatttgactacatcatttttaaactgcacacatgtgcaccagctctatacataatacatttccaactgcaaaacaactttgcccataacacatctctaacatattttccgaacaaatgcacaatttgcatcacaagaggtatacacatttcaaattgcagtgcacattgaacaaaatgaggaaaagtgaaaaacacatcataacatggtgcacttcacaaaccagcaaatgggtaggggtttccggtgaatatgaccatgacgtgcgcacttgcaatgagggcagattgcaccaacatcttatggcagaggtgcagtcgacgacggtcaacggtcatgtgcaccggcctcccgatgatggagacgacttggtgcatcggcgggggtgacggtagagatacagtcaacggagagtacaaatacggcaaactcaatagagtccttggatccgctattgccgtttactcctctgctcagccaccggtgatgagaggagagagagtgcatagaaggtgtggggatggaagataaaggggatgccgggggtggagtgagagagagagagagtagagtatttaaagtgattcatagtttcccattagaacgaaactttctgttgggtaagaagaccaccgcgtcaccgttgcgcaggcaacctgagggagaaaaccatttgcctctcccccagctcaccgctgtgggaagtagcaactagaaaccaagaagctagccaggagggcggtagtggggcttggtttcagcacccctctagcataaagagaggggtggccaatgacaacgatggtgtgacaaggccaggtggcagcgacagcgtgagggggctgcgcaacggagatggcacgtcatgggcgtgtagcatcgagggcgcatcgggagcacgcagaagctcccaccctgagctcgacctttggtactcctcctagatgtggggattcctcaacaggtggcaatgggggtctctaacggtttgaagagatgatggcgacggtaacaagggctccctcctctcggccactagtagacatggcaataggggcccttcctatcccacgtataccggcaatagagctcctccctagcctgtaaatggtcgcggtgatggtgtgctaaggacgatggtgcagtgtgcatcagcaatgatgggggccctccctccccatatatggtagagatgagcttctatataacaaccctccctccagaaccacgtagcccagcccaattgatgggcgggcccacttatacacatcactccattttcactttcatcatcacttcatataaaagggttaacacatgagtgatatgattggagggaaaagaccttataagttggtttcacccttactaaatatgcgcacacagctctcatgggccgcacgggccagatcccaattaggccaggatgtcagatacaacccctcccccccccaaaggggacccgacgtccccatcggtccaactcacccacatagccggatacccgacgtccccatcggtccaactcacccacatagccggataggcatataggcaaatgtccaagaacacatcccctcttagggcacgtccagtgcctgcgtcatatgccatgtcatgtgcctcacacaaagcgcacaactaacgggtgggtccacttacacttccgtccttgcttcgtgtaaatgagttaaaccgggagtgatatggttcgagtgaagaggctttataagttggttccacccttgctaaactagcaaggtggtactaaacatgtgcacacaactctcatgggccacatagaccaaattccaattggaccaggatgtcacattctccctagcctttaggtgagtacagtatagctgcaaaatcaaaggctcggtgatcggccaagaactggttgagctgctggatagtggcggaggcagcgtggggggtctttagacccccctacccctaataaaccattagagctcccattaaaaccccctaaaatttaaatccatatatctattgtaagggagctaaaatagagtttgtctgatattgttataaggcccaaaaggctgaggagccccactataattttatcctggctccaccactgctgctggatgtcccctgacccttgtctatactcgattttttttacattttatcttgtttggaaatttatttgtcgaatttgatctttcgaaaaacttattacgaattggcgcctaggtccaaggcttgacatcgttctgttgaaattataagcacataatgatttaatttattccataaataaatcatgacattgcagatgtaaactagcatgaacgcatcattagatgtacacatgtaaactaagcagtagaacatgaacatatcaaatatgcgcaacatgtcgaacacgaaccgaggtggcggaaagaccggttgctcggcaggaactactcgcggttgcgggagtcgacgaaggcgcgcagcacgcgagcggagaggaagacgagccatcgcggacgaacagggagaagtcgcgcgaagcgcttcccaaaaaccttattgccgccttctcccgatgcaggacgtcgcgggtagaggttccggagacctgctctcccgatcgccggtgcacgccggcgagcgggatggagtcgtctacgagcgacggcgcagcacagagtaggaggcaaaccctagattgatttcacgtgtgttgcgtgaagacggcggctcggtttatatagagataggtcacttgatcagggcgcccgtacaatctccactccgcgtaaccgaaccggataagccacgcgtaacttattcggactccacgccgttttcacgcaccggatttttcggaatatttccaaaacaaaacaaatccgaattttccgcagcaaaacaaaactg

SEQ ID NO: 886 - DNA, 12618 bp, Oryza sativa
cgtgtgtccgcctcttctctccaccacacatgcttcaagtggctaggagggcatcctcccttttatggaggtccccctctcctagaataagcaaggtggtactaaactccacatgcatgccatcccatgaggagggcttttgtgatttttcaaagaattaatcttcgaacgggccatagcccatctattaattccaacaatcccccaccaaatctcaaaatcccactgagatttgccttttccaaagtactgtttatataccagcggttcgatggagaccgattaaggttgaacatccatctagaactccaagctgcacttactcacaacttgaacagtgtactacgccttgaattacaagtcttgtgcaagcaagtttcactcagagtcttatctggtactagaccgtctgtagactacccctcgggtggagcatataagtcatactcctaggtctttagtaagcttcctataagattcaccaaaatcttcatagactgcgaccaacaatcaagctcacaaaggtgagttctttcaagaatgctctgcaggacagcatcttcgcaaattaaagccaactgaactcattaaggcatagccaacctgccttgcagctcacgagagtacatgcatcttcacatagagagggtactctcctctagtttactaatggtttgttcttcccaggttctaattcacaggatctccgatcacatagattgggttagcaccatagtataactcacatgggtctcaaacccatctccttcaatgcattgtctatcacatttcgtgatagtcccttcgtgaagggatctgccagatttctagctgtttggatgtaatgcaacgttataactccggagtttctcaatttcctgacagacttcaatcgtcttttcacatgtctagacgatttcatattatccttagaactattcactttaacaattaccgtttgattgtcacggttcataaggatagccggcaccggtttttcaacaaaaaggcagatccattaatagatcaagcagccattctgcctcaacagtagcagtatccagtgccgtcaactctgcttccatggttgacctcgtcaaaatggtctgtttgcaagacctccacgaaacagcaccaccacccagtgtgaagacatatccaccagtggctttaatctcatccacatcagagatccagttagaatcactataaccctccagtaccgcaggatacccagtatagtgaagccccaattccatagtacctttcagatagcgtattactcgctcaagcgcacgccagtgatcatctcccggattagaggtaaaccggctcaacttgctcacagcaaaggagatatcaggcctagttgcactagccaggtacatcagcgagccaatgatttgggaatattccagttgatttctagcaattctcttgttcttgcgaagcaacaagctaggatcataaggtgttggagaaggcttactatcaatgtagccaaagcgattcaagatcttctccacataatgggattgcaagagtgtaatcccattctcacctctaattagcttaatgtttaagataacatcagctactcccaaatccttcatatcaaaattttgagacaagaatgatttaacctcatttatcaccccaaggtttgtaccaaatatcagtatgtcatcaacatacaagcatagaataactccctcacccccaccatggcgatagtacacacatttatctgcctcattgactgcaaagcctgcagatgtcaatgttttgttaaatttctcatgccattgcttaggagcttgtttcagaccatacaaagacttcaacaatttgcacactttgccttcttgaccttcaactacaaacccatcaggttgatccatatagatctcctcatccaactctccattaagaaaagctgtcttaacgtccatttgatgaacaagaagaccatgtgaggctgctagggaaagtagcacacgaattgtggtcaatctagcaacaggtgagtaagtgtcaaagaaatcttcgccttctttctaagtatagcccttagcaacaagccgagccttgtacttttcaatagtaccatcaggcctaagcttcttcttgaacacccacttgcaccccacaggtttacacctatatggtcgctctctcacctcccaagtcccgttagcgataatggaatccatttcactacggatagcctccttccagtagtctgcatcagaagatgcatatgcttctgaaattgacttaggagtgtcatccatgaggtacacagtgaaatcatcaccaaaagacttagccgtcctttgtctcttactccttcgaggagcttcactgtcatcctccttagtgacatgttcatgtgtatgttcagtttgttctggtggtgtgattgaactgggaattatttcagaaggttggctagaactactatgtgtattcttcattgggaaaaagctctcaaagaagttagcatcacgagactccataattgtaccaacatgcatgtcagttacctcagatttaactattaaaaatctataggcaatgatgtgatgagcatatcccagaaagacacagtccacagtcttaggtccaagttcatgcttcttcgttattggtacattgactttcgccaagcacccccatgtgcgatataagaaagcgatggttttctcccaatccatatctcatatggtgttttgtccttatttctgttagaaactctgtttaacacatgattcgaggtcaacaatgcctccccccaccatgccttaggtagtcccgtggtgtccaacatggcattcaccaagtcagtctatgtgcggttcttcctttcagcaatcccattagactcgggagaatagggaggcgtcctctcatgtatgatgccatgttcctcacagaataagtcaaactcatttgagaaaaactctccaccacgatcagacctgagtccttttatctttctgtcaagttgattttcaacttctgccttataaattttaaaatagtctagagcctcgtctttcgttttcaacaagtacacatagcaaaatctagtagcatcatcaatcaacgtcatgaaatatcgttttccaccattcgtcaacaccccattcatttcacaaagatctgaatgtaggagttttagtggtgccaagtttctctcctcggcagccttgtgagacttgcgaggttgcttcgattgcacacaactatggcactaagaacctttgacaatggaaaacttaggaattaaacatatgctggaaagccgagacatcaagccaaaattaatatgacataaacgagagtgccaaacattagcctcatcatccacactgccacaaatatggttcacggacttattgtagaaatcagaaagggaaaagcggaacaaacctccgcactcataacctttaccaataaaatttctatgtttaaacacgactactttattagactcaaaaaccaacttaaatccatctctagtcagacgggagcccctaacaagattcctattgatagaagggacgtgctgcacgttcttcagctgcacgatctttcccgaagtaaacttcaggacacaaatgcactcggccacaaatttgtcgggtaagacacacttaaggagttcgagtttcttagccatggtttgtgtctcatgagcctgttcgactacagaacggttgtcagccatcctgtagtcatgaaactgctccatgatatacagatcattgctagcatcaatagcaccgaatttagtatgtagtgcatcccacaactccttagcgtcggtcatgtgcatatacacctcgaccagacgatcgccaagaacgctaagaatgtatcccacaaagagagtagtggcttcctcgaattgcttctgctgaccagcagtaagaattccttcaggtttgccagtactcacccataagcatttcatagttgtcatccacagagtgacctttttctgtcatatcttaaagtgcacaccggtgaatttatctggcctcagcgcatcggcaaaaccagccatagtaaaatcacagcgcctataataaggtttttggattgttgaaattataagcacataatgatttaatttatttgtcacgccccgaactagtcccgagcggaactagcccatgacgctccaaattaacctgttaaccgataccagtcccaggaaacagtgctggtatcacaggaagacagaatatcacagcaacagaggtctctttattatagagtaggagtacagtcatgttgggctgcggacagatcccgagctcacaactgcattacaaaagggaaacggaagccaggcttggaccaaacatcacaggcgcgacttgggaactaggccgaaaccctaaaactcatcgtagccggcttgctcctggaagaactcctcgtcagcgggatccgctttatcttcttcagcaactggggggagattatttatatagagcaagggtgagtacgggagtactcagcaagccatgggaaataagtgtttaatgtaggcttcaaagaaaggctgttgtttttgcaattatttatttgaactcttttctgaaacaactaagggagtgcttctcaaatgacacgggtgagacagtgcgtctcgtccggtcggagtatgtgcaatgtatcagtcttttgaattgattaagattggctcccggccaacagctttcaaacggccacccgggcctggctgatcccatcagccgcagattttccaaacatcaaacccattccacaacagcaaatttcacaaggcagtagtcaaacaaaactacgctaggaatcacctcacatccgcccatgaccgtgggcacggctgttcgaacagttttaacaacctctgcagagggggtacactttacgcacacgacattactaacccggatcatccagttcgtgcagaacggccacgactagagaccttaaggctttcatgacaaggcattttgaaagccgacacaggttcgctatatgccaacgagaggggtcccagaccaacaccagattaggtcccagaccatactgtgccaggaagcccaggggtcctccccgacaccaccccggcgaatccacatgtctcttagcatcatggctcccccgataagctagttactcagccaggggtgtcccattccacccatgtggtcgtacttgtcttatgttcggatgaaattccaaggaaacggtccttaagtgcaagagcgggaaaccgtacacccggtacgttccccggtccacggttttggaaattcatttagttcgcaagcaccgacccaggtgtcgggttttccaagtcttttgtaaaacccaagttttgcccaagatgtttctcagattttaagttcgaaggcgaccgtcgatacccgtgcagagtgcatgattaccgaggcgcgactaggtgggtacaagggagcatggtataacaattacaatgggagggtcaaatgcaacaaattaggtaggtctgccaatctgccttgcagacgggacaagcagattaagtgcgatcctatcaatgcataatatttttcaagcaacataattaagttcaaatataagctcaagatgttcaaaggtggcttgcctcgctcgagatcttgagcttgatcctcgaaatcctcgtactgcgggtcttcgggctccgaaactacacgtgaaacgggacaactcagcaaacggcgaaaataaagccctattattgacctctaagcgtgccattagatagatctcgagatttgaggaattttggaagttgaacggagtcaaacggacttacggttgggaagatattgaatttctaagattattggatttttggtctaaaggaaaaggatttatttaaatcctttttgaaaaagaaaagaaaagaaaagaaggagagagggaaattagactttcctcgggcggctagggcgcggcccgagagaaaggggctgctcggccgagcttaatgggccggccggcccaagaaggcggcccaaagcgcgcgcgcgggcgaggaggggatagagagagccggtgggccgggtccatcccgcgtggtcccgggtgggacccgcttgtcggcgactcagctcaccgtgagcaaggtgcacgcagggcgtgctagggtttggggagggaggcgcggcgcaggcgcgcggttcgcggaggacgcggtgcggcaggcccacgcgcagcctcacggctcgcggtggaccgcgcgcgcgagggggaggagggaagcgacggaccggggtctgcttgacccggtcgcggccgaggtggcgccgacgtggtgcctacgtggctgccacgtgggcgggcgggaggtagacgacgacgccggtcggaacggacggcagacaacagcggcgagcggcggagcgaaccacggcgatacaggcgaaagcgagcacaccgggaagttgcacaggactaagggagacgagccaatggctcggattcgccgggggatgctcgacggcggcggattgcggcggcggcaaccggcggcaggagaagggggaaacggcgatggcgcgacgggagaccgattcgggcgagttagagcatctacgcgactccgggaatccgttgctagcgtcggattgggcggagctacgctgagcgaggccggcgacgagtgggtgctacggagcacgggcggcgacggcggcgagcacacagcgagcggcggcaacggtcggggcggcgtcagctagctacggggaggctactcgtgctactacctgagtctaaggggaggagatggaatgaggagggagaacggagggaggcactaccgtgcgggggtgatggggcgcaatgacgagaggccgacggcacgggagtgatctctccggcctcgggctggggaagaggaagaagacgagcgcccggagtccccttccgcgtccacgaacgcaccggctctcccggtgcttggcgatgaactgtggaggcgagacagaggggcggcaatggcgtggtggcggcgagcgaaacgggaggaggaatcgatgggagggcgccttggtttataggacgacgatatcggtttggaaaccgaccttgggcggtcaaggcgcgagctggcgctcggcgctcgcggccaaaacggcgacagaggcggaggatgacgccggcgggaggaaaaagggaaaaagagggagagaaagggggcttgcccccttgccactttggggaaaaggaggagggagtgagggccatgcggcagaggggggagctctgcctccgtcccttggaagcacgcgcgaggaggggcggggccaaggcgatgacgacggcgatgacggccgggcggtttggagcggagcgacgacacgggcggcaggcgcgggcaggcgcggcaggcgctgacggcggcggcgactggcccgtcggccaccatggcgcacgcgcgcgcgggaagcaacggacagcgcggcgatttgggtggcgtcggcgggaaacggcagcgagggcggagggcgctcggctcggcgcggctcacgcgcatgcgtgcgcagtgcacgggcagagcgggaaagagggagagagggggagagagagagagagagagagagccggggagggaggggaagatgggccgagagggattcagcccatcaaacccgagggaggcgaaatagacttttgcggagggatttgatttgggaaggatttggattcgggattgaactcaacgatagatcggggatttgagatctgagatggcacggacactagacaacaagcaaagaaacggatttcgcaaatagggtttttaagagatagttttcccgctaggcgccacgacggaacgggcgctacattattccataaataaatcatgacattacagatgtaaactagcatgaacgcatcattagatctacacatgtaagctaagcagtagaacatgaacagatcaaatattcgcaacatgtcgaacacgtaccgaggtgacggaaagaccggttgctcggcaagaactactcgcggttgcgggcgtcgacgaaggcgcgcagcacgcgagcgaagaggaagacgagccctcgcggacgaacagggagtagtcgcgcgaagcgcttcccaaaaaccttattgccgccttctcccagtgcaggacgtcgaaggcagaggttcgggagacctgctcacccgatcgccggtgcacgccggcgagcgggatggagtagtctacgagcgacggcgcagcacagagtaggaggcaaaccctagattgatttcgcgtgtgttgcgtgaagacggcggctcgttttatatagagataggtcgcttgatcagggcgcccgcacgatctccactccgcgtaactgtggatattatgggtaccccatacccacagggcatggttatccgactagttataggggataacttatatctatgtaatatgtaacagatcatgacttgggtgttacgtttccttgtatattacggaacggcctaaagtcctgatttaggaaaccgataccgtattggttaaggtttctatcttgtaatcctgccccccatcctatataaggtgggcaggaggccctctagggggcagatatgagacaacctgatcgtcagatcaatacacactcggcggattcaattccccaaacaggagtagggtattacctctcattgagagggcctgaacctgtctaaatcctttctctctgcatccatccacttttaggtctcgtgcgttaccccgttttattattgccgaattcatgtttcgacagttggcgcgccaggtaggggtgcgtcgagttatctacgagaagtgagatggaaccaattagaaggcgccgaatcagattcaatctagcaaggaaaatcaacctcagcaagttggatcactccaatctccgacgtcaccaatggtggtgaatcctcaagatgcagctcgccaagatgccggctggagccgctatacagtccgtagccaaaaaaaaaaaaatcatctgtatccaagagatcatcggccacgtctccagctaccagcctgcacaaccctgcttgatcgtactgctctgcatggaggtcggccacgggagtcaccactgctatctggacaggcgtgctggagcgatggatgttcacacgcaccggatagcaatcgagcctccgatccagtcgtcgtcgtcatcgccgttttctgttatgctcggtgagattgattgctgagatcaaactggacgcttcgagttcgacgcggactcggcgcctcggcggaggcgtgtagcagtgcgtcatccaccgcagccatctatcagccgtgtgaagacagctactcgccgggatagcaatcatccgtccgcacatgcacttggacacgcaaggatcggctctgcatctacacgcataaacacatgcatgcatggataaaaactgctatccggcatcggctaatttatcgttccaatctattattataattatgatttttttttaatcatagattgatctgccctttgattcttcgttttctctcgcgtgcatatactggcgtttgacggctccatgattacctccgacgacggcatcatgctgaaggactgttggttacaggggcagatgcaagcacagtggagtgcaatactttcagatgcatggacatgcaaattaatcatcgttggcctatccatccggctgacgtcgccctgatctggctggagcgagctgctcacactcataatttgcactctgccgtatgcacatatatacacgtgtgcgagcagattgggagcaaacatgtgtgaggacatatcctagcattttccaaccattgctaggcatcttcatcttcacagccggcttgccttcgccaccgccgactggtgtctcgacctacacggctggtctattatgccgctgttgatgggtgtccacgtcttcaccgaccggctggccttcgccgactggtgtttccgcctgcacggctggcctattatgccgctgctgttgggcgtctacgacttcaccaccggcctgcctccgtcgccgccgactggtgtcctcgcctatacggtcggttggtcacaccaccgttgatgggcatcgtcatctacaccgccggcctgcctccgtcaccgccgactggtgtcctcgccaatatggtcggttggtcacaccaccgttgatgggcatcgtcatctacaccgccggcctgcctccgtcgccaccgactggtgtccccgcctatacggtcggttggtcacaccaccgttcatgggcgtccacgtcttcaccgaccggctggccttcgccgactggtgtttccgcctgcacggctggcctattatgccgccgttgttggatgtctacatcttcaccgttggctcaccttcgttgccgtcgactggtgtttccgcttacacggctggcctattatgccgccattagtgggtatcttcgctttcaccgtcgaccgccttcgtcgccgccgactggtgtcttcattgttattgatggacgactttgttcccacattggccacttctgccatcaccaaggggaatattacaaagctaagtcatcatttattttattctttatatgatatttttccttttcctctgcctcactacaccaattggtcttccattgagtagtgagtcgggggctacagatgttatatcatattttttataatatttatcttgattgcttgcgacataatctgagtacaaaagtacctatcgagttatggagttctatcttcctatgctttccgtttggtttgccaatggatggttgcctttgggccgattcctagcacccgggggctcgttggatggaccgagtaacgcaaggtgctaagtattattcggaataaatcaaaagcatagagatgagataaatttattttctgcccttaataattgcaaaagtacccgagtagtaaattctgattcgtgaaactttgttccattaatggcgaactcatgtcactcatatgcatgtctgggaagtgcctaggccgactcccggtgcttgggggctatgactagtcggacagagcgtttaaacgtaatgaatcatctgctcggggaaatcaaaattgacaagaggagaaatacatatttatcaatattttaaaatacttgattttttctcgagtattatatttatatcagatactactcatcctatatgtttgttctgcaggatccagatccagatatgcataaaagggattcatggctttaagcttatctcttacgctccaggaatggatcagtcagaacatcaccaccggctcgcctcgaccgccgccgactggtgtttccgcctgcacggctggcctattatgccgccgttgttgggcgtctacgtcttcaccgaccggcttgccttcgccgccgccgactggtgtttccgcctgcacggctggcctttatgccgccgctgttgggcgtctacgtcttcagcgaccggcttgccttcgccgccgccgactggtgtttccgcctgcacggctggcctttatgccgccgctgttgggcgtctacgtcttcaccgaccggccgcctcgtccgccgccgactggtgtcaccgcctgcacggctggcctattatgccaccgttgttgggcgtgtacgtcttcaccgaccggcttgccttcgccgccgccgactggtgtttccgcctgcacggctggcctattatgccgccgttgttgggcgtctacgtcttcaccgaccggcttgccttcgccgccgccgactggtgtttccgcctgcacggctggcctattatgccgccgttgttgggcgtatacgtcttcaccgaccggcttgccttcgccgccgccgactggtgtttccgcctgcacggctggcctattatgccgccgttgttgggcgtctacgtcttcaccgaccggcttgccttcgccgccgccgactggtgtttccgcctgcacggctggcctattatgccgccgttgttgggcgtctacgtcttcaccgaccggccgcctcgtccgccgccgactggtgtcaccgcctgcacggctggcctattatgccgccgttgttgggcgtctacgtcttcaccgaccggcttgccttcgccgccgccgactggtgtttccgcctgcacggctggcctattatgccgccgttgttgggcgtctacgtcttcaccgaccggctgccttcgccgccgccgactggtgtttccgcctgcacggctggcctattatgccgccgttgttgggcgtctacgtcttcaccgaccggcttgccttcgccgccgccgactggtgtttccgcctgcacggctggcctattatgccaccgttgttgggcgtctacgtcttcaccgaccggcttgccttctccgccgccgactggtgtttccgcctgcacggctggcctattatgccgccgttgttgggcgtctacgtcttcaccgaccggctggccttcgccgccgccgactggtgtttccgcctgcacggctggcctattatgccgccttgattgggcgttactttttcaccgaccggtttgccttccccgcggcgactggtgttccgcctgc

SEQ ID NO: 887 - DNA, 10670 bp, Oryza sativa
gcctgcacggatggcttattataccgccgttgttgaccgtataagtcttcaccgacggcccgcctagaccgccgccgactggtgtttcagcctgcacggctggcctattatgccgccgttgttgggcgtttacatcttcaccgaccggccgcctagtccgccgccgattggtgtttccgcctgcacggttggcctattatgccaccgtttatgggcgtatacgtcttcaccgaccggcctgcatccatcgccgccgactggtgtttccgtctgcacggctggcatattatgccgtcgttgttgggcgtctacgactccaccaccggcctgcctccatcgtcgccgactggtgtttccgtctgcacggctggcctattatgccgtcgttgttgggcgtctacgactccaccaccggcctgcctccatcgccgccgactggtgtttccgtctgcacggctggcctattatgccgtcggttttgggcgtctacgactccaccaccggcctgcctccatcgccgccgactggtgtttccgtctgcacggctggcctattatgccgccgttgttgggcatctacatcttaatcgccggtcgtcttgtctgttgctgattagtgcccttacctctacgtctggtttatacagctaccactactgatggacatcatcatcttccgtcgccgactgattatgccgccgccgacttgtgcttttatcttcacaactgcgcgtcttcactaccggtttgcttctgttgccgccgacttgtgttcacttcattacggcaatacaactttgtcatcatggtggagcgacttcatctttattatcttcggcaccggcaaactctattgttgctacttcgcaagttttactacttcaccaaccacgacgtctttgtgaacctcgacatctcggcatgcaatgccatgttattttactacaacaagtggctctccaatattcaggatttctacttggacatcttcaacacatatcttcaatcaagcaatgactattcgacgacaagaagctacagttctcgactctatgttcagttgtttcccaactaatcaaagagtcaggggctacacaaatataaggctcaaaatttgacaaattttatgtcaagctgaagaaatcaattcatcaaccaacgagtcaactccaggagtcattatcttcatctttgcttcggagcagacattctacttcaacaacttcaaatatttcggtttggacaagttggacaacaacaccaactctcctccaagtgaagcatctacaacagttataacattaatttgatggattattgtcactgacattgtcacgcccggaatttctatccaaaattccaaacgcttacatgtgtgtgaaccctcgtccaggaatcagccgaggcacacaataacaaattgataatagagtacaaatattactctaattaataagcgaataaaatgtcattacagaggtagatagttcctctcaatcaataaagatcaaagcagcggaaaataaataaacggcgcagacggctccactccacaggcagcttgaccaaggctacacctaatcctccacaccatcagcctcattgtagaactcttcctctgatgaatgattgcaaggtgagtatatgacatactcagcaagccacgcagcaaatatgcaagtgcacaggataacaaaggatggcataatagggttgcatttgcaaaagcagcatttagcaaacatttgagaatttgataaaacagttaagtaattaaacaatattaatccaacgctatacaacataccctgttgtataggcccaaccattctgaacaaccaccccggctgcacagttctatctccaaaccaggaatataacattccaaaccaggagctaatcaaattattaccagtttaagcatcttttacaatgatgagaggtgtgagactaatcacgaaagacattgttagacccgcctataaccgcgggcacggctattcgaatagttttactctgatcagaggtgtaccactgtacccacaagacacaaccccacatcatgtcaccatgtgcctcaataccaccacggtatctcggaaaggagttgtgacaatatccctcgcataacacaatccactgcagcgcaccttcctggatcataatcacccccttataaacaaggcatggactccccagcgacccccgtgggcttatctccgccacttctcagtctggtgccccgcaatgaaccatgctatacaaaagataaagccgttgcccatgctggcttgtggttggcacgataaatgtttcacaaccgaaactcgtgaaccggtccttaattgtcatgagcacgaccatcaaaactatgtgcccacaacccaccattatcaggttttagttggcacattaattaattaactaatcacgattgaccatcgtgaactatcaataagccatcatgaaataatagtgagtcattagttatcccataagtgtactaatgtttctaagcagggctaagcaattatatctaatatctagttgaaccaatataaataaagctcaactagtcaaattaatataaccccaaggtatcaaggaataaggtaatcaagtacgaaagggccataacaaagaataggtcaactccacccaatgacattcgaaaatagatgcaatagttgaatagaaacaatagctttaaataggatcaacatgctcaaagggttgtttgggatctgtgtgacttgccttgctggccttggaactcttcaaactcttcttctgcgaaaacggactctccggaaacgacggaatctaagcagaaaagagcaaaatcaccaaaacagcacataaacaagcatgaacagtatatgtggatatttttaaagtgtaaatctcaattttagaaaaatttagagacttgaaccaactaaatcggagctaagatgaattagttatgaatttttaaagattaaatcggattaaaacacttatatcggttaaaattgaattatgacgcaataatgaattatttttgaaaaggaaaagaagggttattgcgtcagcgggctagggtttcgtggaccgggcgcacgggcggcggttcacacgaacggacggccgagatcgaaccaatccaaaacggacggccgagatcgaacggtccacgaccggctcacagcggacgaccccgatgacgtcagcgatgacgtcaccgacagcggcggcggctcggcggagcggacggctcgggcggcgcacgcttgccggcgaacggcggcaccaggacgcaaacggagggcaccagcatgtagaggacgacgcggcgaacacaccggtgaccaaaacagcggcggaagaacaacggacgacgacgaggaggaaacggcggaaaccttcgggttgtcgacggcgacgaagctccggcgatctccggcaacggcgaaggggcggacgagaacggcgacgcgatggcgaccacgacgacggtcttcccgagcgacggtgacggctgaagcgacgacggcgcacggctggaacggcggcggcgacggcaaagctagggcacacggcgctagagctcttccggcgacgagaggcgaaggcgagggtggcggcgggtagaggagacaccgagggtccttttaaaggggctcggaggcggcggcaaaggcccacgacggcggcaacggcgaaggaaactcgcggctcgaaggaaagaggtcgatccgaatcgaactcgattccatgaacttccaaaccgattaagccgaagattccaaaggagaaaaggtagaggagatcccggagattgtttcccctcttttgattcgaccggagaaggaaaggaacggccggatttggaaggaaacggcggcggcgcgaaactagggtttcggcggcggcggccgaaggaggacgaaggtcctgacaggcgggacccacctgtcagcgacagcgaaagggcgcgcgcgcggcggactgggccgaactgggccgaggagagagagggggttttgggccgactttcggcccaaagccaaaagagactttttaaaacatttttcaatttaaattatttcttaaatgcaattccatttattaaaaataattccttagctcaaataaatcccagaaaaatctaggaattatagaattaagcaaagtatttgatgaaattttatctggccccattttatattggaatttattaattaaaactagatcttctcttcaagacttttaaaattatttctaaaaattccatttaaacaacaatttataaattttaaaattttcagggtgtgacaaacctaccccccttaaacagaatctcgtcctcgagattcggaggaactggcgaacaggtgcggatgagctgacttcaattcatcttctcgttcccaagttgattcttcttccgagtgattactccattgaactttgcagaaacggataactcgattcctggttcttctctcatttgtttccaggatacggattggtttctcaacataagtcaaatcctcttggacttctatctgctcaatattagcttcttcggtaggtacccttaaacattttttcaattgtgacacatggaacacattatggactcctgccaaagattgaggtaattctaactgataagcaacctctcctcttctactgacaatcttataaggtcccacaaaacgcggtgccaattttcccttggtgtgaaaacgatgaactcctcgaagaggcgtgacacgaagatacacatagtctccttcttcaaaactcaaatctctacggcgattgtcggcataactcttatgtcgagactgagccactcgcaatctttcttgaatgacctttaccttttcttctgcttcccttaggatatccgtcccgaaaacctgacgttctcccgtttgatcccacaaaagcggagtgcggcacttccgaccatacagtgcttcgtaaggagccatctgtaaactagcttgataactgttgttgtatgaaaattctgcataaggtagattcttatcccaacttccaccgaaatctaaagcacaagctctcaacatgtcttccaaaatctgattcaccctttcggtttgtccgtctgtctgtggatgataagcagtactaaagttcagcttagaacccatctcttcctgaagtttcttccaaaaatttgaagtaaactgactgcctcgatcagacactatcttcttagggacgccatgcaaacacacaatccttgccatatacaattccgccaaacgacttccggaataggttgtctttaccggaataaaatgagccactttggtaagtctgtcgactatcacccaaatagaatcatggcctgatgacgttctgggtaaaccagtaataaaatccatacctatttcttcccatttccattcaggaatcttcaaaggctgcaacaaaccggcgggtttctgatgttctgccttgactcgctgacaaacatcacatactgctacatattctgcgatttcacgcttcatacttgcccaccaaaatctttccttgagatcctggtcatcttagtactaccagggtgaatggagtataaagtatcatgagcttctttcagaactgcatcttttagatctttgttgtcggggacacagattctctcacccaaccatacagttccttgctcatcctccaagaaaccaatagcttttcctcttctcatattcttcttgatctcttgaatatcaggatcattaatttgggcttctctaacttgatcaattagagtgggcttcgcttctaaggctgcaacgaaacctctaccgacaattcccaaatttaatctttcaaattccttgcataattccaatggcaactgtcgtccttctgtagcattgcaatagccttttctgctaagagcgtctactacaacattagcctttcccggatgataatgaattcccatgtcataatccttaattaattccaaccatctccgttgtctcatgttcagatccggctgagtaaagatatactttaaactcttgtgatcggtgtacacttctgtacgagtaccgaaaagataatgacgccaaatcttcaatgcatgaacgactgcagctaactcaatatcatgagtagggtagttcttctcatgtggacgtaactgtcgagaggcataggcaaccaccttcccatcttgcatcagaacacaacctaacccaagtttggatgcatcgcaatacacttgaaaacccttctttggatcaggcaaaatcaaaataggagctgatattaagcgacttttcaactcttgaaaactctgctcacattcttccgaccacttgtacttcacatctttctgaagcagtcgtgtcatgggcttagcaatcttggaaaaattctctataaacctccgataatatcctgcgaggcctaggaaactgcgaatttctgaaactgtctttggttgcttccaattggttacggattccacgttactaggatcgacggcaactcctccggctgagatgacgtgaccaaggaatttcacttcagacaaccaaaattcacacttgctaaacttagcatacagttgatgttctcgtagcttctccaatgcaaggcgaagatgttcctcatgctcttctttggttcgagagtagataagaatatcatcaataaagaccaccacgaacttgtctaggtattccataaacaccttattcatcaagttcatgaagaaagcaggggcattggtaagtccaaaagacataacagtacattcgaacaacccatacctagtggtaaaagctgtcttaggtatatcttcctctttgattctcaactgatgataccctgatcgaagatctatcttggagaaaacagtggcacctttaagctgatcaaacaaatcatcaatcctgggtagtggatacttattcttgatagtcacatcgtttagtgcacgatagtccacacacattctctgagtatggtctttcttttccacaaaaataaccggagctccccatggtgatgaactcggtctgatgtatcctttctgtagcaaatcatctacttgcctcttaacttctgccaactcattggctgccattcgataaggtctcttatggatcggagttgttccaggtaccaaatctattctgaactctatatcccttttaggcggcataccaggtaaatcatctgggaacacatcaggatactcccggactataggaatctcttccaaagttatctggttcagtcttgaccttaaagactcagatgacaatgcatgaacagttacaactcgaccatcatagctgttgagagttacttttctgttggcacagtctatcacacctttatgtctggctaaccagtccatccctaggatgacatcaaggtctttggattttaacaagataagattggccagaaatggtactccttgaatttctattctgaccgaggggctacgttgcaaagagagtgcttgattacttggggtactaaccatcaaaggacgtctaagatcttctacttccatcccatgatttcccgcaaaactcatagataagaatgaatgtgtagcaccagaatcgaaaagtactgttgcaggaactgagttaacaaggaacgtacccaaaatcacatctggagcaccttgagcttctgcagcagcgacatgatttacacgagccttggatgctggtacagcagagttattctgggcagggacaaccttcacgcgtcggggcttcggacacttgtcagcataatgtcctggatctccacagttgaaacacaccacgggcttgttgccttgctccctcttggcaggttgttgctgtgctggaactgcaacaggacgtggagcttgattacggatgttgttgccagcattgttgttgaagaactgacgctgcggacgaacaacagacgaagaacctccctgtggcacagactggggtcctaaagtaagacgcggcttctgattattcccctgttgtgtcttgaattgagcaatccggcgtttcttctgctccatgcgattgtacttgtcctcctgacgaatagccttatccactaatttctggaaatcaggataatctccaaccatgagtgggtaagaaagctcatcattaagtcctcccaaaaacttctcctggcactcttcatcattgcgcacatcttccggagcataacgagcaagacgattgaactcgtgcagatactccgtaacagagcgagatccctgggtaagcgacctgaactccttcttcttgagagacactactcctgatggtatatgcgtcttccggaaagcggcggtgaattcaagccaagtgataggttcagcagtagtcctgttaaggcggaagtgatcccaccattcagaggcagggccatgcaactgatgtgatgcaaatgagaccttgtcctgatcagtacactgaagtaaatccaacttcttctctatggcatgcagccaatcactagcttcaacaggattagtggtactagagaaaacaggcggcctcacacgaagaaattctgctaacttgttctgtggaggtgcatgattatttccttggttttgctgattctgaaattgctgcatcatcatgttcataagctgtgtctgttgagcaagaacttgagcaagagtgggattctctccattgttgttgttattggggttgttgggaccattcccattgctgcgagtgttcaccatctggcatggacagggcacaagaagagaaaccggggaaactacttaggacagagaattactttaacttttattgatcttaactgagtttcattaatacaaactaaagactctcacaccactaaactcaccaacttcctaacactcaaaagcaaacaaacgcatgcacttacatcccaccactgatgtaaatcacatgcgagccacacacaagcaaactttaagcaagcaaactaacacaacgatctaagacaacgacttaacaagtcactctagttcttccaagcatcggaggtcgattgaaggctcgtctttatcatcttgagatgctacccactcaatcttggaattgttgcgcttggattcttcttcttcatcactacttatgatgatgaccggaggatccgcttgagctggggcaacttctttctccatcacacgaacctttggcgccagttgatagcgagggacaaatagagctctcttccttgcggtaagacgaatcctggccttctgcggcggtgcttctcccttcaatgcggctaattccttctccaaacgatccaccttgtcttctaacttgcaaatcttaccgcgattccggtcttcacgatcttgagcggctaacacagtctccgcacgactttcatccatagcccacaacatctcaaccaaatgcttcgtggtagcatcattctcaattccttcagtctcaaggtaactgccacggtcacttccctggggttggcgaggatggtagcgatactcagtgtcggccaactgatcactgtagcgatcacggagctctcctatggcgatccttgccacctcctgacatgcatggatgtagtttcttcctccagcttcaaacatcactgaggggatatcttcactattactgttcaaggtgactttgactcggcacttctcttcatgacgatcatgaggaatctgggcataaaaaggggcagtcccaaatccaatgacaaaggacatcgtacgcaactcctggacaaaaccctcaacaccaaacaggtactcaggcttgtaacgcggcatctaaagacaagtgaaaggagggagttaagacctttatccaattaatagcacaagtttttggattaatttgaataaagttagaaaatcagagtaaaaggtaagtaaataaagtaaaccaagctttgcgagataagttaaaacagttggaaacgaggtcacaaattttgtaattttgaataactggtttcaaaagaaaagaaagaaaattataaaatcaacatgctaaatttattttattgcagcaagattaaataaaacagtattgtaaaacttttgctggtaaatgagccattagtacagtaatagatgtacagtactaataacactgaaataaatttttaatgagaaccattaaaagagattatgaagtacatgtgccattagtttggtttaattaaaagagaaagggaggagaacagttctacttttccaatatttttagagggcttctatggataaccatttggcataacctagggtcaaagaggctctgataccaacttgtcacgcccggaatttctatccaaaattccaaacgcttacatgtgtgtgaaccctcgtccaggaatcagccgaggcacacaataacaaattgataatagagtacaaatattactctaattaataagtgaataaaatgtcattacagaggtagatagttcctctcaatcaataaagatctaagcagcggaaaataaataaacggcgcagacggctccactccacaggcagcttgaccaaggctacacctaatcctccacaccatcagcctcattgtagaactcttcctctgatgaatgattgcaaggtgagtatatgacatactcagcaagccacgcagcaaatatgcaagtgcacaggat

SEQ ID NO: 888 - DNA, 12066 bp, Oryza sativa
aaaaaaattatataagagttttcttttaaataaatcaaaaatatttcgaagtttataataattactccctccgtttcacaatgtaagtcattctagcatttcccacatttatattgatgttaatgaatttatacatatatatctatttagattcattaacattaatatgaatgtgggaaatactagaatgacttacattgcgaaacggatgaagtcttatgctaatgactcgtctcatttagctaaacaaacgtgctatttcgaacatgccctaagtaacaagcaagagcatatctctaggcacatttatggcaccagatagctagagtgatgcgatgagtggacaaaattgttttgtttatttaggaaaggagctttgaacctttttgctgtgtggcaaatttgtatcttgtttgtttgagtagcaaaacatgtgtctcgtagtcatactttatgtactcatacttcacttgctgcatgtgtctcgtagcggacgagtccatggttggaaattagtggctcggtgatggctggttttttataactattcatgggcacaaacaaataactaactgctataagatagaaaaatttatttaaataagttttctaagaaattcatatacgaagagtttttttttttgaatattgctgattttgtgaaaattgctgaatggaatggttgtattcctctagaaattcatatatggatgtttttttttgaaactatagcttgaaaaagaacaaaccatgttggtataccatgactaagaatgcaacttttaaaagttcaatattggtgatggtttgtcttttacccacacttttcaaaaaaaaaatattggttagttttttttttttgataaagttggtaattgtgatgtcagaaagtaaagatatacacttgtctggtagaatgcatattgtacaactcatgtttatcgatggtattttgtacaaaagtgttaatagcactttatataatttctctatatcactaaaaacacatgtggctgcatcatttgtggtatcttatcactagctggagaatgttcgctcgctgcagcacctcagtctactactacacccttctatagttggtggttcaaggtggtcaagggagttacttacataatcatcaacgaatcaaaattaaatgaagaatgggaaatgtcagggtgtggtataaaaatacattcggtgtcagggtgaccggccggccaggtcgttgtggtctgattatatgaactgaacagtacaaatggttgtgctcaattaatagctagatgttgcaaattaaacaagaggaactcgctgaagactcaggatcggcatatggtatctgagcgttttctgggaagtctttgtctttttcgcattatttctgtttgatttttcatacttcatatatagcacacatgctgcagtggaaggtcagcctgcagaattagcggcgtatagccagttcgtaaaggatgtaactgatgtttcgatggttgtccataatgacacatctggttgatctcggattatgtggttaaaccactacattcattacaaaagatatgaaggattactacattaagtgccgtgcaagatgcatatctcggaagatgcaggcatgcactaaaaaaaacctcatgtaaaaacattttctttaaatatagtacaaatgcagacacacgtacactcaccgctataaataaacaccatatacatatgggtcagcgtatcttgagatagataaagtcaacataggcatcttgttgtcgacgggtcgcctaccactaaaaaaaatctaagacttaaaactgagtgggctagttccatcacaagaaacctaaccagttgagctacactcacttcaccatgtagatgcattcttatttttggcaattttcatatcatccattttcatatttttgataattttcatatcgcctctaaaatttacatataatacgtttactctatatacactttatagcatattttattaagtttttcttatggaggcatttttttgcaatttataatttacctaatatataaaaggtattttcttgagacattttaaccaatgcagagacacttttgaggatgtttatatgaccaatacaggcagtttttattgatttcttttaatcagccttggctcccctacgttaataggaggggtgatatttcgtctaatgggtcttctccatgtcctattagtcttagagacccactaggacttgagaaaccccggcctcaagcaagaaaacataagtagtatctaaattggactcggactcagggctgaaggtctgattgcctagaaatgtgtggtatgaccgcagttcattatccgatcaaaccaacatgacacacttggcatgaaggctctaatccttttatagatttagcctagatttgatccagttccaaagttggctatcaacaccatgccttgtccacaacttgatagaatgtggccttcaatttgaggagtccgcgagcacggccatgggtgtcgtggagagcacaatctcatagatgaacacttccctcatatcgtctagcgtgacagggctagtttcgttggaagaatgccagagtacccaccgtcatcgtcacacttctttttgctttttcacagatgaacacttcccttaatgggagagtttgtcttttttttccacttctctttgctttttcatagcatgctgtaggcgtgaggtgagcctagagaaggttatcagcgtagccaggtaataaaggatgaaactgaaatttggatggttgtgtatcatgacatctagagtgcatattggattatatgaataaatcagtacatttattttgaaaggtatgaggcattagcactagaacatgtttcttttctcaatttgctcaagtgccatggtagatatatatctcctataacatttatggtatgagatagagtgacgaacgatggatgaacaattttttgctattttatttccattgcctgtttgtatttttgttaatttgtgatcaacaaatagacgtagtactccatgtagataacccgcttgttgtgtcttttagcgcgcagatgagaaaatgtctgggacattttgggctcgatgaaaaggtgcatgtgtgcatgcatgggtgtgacaagggtttttaacaacactgttgctttcctcacctatgtcaacatcattaaatattcatcaagattcgtgcagtttctattcttagtatattccattttatttgctaatgtgcacaattttacttacttgacattttacacacaactgaaaccaactagggctcacatatattccacattcaattttcaaatcatatactacctttgtacagtataatgcccatctggtcatcttcgagagaccgtgctcttcgcgccgccagcaaaatctagcgatgtcgattgaatgtccatggctgttctcaccagaacaacgttgatcgccttcttctggctcggagattccaaatggacattgatagattcaaagctagaatacccagtgacctgtgtcgtgcactgtcgagacagttttgtcgctattggctccctcggagagatctccatgttagtggtaataacactgatggtgtggctcttctcacggcgaggccgtcactgttgatgcctccacgggcacatatctgccaacgcagctacctggacatgaacaacaagatgcacctagttagcaccatcttgcgggtcaggtacgagattgtgacctacaagtgtgacttcctccgtgagaattcatggtgatcgaaggtggaagacgctgaagacattgtgtttttcgtgtcgaagaattttaatattggttttggtgttgcaagcatctccaacattagttggaactgcatcaagaagatgaaggcactgaccatcatctggagatggttgacattacaactaacgaatcggatttgcaagagcttaccactctactatttagggtttagggttttgggtttgtcgccatcagctcactcaaagagatctccatcttcagtggcagtaacagtgatggtgttgctcctctcacggcgagcccattgctgttggtgcttccatttgcacacatctaccaacatagctacctggatatgaatggcgagcgatatctcttcaatgggtgccattttgcatgtgaccagctggacaaggtatgaaataatgatatacttgtgtgacctcctctgtgagaattcatggtgctccaaggtggaagatgtcgaagacacgtcattctttgtgtccaacatttcaatatccaattggaaccgcgtctacttatatgagcccatgttgtgtcaccaagatcaagaagacactaacgaccgtcatctacagatggttgacattaccgatatcagatttgccagtttgcagccccaccattcatgtccatgcatttcaccggacaccaacgtcacgttctaccccgccatgaccagaggtggaccaaggattgggccacaattctaatttttaaaagcaatatgtgcacaattcaattcacacaaaaatgttatgcacatgtactgttcacacaaaatgtttcacacactttccattcacacaaatctatacacaaacaaaaatacatatttgttgggtcgtaccacgttatagatgggagcaatgaagcttgcagttctgattcattagtgttaatatcaaccatttccagataatagtcggctgtgccttttttatcttaatgagtacacaatctaggttcagataagtaaatgcagttccatctaatgttggaggtgcttgctacaccaaagtcagtattaaaattcttcgacacgaaaaatgaaatgttcgcttgggcatatggtggagcatgcccaatgtgacctaggtgaaccatggttggtgggttaggctgcacactctaacaagtggtattatagcctaggtttggaaagctggaacaatttccatgggtcacatggtggaggagcccggtaacaagtcttcggggtcagatgggttgatgtgatgagggagattgtttagtccgatttgtaatgggggagattgttgggtttagtcctacataggtaattgattatgggggagcacgacttaaaaggcgaggatagttcttacatatcagactagtcttttaggttgtatatgcctctaagacctaaagtagtggctccgattaggactaggatggagcaaggccggtgtgacctgggttgtctatgactggtgggccgacctgcgcactataacaagcaactccaaatccaaaagaggagatagatttagaaagaaactgaaagtctcttccattgattcaagaaactaaacccaagagtattgagagaaatcattaacaatcactagaacataacatttcctctcaactgactgaaatctttcaggaccaactatatccatgtgaattagttgtccctacttgtaagccataactaaagtcacaggcttctgagaggaagctgtcataactaaattcattagggatgtttctggaagatataaattaaaggaaaagttttggtacttacactaccccataaagcgtcattggagtcggtcgggaaatccggcacctgtcaagcgacactaatgaagtgccttattggtgccggtgctaaaaccagcaccaataacaccctcataggtgctagctctaatttagaatcagcaccaatagggtggacccattttttatttttatgggtgtgacaaaaatagaaaaaaattgccacctatacatggtcccactctgtttccaacaactcacaagattttcacaccatttcatacgcacgtggttttttggttaaagcttcgaaccctcgacctctctgtctacatattatctcttactatcacacctagaaacacttgtctagaaagcaataattcttttgatactactctcatctaaaacttataatccatatttaacaccatatatgagctcaaatgaaaattttatcaactgcaaatctgtagatctcgtccatatctacaacttttatatagatttgtctatattcgaaatcatttagaaatataaaaaattcacttatccaagtagatcgaacatccaaacgacctcaaatcaaacaaatatcatcaacaacaaagttctaagttgtagatctcatcgagatatacaaatttgacataaagcgtatttttcatccaacttcatatgaaaaagttaggtataaaacaaatatatatgagtagcgttatcataggtgccggatttaattgataacctgcatatatatatgaagaccatatatgaaaaccggtactattgaatcgcacttgtaagtgccgatttatttaaaaaaactagcacctatgtgatgtctatatttactgctttattataacaactgacacctacaacttaggggtctattggtgtcaattttttatggaccaacaccaatgagtagttaaagatgtcggtttttatttgtaggcacatagaaagacgaggaaagtctcataggtgttggtttttttaatgtactagcacctattatgacgtttcccattagggttttttatagtgttattttacgtgatttgaaatgtatgatattaaacataatgactgaaccttagatgaagaaacggcaatatctaacacatcatattgcatgacaccagccttcgaccttgatttgactatacactttctcagactaagaactgggtattttctgatctttcaatgcttcacgattgttcagaactttacacaatcaacaatattaatcggcataaataattataatgacacttcttgacatgaagaacgggcacgtgttaggacgtggtatgcctgattgacaacaaaattaatagtgatttcacggttctcgaggagtggaggaggtacaggagtaaccccagttttgaatgtaaaactgggtacatctcggtatctcccgtattagggggttccaaaatttattaaaaataattaggacctattggtacctgtcagtaaaaattctcaaaattaaaaaggcggaatatgcatttgggtgacctggttggtgtgttctgatgtaagggctgaactcagttactagccagatgtaatcacggcatcataatgttcaaagtaactttaaatttgtaaattctgtatttgcctttaattacacgctaccaccataattgaagctgtacattcggttacaagtataaataagcccccttatatatgcaagcatgatgatcctaaagcagataattttgttcacaccaatgaatgtaaggggatcaattgaaatttaaattcgaattctcaccacctcaagaagtccagctttttaaaagcctaaacatgagtctaaatagaaaaaaaacaatagaaaacaatcagactatgcctagggcaatagtagattgaacgcagaaatgtcgattctttctggaagcatgcattgacctatgttctctatttgcagactgctcacgttagtatttacatcgcacacaagaactccaaacaacatgtctaactgtttgagcaggttattagctaataaacataaaccaaaacatggccacacttgaggacgcaagttgtctgcagtactgcaagtgaaatactgctcacttatatgtgggcccatatacttcttttttgttttttcctatttaggttcgcatttagtgatcaatcatattttttgataattgtcatgcatatgctagttagggccttcttaatcatcacacataactggcactatgtctccgaagtgacaaatgaattaagagagtagtatatatttatattgcgtgtgatctttaatttcctgtcttgtaaaataagttattgctagtgtccctgtaaaacatatttatatttcacgttgtccttttgcaacagagcatcaatatatttatctcaacatatttggaatacaaatgcacttctcaccaaacagaataaggaaggctgcagagctagcttgcttgcaaatgacaaatcctgtcatgcaaaatgagctcttgatacatacaaaacagtccatatttcggcctgtcctttactccctctttctctgttccacattataatacgttttgctatattcatgcatcactcatctgtatatactactaacattcatataaatttggacatatatatgaagctcatatatgatccatacatgaatctatttaaaacccaaaacgtctgataatttgaaacaaatcaaggaagaagaaggatttgtaaggtgcatcaatatttaattagcacaacccaatggaaaaataaactgcatttcagataaacataatgaaatttcatgcttgcaaagtcctctgggaaaaggacgatgttggttttggcttaatttcgcacgtcagatcttctcacgaagatatatagggaaaataaacgtctggtttattgagaaggattaagacgtacgattaagcagaagtggcccctaaaaactgagctgagtagaagcagcgatgatctctaacccctcatattgaatgatattatcctgtgacttttattgggcttggcacgctaactagtctcagactgggagttgcttcaattctcttctgatctttcgttatgatttcaacatttttcacctatacacataatcatcaaccccaaagctacataaaaaattgttgatgataataattcttatagacaacaagaaatgtgcgatgtgcatgtggttcagaaactaaaacatacacgaacaatataaaaataagttttactactgcgtgttattctgtcctataaaaataagtttttgctagtgccctccaaaacatttttacattttccgtcgtcctttcacaagggcgcatcaatatatttatcccaatatatatatttgaaatacaaatataatgcatttcggaccaaagcgagaataaaagggctgccgagagctagcttgtaaataacaaatcctgtcatgcaaaatgagctcttaaatatatataaaatagttcatatttcggcctgccctttagcatatataaggtgcatcaatgcttaattcgcacaacacaatggaaaaacaactgcatttcagaccaaatataatgggaaaaaaagagaggatgttttggctttcgcccactagatataagggaaacgtctggtttattgaaaaggattaagaaatagagtataagattaagcaaaactggcccccctccaaactgaaccttaataggagcagctagcgatgatctccaacccttgtattgcatgcatgatactagctcagactaggagttgcttgtcttttgataaatcttttactatttcaacatttgtcacctgtacacataatcatcaaaaaagttagccacataaaaattttgatgagaaggattcttatagacaagaagagatgattaatgcacaccagtatcagagtgtgatgtccatggttgaccacaaactacatgaacagggtgtcagggtaactgcattgattagtgtattctttttgtcttttctctctttttggggggttgtttggtgtattctgacttgtgctcatcaacacaaccgcaaaagtggctttgctcagtttctcacaaaatgtccattctatgggggcaattcttatcgtgccattttttatagcaccaaaatcgattactactcatgtcatgtgtgtaaggagataaattgattaattctaaaggcctaccatcttagttcagcattaacaaaataaaattatgcacaaagaaaaatactataacggagagaaaaacgacgttactaggtcaataagtcgacatctttatggaccgcataaatgccgccatacatattcacaataagtatgatatgactcaaacatctacgtattgtattctgaatcgggcacaccgctcatacgtcagaaatgaaagatccaacttattttcattaggctgtccattggtgacataaaccaaacatgtccacattcgataacgctcacatagaaacctaggcactaaaaacaacaactttggataaagaacaaaatataaggaaaaacaagtcacgtacctcatgtccagagattgggtcgaatccagcatagagcctctgaacccttcatggttgggcaagctatcttctctgacatgccagtagaaatatcaaccaattctggagaatgatcactgccatatgtaggctcagataagtagatacagttgctcttgatcttggagacacttgcaccaccaaagcccgaattgaaattcttggacatgaacattgccatgtcgccggcgtcggtaaccatggaccacaccggcgtttcgccggcggcgaggtcgcacttgtagaccacggcgtggtgaccgaagggccactcgccgtggaaggctcgtatagcgacgccgacgaggtggagctcgccgttcacctccaggtagctgcggtggcacatctgcgcaggctctggcagcgacgacactggcctcgccggagacggcgtcgcgtcgttgtcgccggcgatgttgatgatggagacctcgccgaggcagccgatggcgaggaagctaccatggcagtggacgatggcgctaacgcaacattccacgttcgtctcgatcagcgtccatgccgtgtcaccgacccggcagaacgcgacctccgacgagtccgcgagcacggccatggccgcgcacccgtcgccgccgggcgtcgtggagagcacgatctcactgaagaacacttccctcatcttgtccagcgtgacggggctgacgtcgccggacgaacacctgagtacccaccggccaccgccgtcgttcccgacgccgaccatctccacgcttctcgacgacgccgcggcgacgcgctggtcggccggcgggagcgcgacgcggctgcccgtgaacgggttgagcagcgacacggcggcggcctcgtccacgagcgccagccacccgcgcgacgcgccgacgacgaccttgccgtggagctccgggagaggcaaggagacggtcttctcctccaccaagctgtagaacgagacggtcttctcctccggcggcgacggcgaggtgggagtgggatcaaacgggagcatcaggagcggcgcgaacctcgcgaacggcagcgcggcgcgccacggcgagcagacggagcggaaggaggcggcgtcatggccggacggcagcttcttggcgatgatctcgaggagctcccttgggaggccagagctccagtccagcggtgacctcacgcacgccatggacaaggatatggacaaacaacgatttcaatggaagatggtgagaaggggattgatggtgaagaaagggattcagctgagctcaaacaaatgaatctacaaatggattcatgaccaaagaatttggctagcatgcatttgattgagactatggaagatgagacttggaagatgatgctatatatgagattatttgtcattgtttttctgtgtttctctatgctttttcattgcagctgcaggcatgaggtaagctacctccgttgaaattgtgcattcaatattatcttggatggttgttcataatgaagatatctcactgatattgaatattgcacgattaaatcattgcattaagtatgaaagatatgagaaattaatattacattaagtactttaaactgattctgacgtcaagtggcaagcaagatgagtatataattaagttcacagccgcagtcgtttcttttccatccctttctaaacatgagtaggaggtcgtgcattcctttgtgggtgcataaccactgtaagactttctcctcaatccaccaatcgagtcaatccctaattatatacacctgatccgttgtaaagcacggtaatattattagtaactataagactataaaggtaacccgtgcatttgtgtaggtatgtattgtagaacgagttcgataaatttatacgggcaaaatatcaactgtatggcacctgccacgctttaaaagtattttgatgaactactgt

SEQ ID NO: 889 - DNA, 15683 bp, Oryza sativa
caatgctgattcattagtgttaatatcgaccatttccagataactatcaactgtgcatttttgatcttcatgagtacagaacctcggttcagataagtaaacacagctccatctaatgttggaggtgcttgctacaccaaaaccagtgttgaagtacttcgacacgaaaaatgcaatgtcctcggaatcttcaaccttggaccacaacggattctcatcgaggaggttacacttgtagaccactatctcataccttgtccaggtagtgacccgtaaaatggcgccgacgaggtacaactcgccatttatgtccatgtagctacgctggcagatatgtgccggcggaggcatcaagagcaacaggctcgccgtgagaggagctacaccatcagtgttatcgacgctaaagattgagatctctccgagggagccaatcgcgacaaacctgtcccggcagtgcaccacacacgtcactgggtactcgagcttcgaatctaccagtgtccatctggcgtccccgagccggcagaaggcgaccaacgtcgagctcgcgagcacggccatggccatgcaatcgacacctctggagttccttggcgacgcagacaacacgatctcacggaagaagacatccctcatgttgctcaacttgatgggcttggtggcaccagaaatgtagtgcagaatccacgccccgtcgaccatggacaccgtcttgtaggacgccatggcgacgttcctgtcggccggcgggagcgcgacggcggcgccggtgaacgggttcagcagcgtgacggccgcggcgccgtccatgagcgccagccacccgtgggacatgccgcaggcgaccttgccgcgtacctcggggaggcgcaggtcgatggtggcctcgtcgtcgtcgtccatggcgcagtagaaggtgaccacggcggcgtcgccgtccggtgagtccggatcgaaggggagcatcagcatcgggtagaacgtctccagcggcagcgcggcgcaccacggcgagcagaccaggcggaaggaggcggcgtcgcgcccggacggcagcttcttggcgatgaactcgagcagcttccgtgggaggcccgagctccagtccggctccgatctcctctcagcaggcgcagccatggacaagaacagtatgatgcccaagaagatgctgaaaggggattagatgatgcagaaaggggattcagctcaaacaaacggattcaggaagatgaagatcgaaaggggatttgatatgatgatgcagaaaggagattcagctcaaacaaacggattcacgtacgagcaacaatttggctgtgagagactacgcgagctgaggatttggggagaattcgatctctgctccgatgaaaccgaggaattatgttaggagcaagagaggaactcgatcggtgaaaagagtcagcaaaagtaataatggcaaaagatctgtgagcgttttgtgggaagaaatttgtcttttctcccattttttgtctttgctttttgattcttcatcgcatgctctgaggggtgaggtgcgtgagcctgctgctgaatcaccggcgcgcgtacgtagccagttagtaaaggagtttacgtaagtgatgttccgaacttccgatggttccatgatgacacgaataaaccaccagattcactacaaaacatattgatgaggattattagattttttatcaactgcctcgtttactgtaaacctataaacggtgtgatttcttaaaagaaaacttttatataaaagtttttttaaaaaattcaaatataaacctatttttttaagtttataaaaattaatacttaattagttattttctagtgattcgtctcgttttgcatatggtcatttagctaaccgaacatgctacttcgaacaagccctaagtaacaagcaagagcatatctccgggcacatttatggcaccacatagctagagtgacgatgtagctagagtgatgtgataagtattttttttgaacgactcgtacgagacggtgcgaagttctattgatagagcaggaaaaaattacaagattacaaccctggcggatcgtaaccaggaaaaatgaaaaaatatagcaccacccgcacaccgacagcgccaacacacaacccgggagaaggctagcaccgaaccgactgccgctagaccaacaaaggaacacagacaacattgccccctaggggatgccaaaacgacgtcttcaagaagagaagcgacggaaaaaccgttgctgccgtccgtcggggctcaaaggagccaagactgggctttcgcccggcaaccactcttgaggggtgagacagcacgacaacgccctcaagagggggaatgaacaatcgttgtcggtccagctaaggccaggctaggttttcacccgccgctcaccacctgcgaatccatggctgacgcaccgatgctccaccaccactcaagctctgccgacatgtgggaccccagcaccagcgtcccctgccggccaggctccgtgcgccgaagatcatgccacatccaccggtagctcctcctcacaccgaggtcgcctcctccaccgtcggccgcgcctctcgcgccaagccggtctcctccaccggatgcgtctctcgcgccaatccggcctctctccatcggctacgtctctcgcgccaacccagcctccatctctgccgcctgcgcctctcgcgccgagccagtctccgacccctcctccaaatgatgccacgccagccagaagcagccgtttgccacgccctcagctagccgtccgaagccgccatgcctccggtgaccgtggtcaccgccaccgcagccaccgctgccgaacgcccagctacctcgccgtcgccatcctcacctcctccgccacagccacgtccacggtcgccacattcatcgccacaagccgtccgccgtccgccgtcgcagcttgcagccaccagcacctgctgtcgccgcctgcgagctccgtgttgccgaccgcgactccacaccgccgccctccacgacgcctgcacggcaggcctcgccacccaagaggctgcacgaccgcctccacgacgcctcgaccaccacggccgctgcctcgccagccagccgccgcagtcgatgtcgccacaaccgccgccgccgtcattgccgccgtcggcagccgcaaccgccgccagccagatttggttagaggcgtcgttgcctcctcccgcatcaccgacgtcaccaccggctctctcggcacctccaccgctgcacccgtcgtctggccgcgccgccgtgctcgggtactggagccagctccggcagcgtctcccgccaggtcgaccacccaaacccaccgccaaacctcgccgccgagctaccaggacgccgccgcccgtcgctgggggaccggatccgggcaccacggcactggatctggacgccgccggtcggcgccgacgccatgccctgagctcctgccgtgccgatgtcccgaccgtcttgaccgcgagcgagggagagagagccccgccaccgccgtacttgcagccgcctggctttgccggcggcggctcgggcggcggcgaggctgggagggggggggaagagaagggcggggacggcgcggcttgttcgccgcccgcgtcgcccccggacagagcgaccgggcagcactgagcaagtgtgtcagtttatgcgataagtatggacaaaattgttttgtttatatgggaaaggagctttgaactttttgctgtgtggcaagtttgtatcttgttgtttcgctagcaaaacatgtgtctcgcaatcatactttatgtactcatacttaacttgctgcatgtgtcttagcggacgagtccatgtttgagaattagtggatctggtggatccatgcatgatttatactgcaaaccaggctccatagatagttggtttttgataactattcatgggcacaaacaaataaactaactgttataagatagaaaaatgtatttaaataagttttctaagaaattcatatacgggaagttctttttgtttttttttttttgaaaattgctgaattgaatggttctattcctttagatattcgaatatgcaaggtttttgtaactatagtttgcaaaagaacaaaccatgttggtataccatgactaaaagaatacaacttttaaaagttcagtatttgtgatggtttgtcttttacccatacttttcacaaaaaaattggttaattttttttgataaatttgataatggtgatgtcaaaaagtaaatatatacacttgtctgatagcatgtatattgtacaactcatgtttatcgatggcattttgtatgagcaagtgttgataacactttgtatattttctctatatcactaaaaacacaggtggctgcatcatttgtgagaagtctttgtctttttttcctcattatttccgtttgatttttcatacttcataagacatgctgcagtggtgaggtgagccttcagaatcagcggcgtagccagttcttaaagaattgtaactgatgtttcgatggttgtccataatgacacatctggttgatctcggattatgtgattaaaccactacattcaatacaaaagatttgaagtattactacattaagtgttgtgcaagatgcatatctcggaggatgcaggcactaaaaacaaccccatgtaaaaacattttctttaaatatagtacaaatgcaggcatttataatacgcgtacactcacctttatgaaaaaacactatacccatatgggccagcgtatcttaaggtacagataaagttaacataggcatctcgctgtcgacgggtcgcctaccaccaaaagaataattagctgtaaatgcgagcacctgtgtcaaatctaagacttaaacctaggtggactggttccgtcacaagaaacttaaccagttaagctacgcttcaccatgaagatacatatttatttttggcaattttcatatcatctatttttgtttttgacaattttcatattgcctctaaaattacgagttacaatgtgcagagacacttagtacaaacaatttaaaatttacatataatatttttactctatatatactttagagatatttttagcatattttattaactttatcttatagaggcatcttttatgcctaatatataaaaggtattttcttgagacatttcaaccaatgtagagacacttttgaggatgtttatatgaccaatgcaaacacttacttttgagaggatgtttatatgaccaatgcaaacacttttgattgattccttttaatcagccttggctcccctatgtttaagggaggggcgatacactagaacggataccctcatctcaatcgggcggtaagccccatctcaatcgggcacaacgtccgtcacaggctagaagtcattgatgtgaagagttatctcaatcgggcaaacggccgtcacggatgaatctatctcaatcgggccctaagtaaagcccgtcaccgatagctttgacccatacgaccagtcaaactatagcccgtcacagatgacctatctcaatcgggccacaattagtgctcgtcacagatgactactaacctttatcgggcctaaactagagcccgtcacagatgatactcatctcaatcgggcctaaactagagcccgtcacagatgactactgacctcaatcgggcctaaactagagcccatcacagatgactattgacctcaatcgggcctaaactagagcccgtcacagatgactactgacctcaatcgggcgtaaactagagcccgtcacagatgactatcatctcaatcgggcatttagttatggcccgtcacagatgactataatccataaaaaaaataaattttgttttttggctagcctcaggcctttgctagccatgcccactgcagaaatgacagaaacaaacacagatattcaatatccccagctccccagcatcacccattcatatacatatgcattcacatacacagacatcaatatattttacacaaccacacattcacagccatctcatatttcacatctattcacatatttcacatccattcaaatatttatcatatttcacctgcaaaaccaagttaattggatcaaatatttatttagcaagtcttaacataaacatatgaaatatatacataaatataagcatcacagttacatcatcacagttgcataataagtgttcatcattgcctaaacatataagttcaacattgttcatcattttagtttaagcctaaacattcctttggtgttaattatttcgcggaggatgaagctggctatctcctcgcgaacctcctcaaagctggtaggcagagacttggttattgtaccctacattatcataattctagattagttgatcgatcatatataagtactaaaatgtagttagtctatcagaattgagaccaccgacctcaaactcagccaaagtcttcaccttttctctgtacagaaggcgcatgttgtggcacacatggaatccgcactggtcacctatttgttgcttcaccaggaagtcttttttgtggatgagggtgtcatgtcctgtcttcctgaggcctcctctttgcacgtattgggcccacgcttcatctatcgctagttgaattggggtccaatcatatgcgttcttatcaattctggagtttaggtagtgacatttactccacttaggtgttatgaccagaaggatccaatgggactgtggcattaatatagtgaaagttaattaagtactgaaggaatgtgtcatgctgttgtgtatatttagataacacacttactattgattataggcgcacataatgtactccttgtctcggcaggaccacaaggtgtcgtagatgtagttgatcattccttgacggtcattctggagatttgtgacagtgaccacttgtggatcatggaaggcaacttctggtgcattcttctgacaccattgccaacttaacctacacacaggataaacgatcttgtaagctagttaatccgattgttattaccagattgagttgggcgacaatacttacaaggagtagcacttaaggaggcttgtgtcaaccgctcggagtctgtagaggtcgaatagatccttgaagtcgacgacgatataatttgttggatcaaggaatgactttccatcgtgctctccaaggatatcagtagctttattcggcttcctggcgttagatttctccatgtagtatgcgtgaaggtccttgcaagcggtgcccattgcggcaagcacgtcatctccaaccaatggcatgcctagttggaacccctatggagcgacgtatttcttcttgacctctttgcccttagtctcttcctggcccttgcccagatctagctttcttggagctagaagcgaggactgcacctttcctccccttcctctcccctttgctttgggtttatcgagagtaattctctgaggggaagagtgtgccttcccgctcttcttcatcggtgggggttcatgaatcgccttgctgtcggcctccgttcggtcatccccaaaatccgtgtcgtactgcaactgcacatcgtaagattgtgcatgacgatcttgagcaggaggggctgaaggagcagaggcgggtctctttggtggacgactgcctgatgcagtggttggcctcgctgtaaccctgatctcaatgaggtccttgggccatttgatctcaatgaggtccttgggccattggatgaaggtaccacgggcatttcctagtgagaggacctcgtcgttcggtggatactttagtgggaatagctcatattccggcttcaccgagtcgacttgaacttttgcacagtcgcccctgagttgcgctccatgcactcttgtctctggggtcgacttgtacgcaagtccctcggctgctggaaccgtgaaggtcggcatcaccctaactgtgagggtgcagctcgttggttcctacgatagattaatcaattttttaagaatattatatatcatatggactcgttaagtctttcatgcattgtggacgaaacttttaccgttatgtggtcgacggcgctgtcgaccgatgttggattttccgccacctcagttgatgcgtagctgctgtgtttttgggtgggacttcctaactcttcgtgcgcagcaacagcagcggcctgggtgttctgttgctcttctcggatctcttgcctaatcttggccctcattgactcgagcttttcgtcgaattcagatgtcagctcagctcttatcgacgcccggatcttggcttcaaggcgtgcatctttctccgccttgttggaagaccgcttcttgtactgccacgcgtagtctggtaatccatacttccagggaacagaagacccaatgccccgtgtccgtccacggtgttcattgttgcccaacgctttcgtgaggaggtcatcctcacgtcttcgagagcagacctcttgcgaggcttgttgctcggcaaccaactccttctgcattacaatttagtggggttaaataaactgcatgatcggaacctttgcaaacatctagtttgactagacacttactatagcttcatacactcgttgatcttctggatttggcatgaagattgtgccatcatccttcttctggtacctggccctggcccagttcctagcccaagggtgtgggatatcgccaaacacaagcggcgtgttcgattcctccgcttcttcatcctcatgctgccattcctcttccttaccggcatatccggcggtgccaagccgatgcagatgctggttcttggtctggagcaagcgatatgcctcgctactagctctggactcgggggtcgacttcttcgcatggaattcctcccagacctgttccgtgatccaagaaaatttctctcttggatctggattcgccgggttgtagacgaactcgccgactagcttagtcttgaagttctttcaagcgttgcccataaccttgaaagcagcccgcctgagacggtcctcatgctccgcaggataatcgaagctctccttgaacgttagccaagcaatgtccttctctgcggccggcacgtgcttgatgtcatcttgcagaatattgaacttctgcctccctatgaccccgcagatagacctaaatcgactcaatattttccttggagatgtcggcaaccctacggcgtccaccactgttatgcggaaccgttccttagggattttgttccctgtcctaggagtacgtgcccttgaggacccactagttgtcgtcgacaatggttcgccttgctaagacatcgtatacttttttctaaataacgaaaatacactatttagtgcttcaatggctaagaatccaaaattctaaaatctattagtcacataaataaactaaattgcacatctcacagtaataaaatgaattgaatgtcacataaaaataaattaaacatttcatctattcatctattcatccacattcatctctaatcatctattcatccacattcatctatccataaacattcatctattcaaacacattcatctaatcatatattcatccacatgtaaaatgaattgaatatcacatataaataaattgaatatttcatctattcatctattcatccgcattcctctctaatcatctattcatccacattcatctatccacacacatgcaagtattcaaacacattcatctaatcatttattcatcacattcatcaatcgaaccacattcatctattcatcattcatgcgcgatggaggactcacctgggggtcggcgtcgggcgttgggcgtcgcaggctcggtggaggcggcggcatgctcgatggaggcggcgtcgggcgtcggaggcttggtggaggcggctgcctcggtggcggcggcctcgggctcagtgagggaggagtcggcgaaggaggagttggcggcggcggcgccgggctcggtggagggcgtcgccggggtcggtggaggccgcggcgtgctcggtggaggcggcgtcaggcgtcggagaggaggaggcgacgacgatgaggaaggatgtcgccgggctcggtaggggtcgtcgttgaggaggcggcggcggtctgtcacatcctgattttcgtttcaggatttataaattatttaataaattattattagaatttatattaaatgttcattaatttacaagtgaagttaaatgtgggaaataaaatttcctaaatataaagcatggatggatttaatttttattaaattctccatgattaagtctactctctgaaattttctcggatttttcggagctcaattcctaaatgatacaaagaacagttcagtaattatttgatcattaatgatctaattatcattgttaagagcttttcttgtttaaaaatccttaaattataaattgttgtttaaaaggaattattagaaatgatcttaaaagcctaaaagagaagatctaattttaatttgttaaatctcaatataaaattgggctagataaaattttgttaaatactttacttgattctatagttcctagatttttctgggatttatttgagccaaggaagtatttttaataaatggaattgcatttcatgaataatttaaatagaaaaaggttttaaaatctttcttttggttttgggccgaaagtcagcccaagtctctctttccttctccctctctcctccccggcccagtcggcccagtccgccgagccgccgctctgctttctctctctctcgctgacaggtgggtcccacctgtcagtcttcgtcttcctcgcgccgccgccgccgcccgaaccctagcgccgcgccgccgtcgtctccttccaaattcggccgcgcctttccttctccggtgaaatcaattgaggggaaacaatcttcgggatctcctctaccttttctcttttggaatcatcgtctttttcgctttggaagttcgtggattcgaggtcgaatcggatcggtctttttcctccgaaccctaacctttccttctcgtcgccggtcactgtgggcctccgtcgccgctctctagcccctttaaaaggacccccggtgtcgccgctacccgccgccaccctcgccttcgtctctcgtcgtcggaagcgccctagcaccgtgagacctcgtaccgcagtcgtcgccgtcgctccagccgtgcttcgccgtcgctccagtcgtcgccatcgctcgggaaggttgccatcgtggtcgccatcgcgtcgccgtcctcgtccaccccttcgccgtcgctgaagaccgccggagcactgtcgccgtcgtcaagccgaagagtgccgccgtcttttcctcgacgccgccgccgtccgttcatcttccgccgtcgttttggtcatcggtgagttcgccgcgtcactctctacgtgctggtgccctccgttcgcgtcgccgcgccgtcgttcgccggcgagtttgcaagcccgagccgccgccggtggtgacgtcaccgctgacgtcatcgggaccatccgtcgtggcccagtcatggaccgttcgatctcggccgtccgttttggataggatcgatctcggtcgttcatttccgtgagccgccgccgtgcacccggtccaccgcaaaccctagccgctgacgcaataattcccttttccttttaaaaaataattcattattgcgtcataattcaattaaaatccatataagtgttttaatccgatttaatctttaaaaattcataactaattcattgtaactcagttttatgtggttcaagttgcaaaagttgtataaaataaagatctacatattaaaattatccataaattgaattaaatttatttaatcctttttaaatgggctttaattagatttaatctagtaaaattcttaataaattcatttgaagtcagaatgaggccgttcaagtctcataattcatctaaaattatgatctacatgtttgtttactttttatgtactgtttatttggtttttattagtctttttctttgttttgcgtgttagcttgtcgtttccgtcgttgcgaaggtttacgagtgcgccggaagtatccaagaagattaattgaagaccgattattgcaaggcaagtcacacagatcctaaacacaatcctttgagcatgttgatcctatatttaaattctctatttatttcaactgtgcatttattttcgaatgtcactgggtggtgtgaatctattcctttgttatggcctgtttgcattgattactttattccttgataccttgggttattataacttgactagttgggctatatatattggttcagctagatattagatatgattgcttagccatgcttagaaacattagcacactattgggataattaatgtttcattattatttaatgatggcttaatgatagctcgcgatggtcaatcgtgattggttaattaattacttgccaactaaaacttgataatggtgggttgtgagcacatggttttgagagtcgtgctcatgacaattaaggaccggttcgcgagctactgttgtgaaacattaaccgtgccaaccacaagccagcgtgggcaacggctttaccttttgtatagcatgattcattgtggagcaccagactgagaagtggcggagataagcccacgggggtcgctggggagtccatgcctgtttataagggggtgattatgatccaggaaaggtgcgctgtggtggattatgttgtgcaaggggtattgtcatagctcctttccgaggtaccgtggtggtattgaggcacatggtgacatgttgtggggctgtgtcttgtgggtacagtggtacacctctggccagagtaaaactatttgaatagccgtgcccgcggttatgggcgggttgagcaatgtttttcgtgattagtctcacacctctcacaataattatggatgttatacctggtaataatttgcttagctcctgatttggagttagatctgtacagccgggtatggttgttcaggatggttgggcctgtgcagcatgggtgtgctgttcagtgttgattaaaatttctgattaattactctactgttttactactcttaactctttgctaaatgctgctttcgcaaatgagactatattatgccatcctttggtatccttgtgcacttgcatatttgctgtgtggcttgttgagtatgtcatatgctcattcttgcaataatcaatcaacctcagttgaagaaaaaggatctagaaggagaagacgtttggcttataccccagttgagctgcctgtgggagtggagccggagcttcgctagattttattttccgctgcagttttcttcatggtgaggactaagtgcctcttaagtaagtatttatcgttttagttaattggatgaatctgtatattaaattgtcagtttgtgtacctcggctgattcctggacgaggattttatgcacaaataagttcggaaattactagtgaattttcgggcgtgacacggtccgaatggagggcggaggaggctcggtggcggcgactgcgggctggtggcgacggcggcgggctcggcgatggaggacgacagcggcgctagggttctaaggaggtgggaaactgtagcgggacttagaaaaatttttgatccgatctgagaaaccctagttatagtagagtgatgagtcatctcaaacgggcattagtatggagcccgggccctacggcaaagcccgattgagatagattaatctctatcggccgtaaactaaggcccgtcaccgatgacttatcaagatttacaagttttattttggtcttttttctatacaacttttttcccaacatcttgaaattgaatttgaatatatgacaaatataaacagcatttgtaaatactaaatgatttcaaatggaaatatggtcaacaacaaagttgatcctctcatcaggatctacaacttttcttttggtcatttgtgataaaacaaaattagccatattaatgactatacatatcaagtctttgcaataaaacaaaatacttcattcattacaatagataagtacaaatgcatcggtcacaaggtcatgccttccgtatgatctgaacgagcatatgccacatgctcttggggatcatcgtcaaggtcaatgtgaggtcttacatgaagattatggctgtattcttcttcatcgacgacgttgtcaactcctacaattcggcgctttccatccctcacgatgtgcatcttcttgtttgaagggtcttttatgtagaatatctgctcaacctgtttcgcaagtacaaattgttcatcggtgtatcccacctttgatagatctactaaagtgaaaccttccttgtcagctttgacaccagtccgtagattcacccaacggcagcggaacaaaggaaccttgaacttgacgtagttcagctcccagatctcctgaatgcagccgtagtatgtgtttgacccaacttgatcctggaatgcatctatacggacaccactgttttgcactgtgcttttgtcatcttgtttgacggtgtaaaatgtgtatccatttatatcgtatccttgccatgtgtctacggtccaagacggtcccatccccaacaactgtactgtctcatttgggacatccgtggacattgtcacacgattcttgaaccattcgttgaaccaagaattatgttctctgttaatccatgcattagatcgtcctaagttctcatctcggattttctctaagtgctcctcaaagtatgggccaacttctgccatatgttggagtacagcgtaatgagcctgcacgtacgacgcttgatcgggcctaattcttttccttccgattgtgccaacacctgacaaccttccctcgtgacgagacgcaggaactccgataggatcggcatcggacatgtaattgacacagaactcaatagcctcctcggtcgtgtaaccttcaatgatgctcccctcgggtttagctctgttacgaacgtacgacttcagaactcccatgtacctttcaaatggccacatttcccttagaaaagccgggccacatagttttgtttgcttcaccagatgaacagggagatgaaccattatatcaaagaaatatagtgggaaaaacatctccaggtgacagagggtattcacaatatcggtcggcaacccatctagatcttctggatctataaccttctgtccaattgcattgaagaaggcgcatagacgtttgatcgtgtgacgcactttcggtggtagaatgcctctgatagcaactggcaagatttgtgtgattagcacgtggcaatcgtgagacttcattccaacaagttttagatcgtccaatttaacatacttacttatcctcgctgaatagcccgatggaactttaatatccttcaagcatgataacattgcgatcttctcatccttcgataatgtgtggcaggctggagggaggtacactctacctgtctctgcatttcgtatgggctggagttcactgcgaatattcatgtcctgtagatcaaggcgcgcgttcaacccatctttgtcttccggaatattcacatcaggccaccaaactctcac

SEQ ID NO: 890 - DNA, 1974 bp, Oryza sativa
cgataacaggctccaggaatacatcgatatcattgccgggttgtctcggaccttggattaacaagcacaacataatatattttcgtttaaagcataaccatggcgggaggttatagttcgcaataagaactggccaagtggtgtgagtactactcatgtcaccgaaaggattcatgccatctgtacacagacatatcctcatgtttctagggtcggcagcaaagtctttgtgttttcgatcgatattcctccattcaatcgaatccgctgggtgtctaagcataccgttattccttctctccgtggcgtgccaacgtactaacttcgcttcgttcaggttggcaaagattctcttgaaatgatcaatgataggtagataccacacaacctttgccggaccacccctctttgacttatttccttcgtcagcacttttctttcgcttgtatcgagaagccttgcagacaggacaagcatccaagtccgcatattgcttgtggtacaatatgcagtcatttggacaagcgtgaattctacggacctctaaccccagtggacacagaacatgctttgcttgtatgtcgtcgcgggcaatgtgttctcaacaggaagcatagccttcaaaattcctaaaagatctgtgaaactcttgtctgtccatccactacttgccttcagcttcattaggtccaaggtaactgacaacttagtgtgttttgctttgcatccagcgtacagaggtgtctcggaatcactgaccaacctgttgaacttcattccatctctctcattctgggatgggtcctcaacgtcacgtaacatgtcttgcagcagatcgtgatccacatcaaccatttcaccgcccaatggagaaggtataaacatgtcatgctcatcttcatcttcctgattatgtgcaccacttctgtctgctgctactccacttcctgattcttgcactccatgcttcacccaacatgtatagcccttcatgaatcctcgttgtatcaaatgaccgtgtacatcctctgcgctatcaaacatattctcattcttgcaatctgcacatggacaacacatgtaatcactgtttcttcttttccgatcctcctccgcggcattcataaaatttattatgccctttctgtactccgtagaatgacgtttcaaatttttcgcatacatccaacttcgatcgattgctacaaaataaaaaaaacaaattacatgcacatcttataagatcagtattgcaaaagtaatacgtgatgaaattgctcaattaatgattaatattactcacttgattgatccattttgatcacttttgggaattttctgtttttcttggaaaaaaagacaaaaaatcgccccctacagcctcccaccaaaatagtgaacagtaggatacagttacactaggtggtggggggtatttatactgtgcaacaaatatctgtaacggccctgaaacaatcaaccgtgacgggcatacaagtaatctctatcgggccttaataaaaggctgtcaaaaaagagtgtcatctgtgacgggtattaaacttatctcaatcgggcctctagttggagcccgtcacagatgaccctcatctgtgacgggcttcgtttagggcccgattgagatatggaaccctcatctcaatcgggcctcaactatggcccgtcacagataaatgtcatccgtgacgggttttagttttatgccgatataccatggctgtgcgaccatatctcaatcgggcgaaacttcggcccgattgagattacttccttgtgacggcccgcaaattccaatcttgttatgggccatcacagatggaaggatctgtactagtgatatttcgtgaactgaggattaatttggggagaattcgctctctgctccgatgaaaccgaggaatgtatgttagaagcaacagaggaactcgatcggtgaaaagactcaggaaaagg

SEQ ID NO: 891 - DNA, 979 bp, Oryza sativa
tcctccatcgccgccggttgccgctggcgcagtgccgccgcctccgccaccatctcctccgccacgatcacgtgcatttgctcccggcacagcgcggacacctgcttttttttttttgtccatcgatcacaccaaaaaaaagagaaaaccaaacaaacacacgtcactgatcgagcagtggtagtaaaaaccaaaaacgaaaattaaacgacaaattttataaaaaaaaaacgtgtcgacctcggtttcgatggtgctagaacattgccaggtggatcaaacagtgcaatgcggtacaacacaacagcagcattttcgcaatcaatcaatccaatctctatctctttttctctctctctctctctgttttttttttctttctaacccaagattatgatgagtaggattagcatgaaataatgatgggattaagcaaaggattagcgggggggcgacgtacatgggggccgccatggccgtcgaagacggcgaagaagtgcatcggcgagccgtcgagccaggtgcagaaggagggccggagcgagacggcgtcctccatgtcgcgcatccgccccgcgagcgagacggacccgaacgcgacgggccacaccgcggccgccgtcgacgccccggacgggagcgggagccgccgcgccgcggcgccggcggtggaggagcacccgtcgtcgtcgcggtcggacgagcagtcggaggaagccgccgacgaggtcggggacggggacggcgacgcggaggaggccgggaggctcctcttctcgcccccaccgttgctgctgttgtccccgtcctcggacgcggcggcggcggcggggacgtagcggcgcctgcgcaggcggtggcattcctgggcggccgcgggggggtggtccccatcgccacccggcatgttgacgccggcgctagccatcaccatcaccgatcatgggaagggaggaggaggagagggaagaggaggagg

SEQ ID NO: 892 - DNA, 1106 bp, Oryza sativa
accccagagtccgcacatcctcaaatacaaagcacttccctagttagatgtaggttagacttcccgttcgagaaactctaccttctacctgccctcaatttatgcacgattaatgaatgccacctgggtggaagcgagaggtggaaatggaaggtcttagttcggaggtgggatctctacctgatagttgcattgccattcatgatgatcccctggcattcgtccattcagccattcaccattcacccattcaactggaattttggttgaatgccggaattgtgtccacaaattgtggatggatagttggttggctggctggatggctggctggatggctggctggatggatggtgaatggctggcggcggttcggttgctttgaagcatttgttgctatctaaattccatttaaggtcgtaccttatcgcccagcatcatcttattctctatttgtattccctccatctttcagatacggatgtagccttggatgtgcccgtgcccaatgaagaggaagagcgcaacatgaaacgtaagtacaaaagtaccggacacccacccagatcccaatagaatccgccaaatcctgcgggaaattgtaatcccattcaccagctcctacatttaattaacaagagaactattgtatttatctaacacctggattatctccacctttcatttgatccctatttatagattacgctgcgttgctaacgggccgcacctcctatttcctcaagggtgaggaaatgaagtccatgtacaccacctacaatccgcagaatgtggtggccaccgcccgtttcctgttccacaagaagaatctatactactccttctacacctcatcgcgaatcggtcgtccgcgtgccattcaattcgttgatgatgcgggtgtaatcctggaggagcatcaactggagaccaccttggcgggcactctcagtgtctatcagaatgccacgggcaagatctgcggtgtctggcgacgagttccacgtgattacaagcgcatcctgcgcgacgatcgtctccatgttgtcctcctctggggcaacaaacagcaggccgagttggctctggccggaaaggtggccaaa

SEQ ID NO: 893 - DNA, 649 bp, Oryza sativa
tgctatgattgccccatatgacgtagatggtaaccgtattacgtacccttctcttgggggacgaaactacaactctactacccctgttaaatttacaaaactagcaaaaccacttaaagtcggggatacagaggtttttgtagaagatgttagtctatggaacggacaggcaccgcaagactaccaacgtagtattatcatgtggggttataaaaactcgttcggctatacttatcccgatggaacgtatagtcagctaatgcagatgaggacatatgatattggtgcagttgacaccacagctaacaagattacgttaaacaagccatgggcagttgcaaacccaaatagttcagatgggattttcccagtagggcatacacttagcccaacttctgacggctccacatatttgtatttgaatggtcacgtaaatatacaagtacctactacgtacaccaagtacagccatttgattagtggctcttctgagtttgctaatacaacgattatcccagtagaaacaggttttattcaacttggattcttgttgaaccgtgatacaacaggtgaaaaatcttggctaaatggtttacgtctacgtgactatacagatacgtataaactaaacgatgacgttagagaaaca

SEQ ID NO: 894 - DNA, 11431 bp, Oryza sativa
  unsure (1)..(11431): unsure at all n locations
gggccgtcaacgccggatttgggcaggtgagggccgccgcagtcgcccacgcccaccaccaccgtcgcaggagccagtcgtcagagtgaggaggaggggggaaaggaatgggttagatgggagacaagtggggggccaggagagtaagggccgccggatccacacggggcagcgtcgctcgctcccggttgccttctcgttggtggcggcgcccactcctactcagttaggagggaaagagagagaaaagaggaggtagaaaattttgtagtttttttatttgaaaaaaattgtagtgttgagagggaaaagggataggaggggagaaaacatctatagagaagaggaggtattttgcatgcggaccatttatgtggttcgcgaaaatttatttttgcatgtggccccttaaaaggaccacatgggaaaataaacttatttttgcatgcaactccttaagtgacttacctgcgaaaatatatttttacatgcggccccttaaggagttgtatgcgaaaatagaggttgatttttgcgaacactatcaattatggtccatttgcaacttacaggggtcctcatacagaaaaattgttttttaagtagtggtagctaatgcctccatctcaaaatatattagtaatacaatttaagacagatatgcatatatactatctggtattaaattgccatattttaaatagaagtagtaggtcagagtatgcatgcatgcagctaatcttatctatgatttctttttgagataacggaaaatgcaaccttatctgcatatgttagatatggaggctacatgaggaacacgagggttgatttaattaggatatatattgttggtcagatactaagtgatatgttggttcttcttcgcaacgacttaacagtgagtgcttgctgatttgcgtatatttagttaggacttgtgggacctaattgattttgggaaggtttgttaatttgtttaatttgatgcttggattttagttgcgtttctccgtcaattggactggattgtgattaattattcctattaattgggtacttgtgctgtcactcaaattttcactatttaaatatttttctagttaaattcttgtaaaggatgtatttatttgatgaaaaatctgactataaacaaaggtggatgattaaataagaattaaatattacatataaatgtactccctctgtttcattttataattataagatatttcaatattttttctatagtcaaacttatataatttatacgaagtttatagaaatacatagcaatttttaacacaaatatactagcaaaatatatttaatgttagattaaacaaaactaatttgatattatatatgttgctatattttcatataaagttgagatatttaaagaagtttaattttgaaaaaagttaaagcgttggagcgagtagaaaatttttggacaaattatactctaaaagtgtgccacaaaacgatctacaaataatcgtggcctggtaatctacagatacttaaataatcttgagtgaggatgataattgtgggccctactaactgccatccaaagtagaggcaaatgactggctcgtttcaaaatatcaaggacaaaatcgtaaaccctactttaaaatcacaattagaactaaaagtgagggcaaaaatgtgattgtccccccccccccaaacaaaaaaaaataatgtgtgagctagagggtttacatgccaatatccctccctaattctgttggaaaaaaaaagtaatgtgtggagctagagggctacatgtcaataaccttaactgccaacattttatctttacttttttttcctttaagaaaaatgacagtaggtaacaaatatattcagaattcaggaaatgatatatgcagaaaataatgctaataataaattaatgataattttctttaatacaaatccgttgcatcacacgagtcatatgctagtctaatccttaaaaatcctagaaacattatctaagtcaacaaatcaacaaataactaatattcttacatcagctactataattcttcgatgttgaatagatgaataattacgaattaattaaattgtaaagttgaaaaatcgattttttctaagaaattcacatatagaaagtttatataaaatcacaatgttcaatagctcggaaatcgtgcaaatctgctcactaaaaaaaatgctgactctataccgaatacacatccctatacgtataagtctataggtaagaatttttatatatagagaaaataacccgcataagtttatagagcatatggtaattgtgcatcatatgatattaggataaaatgaagaaaatataaaggtgagagtagagttttggataagcaaaaaatccatccatccatcctttaaagccgttggcggcgttggccggcccaacgacatcgacggccaaatcccccaatcccaccttccggaaaaccaccaacccggcagcggttttccggcagccactgccgccggacagccagccaccaccgttgctggctactcactctcacagccacagtgaccgactcggctcgcctcgcttgcagctgcacccaacccaacctcctcgccttcctcctctccttcctcttctcctcttctctactccactctgtcccacgcgcgcacacacgcacgcagcttcctcggccttggaggggtgaaggggggagggaggaggagcagaacgaaggatcttggggctcgggttggtcggggtatggatcggctcggcgcgggtgtcctaatgccgagctttcttggcaagatccatggccgccgcgcgagaaccctcgtctcgtagacagccctaaagccctcgcggcaggatggtcggagcgcgtaggtcagccttctcttcttctccttcttcttctccctggaatttcggtttcttggatttgcggttgcttcctccagggtttcgagctccgattttggggggatttgatttttttttctttttgtcgatctcatcttttgtgattaggggagttttcacatccagatcttgcttcgtgttactgaaaaaagaataaacatggttcgttcgtttgtttgatttgcaggcaaatcgacggggaggaatcaagaatcggggccttcgatcgctgcagaaaccgccatggacagctccagcaagctcgcgcgaatgcgcctgtgatagaagacttgtagttggagagcttgcagagccagattgtggaggagaagcagcgatgccaccgatcccatctctgtggatccgcgtcttcttctcctggctgctgctgtcgctgcccgccgcggctgccgccgatttcagccactcgccgtctgcgatgacggcggcggcgcgggcggcatatggagcacggacaacatcctgcaatgccagagggtgagcgacttcctcatcgccatggcctacttctccatcccgctcgagctgctctacttcgccacctgctccgacctcttcccgctcaagtggatcgtcctgcagttcggcgccttcatcgtgctctgcggcctcacccacctcatcaccatgttcacctacgagccgcactcgttccacgtcgtgctcgcgctcaccgtcgccaagttcctgaccgccctggtgtcgttcgccaccgcgatcacgctgctcacgctcataccgcagctgctcagggtcaaggtcagggagaacttcctcaggatcaaggcgcgggagctggaccgggaggtggggatgatgaagaggcaagaggaagcgagttggcacgtgcggatgctcacgcacgagatccgcaagtcgctcgatcgccacacgatcctgtacaccaccatggttgagctctccaagacgctcgagctgcagaactgcgccgtctggatgcctagcgagagcgggagcgagatgatcctgacacatcagctgaggcagatggagacggaggactcgaatagcctgtccattgcgatggacaacccggatgtacttgaaataaaggcaacaaaggatgcaaaagttctcgcggcagactcagcgcttgggattgcaagcagaggcaagcttgaagcaggtcctgttgctgcaatacggatgccgatgttgaaggcgtcgaatttcaaaggagggactccagaagtgatggaaacaagctatgctattttggtcttggtactacccgaggatggttcactaggatggggtgaagaggagttggagattgttgaagtggttgctgatcaagtcgcagtcgccctatcacatgctgcagttctggaggaatctcaattgatgcgagagaagctcgccgcgcaacacagggacttgctgagagcaaagcatgaaaccacgatggccactgaagctaggaactcctttcagactgccatgtatgatggaatgcgacggccaatgcactcgatccttggtctagtctcaatgatgcagcaagaaaatatgaaccctgagcaaaggcttgtaatggatgccattgtcaagacaagtagcgttgcgtcaacattgatgaatgatgtcatgcaaacatcaaccgtaaatcgtgagtatttgtctttggtgaggagggcattcaaccttcattcgttggttaaggaggcaatcagtgttgtaagatgcctaactggctgcaaggggattgattttgagtttgaagtggataattctttgcccgaaagggtcgtcggtgatgagaagagggttttccacatcgtcctgcacatggtaggtactctaatacagaggtgtaatgcaggctgtctatccttgtatgtgaatacttacaatgagaaggaagagaggcacaatcaggattggatgctgcgaagagcaaacttctctggcagctatgtgtgtgttaagtttgagattaggattagagagtccagaggtaatcttttgagttcgtcatccagtcggagacttcaagggcccaactctaccagttctgagatggggcttagcttcaacatgtgcaagaaaattgtgcaggtatactataaactctttaatgttctatgtctgcaacaaagcaaaatgtatcaacattgcttgattgttttttttttctcatcttgtattacttataatggatcgagatgtacattgctacatgatcacatagccagactactcttgctttgctactattattcccaattcaaggatgtgcatatatgtttacaaacgctgtcagattgccaaaaccaggacagatttttctataaaagatgcgattaattgtttctcgataagtctaatttcttaatcatcaaattatgcaagttgcaatgtcttgtctgatgaataaactgaaagagttctttttttctgatatgagccccctttttttctgctgcagatgatgaatggtaatatttggtcagtctctgattcaaaaggccttggagaaactatcatgcttgcccttcagttccagctgcagcatgtgactccggtctctggagcatcctcggacttgttccgatcagcgccaattcccaattttaatggactccaagtcattcttgtggacagtgatgacaccaatcgggccgtaactcacaagctcctggagaagcttggttgcctagtcctctcggttacttccggcatccaatgcatcaactcctttgccagtgctgagtcatctttccagctggtggttcttgacctcaccatgcgtacaatggatggatttgatgtagctcttgcaatcaggaagttcagggggaattgttggccaccgttgatagttgctcttgcggcaagcaccgatgacaccgttcgggatcggtgccagcaggcaggaataaacggtctgatccaaaaaccagtcactttagcagcactgggagatgaactgtatagagtccttcaaaacaattgaaagagcctcatggttctcatttctttcaatctcaatagattgctgtagcttgattaatagttactacgctactagtttctgccaggttaggtccatacaatcacaaaacatttgcacaaacaaaatgtatagggagatattaaaacatcctgcctttaccttggttccttggtgaaggaaagaaggtagaaattttgaagaggtcatacagttagaacttacttattcatttgtaaaccctatttagattattaatcatttgtcaggtaaattattggtggcaatttgctgatgatagtttaggttcatgaactagactaggtaatgtgtttggacaaaatccatggagctgctgatttggtagttgcacttttgaaatggatcatggatagacatggattcagtgaatgaaatataaaaatcaaaagggacataacctgaaaggtagatggaaataagactacagacaagttgcaagcctatactattgctgctgactttgtatcttgaaattaagaactcttgttgtcccaatcttaatttggtggccaatgtcctagatgcaatgcatctgtgcattcattctggtgattgcctataagactaggaaaaggttttaacttgccatttctttcgcagtgacctctgtggctatatctgaatcctcttttttcgttttccctctattgtcaacaaaagcatgctatgttagcacttcgggacttgattgggatatcagcaacttcctaattgttgaactgtccaatcacaaaaaatcaggtagattgagtgcacatttttctgatgttatttcagttctcaatggctgttaatgtgaaaaacatgtaaacacttttgaaattctcaaatcgggtgttgctcnacaaacctgttcatggcaggcaagtggttgccattttccagctttattccacatgcaagatccaaacatacaagtgatttcagaaaaactaaaaataagaagtaaaatgtaagtttgattttctggggacagtcttcgacagatgtaacttttccttggggaaatcaaactgatagacgacaggttccttctttttaatgtgcatgaaatttttcaatcccttggtattgtcattttgaccccttataattaaacttgggactatattattctgagatgtaagacaaattctgccgccgccacgtattcttcaaacccaagcgttcatttcacctggactatggtcatctggtattttattgagaaattggcaagctgcctagctaaagaaggctttgcaattggacaccttgagcaaagacaactacaagtgaccattgcagtaggtatctagtactagtactactgtactacaaacctataattgatgattaaatgtgaactaggatatatcactctaattttagatatttctttgacggagagagctttatacttgtctttcattgaaaatgtcagactttatgtccatcttataagaacagagaaagaaaccattagcttcttcagactaatgttgtgttctaatctacaactgaagcttccaactttctcgtttaaagtgggcatctttctgaactgttaaaaggtatattttttaaaaaaaaaattctatatcaaagtttttttaagaaaatcagataaaactatttttaattttataataactaatacttaattaatcacctcattttgcgtgcaaaaaaaatattcaaccaaaggctagaaccagcctttttgtttagctactaggtactttttataagcatgtctttcaaatggttaacgagatgatttttataaaacatttttatatagatatttcttttaaagttaaataaatttatttttaaaattttataatagtcaataatcaattaattatataattatatgctaataaatattttattttgcgtgtgaaaaagcctaaccttttagttgtattttgacctcagcataaggctgactttaatgaactattcggctgggctactttctcgtttctcatatgcatggtttttaaacatcttgacgatatgtttcttgtaaaaactttatacacaaattccttagaagaaccaaataattatactttttaaatttgtaatagttgataatcaatcactagttaatggcctatcctgttctaccatagttagtgtagttgggtctatctcttcctcttggttgaaatttctttcaactgataattggaactatcagccaactgatctatccaatctgagcagaactaaacagaataaaaagtgacactacatctgtactaggcttcatgcaatgaaacaaggaccaacttgtgaattgtgatgataccatccttgcaaattgcagtgctaatcttgcatctgtaccaatccatttctggagactcacctcacctgtcaagaaagtgtctctctgcagctactgaagataacacacaatgacctgcctatgtacctttttataatgcaccatcttaactttttgtgcagaggacctattttactactaccaaacagcatttgtttttgtatagattgtgatcatagtggtgctgctggaagttcaaattaatgtcagttgagtgaggatgattttggtttggagggcttccatggggggatgcacctgaaaatccttcagatctgtggttggggctttcctttcctgtgtgagctggccatgcctgcaacttgacacaatgacacaccccagtgtgtggtatgctttcttgttaaatgtcactgctgctgctgtgcctaaagaatgctggctccatatacatccatccttcctctgaatttgtgctgccgcttgtgtgtgtgtttgtttgtgtgacttcactgctcttgaccaaatacattggctctctgcctcagagaggtacagggactggtcatcactgtttggatgcatatcgacagtcagtctactgttagctactcttttcgttccaaaacatactccctccgtctagtacatattcgccgtgggacggagagagtaataatttaggataagattatacacatcataatttatccagattaatagtactatagattaatagtactatagtgaatctaatcccaatttagattagaggccggtagtatcctagaaaatggctaaacaatacctgctgggcagaagtgcaagcaactgatgatcaaaattagactagttcagattagaaaaccagaaagagtaatttgagatcaaggcattgtttagatttaaacttttttcttcaaacttcaaacttttccgtcacatcaaatgtttggatatatgcatggagcattaaatgtggacgaaaaaaaaaacaattgcacagtttgcatgtaaatcacgagacgaatcttttgagcctaattacgtcatgatttgacaatatggtgcaacagtaaacatttgctaatgatgaattaattaagcttaatagattcgtatcgcagtttacaggcggaatctgtaatttgtttgttattagtctacatttaatacttcaaatgtgtgtccgtatactttaaaaaaatttggcacacgaactaaacacagcccaatagttcgcaagctttttgacctatcctatgaccaaatacaccattagacacattgtggcaagtcgttattattggatttagtcccacattggatattcaattacagcctcatcggttcacttatgcatatgcttatctgtactgtttattagcaaccaaaaagtaatttgtgagtacaagtattatatatatgttcttagttattcaaaagcaaatgatgtaaaaacaaactgcgctaaaacaacaaaatcaacttcaaaattaagttttaaaatttaaatttggcttataagtataagcacaggttaaatgatgttctcacgcaacttagcttaattattctctctagtttcatttttttttacattttagataatggcacggtaactttgattatggttaatctattataatatacatacaaaataagtaaatatttgattatggttatctactatcttcatcagactacacatctttttcaaaacaatagaaccaacggaagtatgagcttaggattctttttgggtgaaagaggctctgagaacttggttatgtttaccttaggccggccgaagattgtcttggagagctggatcaaattatttttgggctaggctggaaaacaaatgaaaagccatgtttgggctaggctggaaacaagcccacttgatcctttactgtttgtcaccagctaggctggaccgctggagatgaagatagaccagtagtaattgtgtgattgtgtccattattatagttaagtgcatgtttccaaaaaaacagagatttttgtcaaaagaatgaatttattgaacctatatataaagtgaattagaatttgatgaaccttcacaaaatacaaagaccaaaaactattcaaacttaggagtatcttttatcaaaaactatctcatctcatccctcaaagtggaaactctctgtatttgtgctctccctcaaatagtacatggtttttgcacagagaagtacagataatggtcgccactgtttgatgcatacgaacagtctaaactgggatttacctctactgtttagatatttttttgtaccatgtttaaaaaaatatgattttttttgtggattttgtgcaagtcacatgagaaaagaataagcaaacaaatactaggaatgttatgataggagtttgttattgggtttaagtcccatattgtatggagcacagtcttttggaccgtgtatacccactatctttcgttatagcttcttttgaactgcctaggcccaagctagagagatggatcagattattgttgggctacaaataaaaggccatgtttcggctaggctgttaaacaagtccattagagcctttactgtcaccagttttggctggaaaccaagatacagcccattagtactttgtctccgttatagtttccacagtaagtttaaatttgataaaactcacaaaatagaaataccagaagctattcaagcttctttatccacagctatctcatccctcaaaacatattgttttaatagaaaaattaagtgatgaattaggtcatggggtatgatcaatgatgaaccaacctgaacctaaaatggtttgattttatatttgctctgaccaaacaatctgtaactcccttaacagtcttgaagcacctttaccttaagatacactacctccgtcccctaatataagggattttgatattttacttgcactgtttgaccacttgtcttattcaaaaaatttgtgcaaataaaaaaacgaaaagttgtgcctaaaatactttggataataaagtaggcaccgtatctggtgcaaaccagggttgctgtgcaaccttggaaactctcaatcaagaccacatgatgctcatccgatggctagggacagaggtgggttacttttacacttaaccgcccgc

SEQ ID NO: 895 - DNA, 603 bp, Oryza sativa
ggtacccgatgggtttgtgttccagcgaaacagaaataccaaccttaacaaaaattgacagggtgttttgctcacatgagtgggaagaaaggttccaaaattgcttgctttcagctatctctacgatggtctcagatcattgtcttctgtggaggaggtcaacgcacgagaggacgggggcgtagtagctccagtgggcattcaaccatgtggagtggccgacgagggggagactgtcggtgccattgtggatgaaatggagagggaggattctgacaaccagcgtgtagaggaaggtgattcgtcacatgatgagaccgatattaatccaccagaatgggctagtgaggatttttctgggctgatcgtctctgaagaggatagtgtgagatgggagtacaaagaaaatgaggttattcaaggagcgatttatagtagagcacaagatatgaaggaggcggtaaaacattttgcagtgtcacttcatagagagttttgggttgccaagtcgaaccggtcgcaatatgaaattcggtgtgtaaaggaaaaagatggttggccctggagagtgcacacgtataaagggaaatggaaagattattg

SEQ ID NO: 896 - DNA, 565 bp, Oryza sativa
tccatactgcaagtaattagcatgcgtatgcatgcaatggatatagctacagtagcagtacaatctaggggcatgtcttgctgaggcgtctacaaagccatcgatgtatggtgatgatgctgtcagatacacgatggatcacacaaagctctctcagctgcttctcttcacgggcagtagataagaagcagccacccctgctccgtgcctttgcatacacatggtcatctcccatttcacctgcaagcaagcaagcaaagcaagaaacccaaacttttggtccagactccagagaagccaagtagccaacccatgtgtgaatcctggaaagaatagaacagctgcctgcttgcattgtctccacggtacaagagctagctgagctcacacacgctgagagagtgagagtgagaggcagctagctagagagagcgatatttcagctaagctctcgtctcgtcttctggcagatgcccatgggagttttggttagtggtggcttgtgagatcggggagatcgaaggctttactgcaagctgattcttgcatggcaagagctcgatgg

SEQ ID NO: 897 - DNA, 754 bp, Oryza sativa
ccgtcatggcgcctagcgggaaaaattatctcttaaaaaccctaattgtgaaatttgtttctttgcttgttgtctagtgtccgtgccatctcagatctcaaatccccgatctatcgtcaagttcaaatccgaatccaaatctttccaaatcaaattcctccgcaaaagtctattttgcctcccccggggtcgatgggccgaatttctctcggcccatcttcccctctccctcggccctctcccctcccccagcgcgctccctcttccccttttcctccggtccgttccgccccgcacgcgcgcgcggcggggcgcgtgtgcgcgagcgccgcgccgagcgccccttcccctcgctctctttctcctctccctggcgagctccccgcttgcgaagacagcccccgcgcgccgtcgttcgcgcgcgcgcgcccgcgtggttccccgcccgagtcgcgtcgtctgcgtcgtccgcgtcacccggccccgctgctctgccgcgcctgcaaccgctcggccccgcgagccattgcgcgtgcccagccgcgccgcccgttgtttcccgcgcatgcgtgccgagtggccgacctcctggtcgccgccgccgccgtcaccctctgccgcgccagcccgcgcctgtcgcccgtgtcgtcgcgccgctccaaaccgccccgccgtcatcgccgtcgtcatcgcctcggtcccgccactcccgcgctagcctacaagggacggaggcagagcctccctcctccct

SEQ ID NO: 898 - DNA, 719 bp, Oryza sativa
  unsure (1)..(719): unsure at all n locations
catggttccaacaaacccttaaataaaactagcatggtgacccgcagattgcgcggctagcatcattgtattttctctcatataatagcatatatgttttctcattatattattcaaatatattaaaatgacaacataattttaaattttgcaataactttataaacctactaatgtgtaatattcatattatattttatatacgtgttagttattaattatttttaatatcaaattttagttatttgtaaattatatatattcctatatggactctagactcgtcttttaatatttgtttttttaattccgaattttctgtaaattgtatttctatatagactctatgctcttcttcccatattatttatttttatttcagaatttttgttatttctaattgtatttctatgtggactctaaactcatctttcaatattctttaatttttaatttcgaatttcagttacttctaaattgtattcctatattgactttaaattcttcttctcatgtttttcttaatttcgaattttagttatttgtaaattatattttatacggactcaaaactctaatttaatttaattatgttattccaaattttagttagttttaaattcctatatggactctatactctacttctaatattncttactttttattcccgattctattttttttcttaattgatttctatatggactctatactct

SEQ ID NO: 899 - DNA, 2292 bp, Oryza sativa
gggtctcgccggcgccgttgatgccctcccgccagccgacgaggcgggcggcggcgcggtggtggcgggggatcgggcggagccgctcgccagcgcgatgggaggggaacgggaggaggagaggttgagattttgtcaacagatgtatagatagccccttttttttaatttacttcattcaatgtatgtcgacgtgccttgcacgtgcacgctaactagtgcatggaaaaagtaggccgtttcctgttatcaaatacttcctccattctaaattgatctacatatagttttttttagattattcctaaatgatctacatatttgtgttcattcattaagtctattcgttatttatgcattggagtaaatggacattgatgcatgcatccatgtacataagtatttataacccacatgcaatatcttaaatggacattggctaggaaatagtggggatggtgcatgcatcgagtttgttgctagagtaaatatagtatgagagagttattagctttttttggtcttggtgtacctatgaaatatgtagatcaatttggaatggagggagtatagcacacgtacaggggatcgctaattagcgcatatgcgcgaattgctttcctggcgcacacgtacatgtgacgagcatagatggacggtgtcgtcagaaacggaaaacgggaaaaaaacgtgattagcaccagtaatttaagagggcagctagcccacgggataccgtggaaaagtgaagtcacgggacaatttttacgtgtgattaattagcgtacaacatgttgtaccacaggtaccaggtatcacaagtatcaggtaccaggtgtcacaggtatcaggtaccaggtataacatataccaagtgccaggtatcacaggtaccaggtgccaggtatcaggtatcatgtgtcataggtattaggtaccaaatgtcacaggtatcaggtaccaggtatcacatgtaccaagtgccagatatcacaggtaccaggtgccaggtatcaggtatcatgtgtcacatgtatcaggtaccagctgtcacaagtaccaggtaccatgcaactggtaccatactggtatcagctggtatcagcatagcggcggaaaagcgaacaccagtcaaaaagagaaaaaaaataaaatctatgttacataatatcattgtgtcaattaatttacatgacatactaaatctcaatgtgtctcactcaagaaaagaaacaaagcaagaaaaggagaaaacgaaaaattaaaaatgaccgtggtatatagaagatgtaagtcaagcctacagaggtgcatgcccaaattgattcacatggcccaagtgcccaaccaatatatctagagtccttgtgctgcaggaagaacacatacacgtggatgtgttgtggagtatagacctgccacttagtaggaaattgtgtcgcatgcgtgtacaattgttttgatggaaataacgtagaccttttaagtcatcccgtaggaacgggatgccgttctagattttctggtaatttaatagcgcgtgcgtctggtcccctcccgcgtcctattttttttcttttacgattttttttctttcacaatttttctttccttttgcgcttttttctgattatttttttaatcttcaacacacgtattttcgaatgttttgagttgaaaagtttttaaatcttaacttgaaaatttttaaatcttaacttaaaaaattttcaaatccaagttgaaagttttcaaatcttgagttgaaagttttcaaatctcaaacctaatcgccgtcggcgcccgacgcccggcgatgtcgcagctgccgacgttccggatggcccagtcgagcacgacgggcacggcgaagtcgctggttcggttgaagaaggcgcgatagctgtagttggtgttgatccacctgtcctccgccacgaacacgtactggcattcagtggagtcgagatggcggaagacgggttccgtcggcgggagctcctgttggtcggggacgtttcgcgttggttcctctgtcttattcaacgtgagtatgtaaggcttgtagacgttgagagcgcggggcatggtgttctggcagcaccccgactcgccggtgcactggcccggcaagtcaccctgcgactgcgaccgccggcacgtggatgtgcagccagtgacgtacgtatagttatcgtcggcgtcaatcaagtagccaaggacggggcacccgagcacgacaaggcggttcctcttcgtggagaacccggaggcaatgctgctaccgtagtc

SEQ ID NO: 900 - DNA, 2038 bp, Oryza sativa
atgttatttttcaattgtatttctatatggactctatactctacttctaatattccttatttttaattccgaatttctattatttcttaattgtatttctatatggactctaatcttctcttccaatattccttattttttaattccgaattttaactatttctaaattgtatttctatatggactctgtttttctttttctccgattaatatgagaatttctaggccgtgagagcgaacgtagaggcttctttttctattcctttaataagttaatagatagatagttgaacatgcataagcatgctacttctgcagctcaaatcagttagcatgcaagctatgatcctctgatgtaattgcttgatgtggttatccccacaaccaaaaaggtggttctactctcttgatgctcatccatctcaggtgctttgatttgtaatagcatcaacacaaactacttcagtatgtaaatggtgggttcaaaactcaaacaaacaagcattgtagattttctggttcagtttactaaactggaagcaagaatcaggtttcagtaaagattcaataatactgataccataaaatttaagtgtaaaatatcaacttagagctaaaatccatcatacaaaaaactactaccttttcggaccatcatactttagaataagttagtgtacaaaaataaatgatatggccacatagacaagcatcagctaccaactgcattacaattttcaagtactttgagaataatcatgcaaactatagagaccaagttttcttacaagctaagaaggaaacaatgttactttggtagtctagctagtagtagatatgcaaaaattatacatttaattaccttgtttcttcggtttaaataaccaatctttagcacaagccagtgcctcaagcatatcaggtgtcaatgaacttcttgtgtctccaagtatccttcctccacaactaaaagctgattccgaaggcacaatgctgaatggaattgctagaaaatcctgagccataattgccagtataggaaaccttttagcatttctcttccaccaagccaaaacatcgaaatccttgctatcatcctcacaaacttcttctaaatatgtctcaatctcagacttatgtaatcgtgttcggtttgacttaaaaatagcaaactcttggtcaagctttcttttgcctagaactggcgagcctacagcagttgcttctccttgctctgaatgtgatagggaggacacaccccttctccttgcaattcctcatatactctgaagtatgacttcatccgctctataacaaaatccactttagtttcagcttcattcatattgggagacaccttggcataaaagaattccaaataatctcgtttccttcttggatctaagacagtgctaatgacaagtgccaaataaaaattgtttggcaatttttcatcccaatacttagcaaacttcgtatgcatagcactagctaattgagtcaaaacactagttgtttgccaatcaaaatcacttaaagcatggcgaatgcaaaaaaccaagtggaaaactagatgagccagctcaattgaacctatgttaacctggaacatcatataatcgatggatatatatgaatggcttcaaatgtttgctactgacaagtaattttagatacattaaaaatgtctcaagatctctaaatagttaaacctaatacacttggatatatatgtaatgtggattacacagacataaaccgtgtaagagcttgaataatgcaagcatttgataaatctccatttcatttctctggtaaaatagaatggctaacggacgagtctatgcactgaatgctactacttttctccacatatatatgccaaaaattattggtctgcattatttgtatagcgaaagatttttacctattggttgaatcaaatgttgatctgtatcttgttcttcatcttgttggttgaatcaaacgtgatcagtatcttgttcttcatcagtttcctgtaattataatgatagag

SEQ ID NO: 901 - DNA, 538 bp, Oryza sativa
gagggagctcgacggggccggattgcggcgccggcaaccggcggcgagggaagggggaaacggcgacgaggtcatgaggggccgattcccggcggtgagagcatctacgcggctacgggaatccgttgctagcgtcggattgggcggagctacgccgagcgaggccggcgacgagcgggcgctacggagcacgggcgacgacggcggcgagcacacagcgagcggcggcaacggtcggggcggcgccagctagctacgggaaggctacacatgctactaccgaaaactaaggggaggagatggatcgaggagggagaacgggggaatgcactaccgagatgaggcggggcgctgtgacgagaggccgacggcacaggagtgatctctccggcctcgggccggggaagaggaagaaggcgagcgcccggagtcctcttccatgtcctcgctcgtgccggctcctccgacacgcgcgacggcgaacggcgacagcgaacagagcacgggaggcggcgacaatggagtggaggcgaatggg

SEQ ID NO: 902 - DNA, 20007 bp, Oryza sativa
  unsure (1)..(20007): unsure at all n locations
tattagttattactaccgactcatgatttaacaaggaaataaatttgagcaaaataaaaatgagatacgcatctccccagatggatattatctactaaaaaaaatctccccaagatggatgaagtgtattatgttgtcttactcctaataatgtctttcttttaaagtttggagatttgtatttatttgttgaggggattataaaacgggagcagtggacgggttgggtttggttgtttgggcaggccaatggatgttttttgttctaattttttgggataaacaagtgcagaaaccgatgtaagcacgggacaagtgtctgtatggtcggtggggcccaaagaacagcgaattattggggcccatgaaacgtggcctccttggagcgtgatgacgaggatactgtgccactacagtgtccgcatgttatacacatctgcagcgttggacctggccatctttccattctgcccatgattatattgctttttgaaagggaaaaaggtaaagaggagaggaaatggactaccgtctcttctttgtttaagctcaattaatcccccttggttttacaaactgtgatcaaacacaaagttcactattttttatttttattttttgcgaaacagtgaacaaatggtagcactgtctcgttgttggctcgtttaattttcagataggatcgttttgatcgcatcgagctcgagcgatccgatggcctcgtcgacgaatatatatggaattaatgccgccattttgttgttttgtggtgcggtgttgtcgtgattacgattaaacagcttatccatatttggtttttatgacgaacgaggagaggatatgtagggattatatatctgcatcttcatgcattccttgtgcgatcgacacctgatctgcatgcgtaatgaaaacctgccacgattggtacccgtctcgttcgttcttatcaactggactagccaacaaggcccacgacgaatgcatgcgtgcctaagcaggatttacgcatgcatgcaggcatgttgtataaatctttttaccgtagagagattgtctcgattaattacctggtctagatatttacgcggaaaaaaaaggcatcgaaatgtgttcagtggtgaaatgggccattggtattttttttttcttttggcacgagggagaaattaatatacggtcgatcgatcgcctgaagtcctgaactgtagcgtactccctccgaaaaaaaaataaattatgggtttccgtgtccaacgtttgaccgtgtgtcttatttaaaaaaaattatgaaaaaaattaaaaagacaagtcacgcataaagtattaatcatgttttatcatttaacaacaatgaaaatactaattataaaaaaattcatataagacggacagtcaaacgttagatacgaaaacacaaggttcgtcttttttttttatttggaacggagggagtacgcagataccagctgcagaaactcgatcgagaacttacgtcgctgcttcggaatcgccgtagaattccacctacggacgcgctcgatctactgtcagtatcaactgcgcatgcgacgtttcatcgttgatcgttcacgacgcaatgtgtacagtggcttaaaccaacgacaagtggatcgcgaacgctgctgctagcgaacagcccccgacagtgaagccgcgagcaagtcccaccaccgatcgatcgtttcatcgttcgttgcgtttccgccgttgaattgaccgcgcgcgcgggcgctgccgccgctgccgctgcttgacaagaatccgcgcgcgtgctgcactgcagccgcgcgcccacttggacgacgcggtgaatccggctgcgacttcttcccaattcccaactcccaagccggcaaaccgcgcgtttcgaacggacggcgacgacgacgaagctaagctagctccacgttttccaaactggacgcgccggcttcgcaaccggcaactcgatcgtatcgcgcttacttttctcgcattcgcagcctagctaccaacctaaaccgtatattctgcttcaattcagacgtcaacgaacacacagttccggaatctcatcgctcgatccatcgatcggctgcgcttgaacgatagtgagttagtgacagaaagctactactatatgataacaaaagcggaaagtgtgtatatatagatgtacatgcatgatgaatcaaacgaatcatgatcaccaacttgataacaaacgattattatcaaatttatcatgttaacaacgaaaaggcaggcaacggaaatggaccagctttttcatcagcagttgaggccaggaagaaaagaaatggaatatgggttggactctgcatttagaattgctctgcaaacctggctgtgggggctgaccaggcaagtggattaattgaaaaatattaattatttctatagttgcatctccatctccaatctcctcctctcgatcaaaggaccaaatacaaatgctcgtggttggttggtcactgactttagcttagatccaatgaccgcagtcttaattagctggcttgatatatcatttgtgctgtttttttttatctgggtgatagacacctcgcacctaattggaattgtttttacaccactaactaagggaggttatatatatctcatctcaacgtttattttatactggccatataggttagctagcgccatatctaatctaaattcattggctttagtttatatcaatgaatgaatgattctgacaaaaacaaatggtcgtgttcagtgtttgcgcatgatgcaagctgactccgatgaaatgtttgtttctgtacgcatgttgccgaagctagcaggctaggatcaaatctatatgtttgtttctgtacaagttgccaactactgtacgcattctacctcttgtaaattaactactttgtgcacataaacaagtgctccatacctccatacatatacgataaaaacatatatcactgtcaatctgtcatctattctgaagaggtaagccacatattttggaagtctagaatcgacgccggctgacactgcatgctgtgtataatattcttggagcatacataatacaatacgtgtacgtggaaagataaacaaaaatacacgtaaatatcgatcacaagttcacaaccaagttgttatccatatttcgacaagtacattatcccatatgtaaaaaaataaataaattaacttgcatgtttaaaatgatttatcacatattaatttaccatgttgattttttaaaatatttttataactatttgaatgacacgtaaacaacgaatgaatatacattccaggtagctgtacatcataaccggctattaaacaccaatcagttctggtcgtgctactcgtggttaatcagtcattcatttttcttgaatcgtaccaccgctcataataatgatatctttctaccacatcaacaattaaccggttattaccaatcagttcttggcgtacgtacgcgtggttaatgggttgactacgacattttgaaggtatggaaatgtggtgaaacattaattttttttacgctaactcttacacggacgacgagtcatcacgcgagatgagatgtggacgtgagaggaattgaaccgggcgcggccaggtgcaatcgcacgcatgcatgcacctgtgccgagtcgattggatgaacggcgcggtcgccatgtcatgggtgacgtacgccaccttcgatggacttcgaatgcaagaaatttacggcatgaatggaatgaaccaagaatgcacgcgcgcgtgcatgcttcttgattatgtcatcgacgacacaccacatactctatccggatctttggttattaattcctgcagctatctatctagcaatatatattttctgctatgtgtaccatataaattaagatcatctctctctcttaaaaaaacagtagtacgtgttcctgggctccttgcaaaaacagaagaagtacttcttccgtttcacaatgtaagtcattctagcatttccgacattcatattaatgttaatgaatctatacatatatatccatctagattcattaacatccatatgaatatgggtaatgctagaatgacttacattgtgaaacggaggaagtatattgttaataccggtcagggtcagcgacatatattgcctggtgaaatagtcgtgcaggtccttgggagaaatgaatcctacgagactaaaagtggataaattgatgtgtgttctgttttcataaatttgtcaattcatctgtaattttatactcccttcattctgaaatgtaaggcataaccacccttaacctaaagactaagaaaataattattatcatcttatagtttggatcatcctaacaaatacaatgcatgcatccaatagaattagagaacatgagagtggaggatttaaaaaagtactccctcctttcctaaatgtttgacgttgttgatttttttaacatgtttgaccgttcgtcttattcaaaaacttttgtgaatattattcaaaaacttgagtagtagtagtatatttaaccatgaatcaaatgatagaaaaagaattaataattacttaaattttttaaataagacaaacggtcaaatatatttaaaaaaatcaacggcgttaaatatttagggacggagggagtaataatttaatagagaaggggccatagttaattgtctatatgcatgtatgccttatagtattatggaacatctgaaaaagtggctgtgcaatggatggagtaagtatgttagttatcctaagacctaagcctatcatctactacgtgcatgcacgagaccactggtctggtctcgtatgattattttccgttcttgacagagcggcggcttcacgcaaccaattggagacggcaaaggccgtttgttgggcctcatcgattcgtccaaaatgggccaacacagataatcgtccgaaatgggctggccttcaagctcactggtgggctgggggagatgcacgtgatgggctggctcctcggctcgctcgctcccaccgaaccagtaaaacgccaaaaaaaaaaaaacagaaacggaaaaggctaatacgccattaaccacccggcgcccgcgccgcttaattccaaaaccctcctgataaaccaaacctggcgcggtacgcaccacaccatcgctacctcatcacgctcacgcgtctccctttctccgcactcctcttcgctctctctcgtgatctcgtctgatcagctccgcctccgcctcagaattcagaaatccccaaaccccaatgctgctgctgcctcgcagtcgcacggcgaatcggggataagcaccggaggagggatcggagatggaggcgccggggctcgtcgtcggatcggcgctgcgagccgcgcaaccgccaccgccacctcctctcccgcgctccccgcgtggcgctgcggatcgcctcctcatcttctcgcgggagcctcgacctcgactcgcccctctcacccggtgctactgttccaggtacttgcttgcttgcgaagttgcggttccactgcgctggcgctcacgcacccgcgcgcactcgtaacatgtggatgtgggtattcgtcaccgtggctttgtttgggcgtttgatcctcaaatcggtgtgtattccagggaggggaagggcaatgctcgcagcaaaccccatcgcgagggctccaattccgttcggtgtgtgctccgccgctcgtattatctctagattctttttttcagttttattttcactatttgacgcagcgagtggttaatttttgtgagtttgtctaggctgaacgtgaaagcaaacaatgaccaggtatgcattaaaacttcgaatctgtaacacgtttccccacatattttacctcatgtacctgcattctcttatggtttaagaggatcatgaatttagagctgatgtcgcaggaaacatatttggctgatgaacgacacgaaggggttgacatctgggagctattcagccaggctcagagaagtaataactacttttttttttttttaaatctgagcttaccattgaaccacaccagagcagtatcatttgatatttggcgtggcatgcttatggcacttttcaattagagtgaaccatttgcatcactttgttgtttgctaaaagaaaagcgttatctgttctgatggcttcaatttcacagatatcctacaccttaacaagcagcggcttgtggccatggaagagctcaagaaactgcaggatgaaaataaatcgcttctgcaggacatagaagtactggaaacagaaaggcaaggtgtggcggtgataccatcctaatgccaagatacttttgtgaattaactgtgaagatagaatgcgagatgtgtaacatcgagcaattcaatcctgtgtttgatgtgatacttctattttctctttatcattgttagcttaagagaataagaggtaaacgacagacctaaaatttgacgctgcattctccttttacatatttcaggtttttccatagaaatagcagaatcatcaaggttctctgagttgcttctgcgtatagatacaatgaccatttctggtatggttggcatgacagaagcgtctgatttaagaaagaaagttattgacaaccgatacatgatacatagcgtcttttctgatattcatcataaacaagatactgaactactttcagaattgagactctttctgcgtaaaccagcagagtatgtaccactacctcattacatctctcctccaggttccagctttactattgccatattatattcaaagatcctactgcattatacatacatctttcaatctgaataagcatgaaaaattgaaaatgcactacaattttttcgtatatatgccttctgcttatattttgtgctgtataattctaaaactgcatgttttctatatgatgcacaaactacctgtttaatctgagtttctgccatcataactgctacttacaaattttgcatagctacgttaatttaaattactgttttgcaggaaacctctacacgttgtgcacatctgcagtgaaatggatccaataacatcacgtggatcattagcaacctatgttactggattatcttccgcacttcaaagaaagggtaacttggtggaggtcatactgcccaagtatgcaatttctttgtgacaagcaagtgatcaccagtgaactaataattttgtccattttcaaatgtttgcaataattccaattatatttataaatggactaggcataaaaaagtgaacaatttcttgtgggttttcagcaacgtagagctataatacatactacaatgatcattattctaaaaggagagatgttttgtttttgataaatttgttggatttgggattgagctttgtatgtagtctgattttggttgtgtcatatttatgcctcaagtattgcaagcaaagctattgtgttaattgcactggtataacccaaaaacaggtatgctggcataaatgaagatgtaattcatttcctgaggaaagctgaagcagactatgaatcttattatggtggttgttggcataaaaacagaatatggacagggtaaatatatactcagtataacagaaatttcttactctgttgattatatcaagatcttaatttttaaaagtaattttatagagaatttcttgctgtgcgtgcttgctttagtcatgtttgctggtttctcctcctaatttaccttctttagtgcagtatatcaagtggtgttagtcttacactcatagaaccggtgcagctgtcatatttaccttctttagtgcagtatatcaagtggtgttagtcttacactcatagaaccggtgcagctgtcatattttgatcgcgatatgttacgtggctaccccgatgactttgagcggtatgtttttatgccatatggtatctgcttttgttttgattctattttgaataccgttgatcattagctctagcattttcagaagctcaacttctgatatatttgtgccatgctgtttatctgttgtatgtgacacacaaatgatatgtgcttactgcatgttttaacacatgatcctccattccccctttaagttgattgtatctattagacccttgctttgataccttgtttggtacataacaattcatgtgttgtattgagctagaaacagctgtatgtaatcgacaaaagggttatttaggcctgaaacaaactgatcggttatatagaccataactagcatatttgactacatttaacatctatgaatacattgttacagattttcctatttttcacgtgcatcattggattatattgtaaaatccggaaagcagccagatgttttgcatgtacataactgggaaactgctatagtggggcctctattctgggatatatttgctcaccaggtcagtcatgctatctcccaaagacattgttgtttcagtgtaaatgtttatacttcatacctcacaaattatttcttctgtcagatctcatgtttcttataatatatttttcactggtctcctagtattgccaagggttgattagtacatctcaaagcaaaacagggaacatatgcacactgttctacagacaggaaatcgatgtgaacattattattttctgcgtacagaaaaatacaccttcattccccctgtttatattgaacattgttgcacaaaagattcttcccagtctttagaacgactataaagtattagaaatgcagttgaattttttatatgctgcagaaaatcatctgagcattttgttattcctcatgtgaagtttttccttataagttgtattcaattttcagggacttgggaacactcggatattactgacatgtcaagacttgacttgcaagtaaatatcatatatgcattatttgagttgctactggttaaccgtatttgatgttcttaattaaacaggctgatcacagttgataaacataatctgttctactatcaaatatctgaagaacaaaaaaacgaatccttatgatgcagtaaatcatattttttaattatctgtcgatcttttttgttggggaaattgtttcattagaccttgaaattgagaaatacaagtacacatcaaatgttcactgtggttaccagttaccatatgggaaaggaacctatgccttctctgctatttcctttccttttctggcaatatctattagggacctatctgttattattagcagtattagctaattcatattttcagtgagtaccctattggaatatgtatgcaccattaccatcataagttcattcactctttcaggcatcgtgttgctcaaatttttaccaacaacacagcgaaatttggattgactagagattttcgtctttcaaatatctttaaacttaatggacatattaacaaaaataatcctatatgcagtgcctagaggttccaaatatgctggaattgtgcggacttgatcctcataaacttcatcgacctgatcgtctgcaggataatagcgaaacaaatcttgttaatgttctaaaggtcagccttcttaaaattttaggagttgatgccatgggttgagtactgtgacatatgacaattgaagactatgctattgtttttttctaaatttctttcatctttatatttaatccttcgttcatgacacttccatctttctataagaaactagttcaaagatgtgcttgaagaagatatcaaaatgctaaacagaagtaaattgtttcacacataatcctttgaatgataaatatgtgaagcttaattttgaataaggcaagcaccatggcaactgcaatcacttggcacttgcatatttgcaagctttatttcatgcaaccacatattcagactgtggttcgtgtgttgtgtggaattatcatgaggagaactttgcttggctgacatgaacgactttgtttggcattatcagaactgtgaacaatatcagtattattaatctcaattgacgtgttttaagtcctcgactcttgatatccccaagaaaactttgtatgatcttcaggtcatcctgttttcagggatgtattgtttattcaaatagatatgaaagtgcttgactccttgatatccccgagaaaactttgtatgagcttcaggtcattttgttttcagggaggtattgtatactcaaataaagttttgttaatgtcctcaaccctcccaagagatatggctatccaaggcttaggacatgggttggaagcaacattaactacacacaagtaattatcatcttggtttgctttttatattttcctccctgtagcctgtanggcttatgaaatggccataactgcatttcttttttcacacacaaatattttgttctctctcaagagagaagggtgtggcggctttctatgaatgggatggagaactttgggatccatccaaagacatttatcttcctcagaggtattctccaaatgacattgaaggaaaatcattttgcagaaagacacttaagcgatgtgttggactccacagtggttcttccgttgttgtatgtacttctcattgtcttgcacaaaaaacatatttttgtttagtcattacagtgtttcatgaagtttatatcgtttgtcaggttgggtgtatctgcaatggtgattcgaatactgatggtcttagggaagctgttcgtgttgctctgcatggaggtgctcaggtttgtattactaattattaattgaggaccttcactttggactcaggctctctactagcgcagtttttagagtttatactgtgtaggtcatcttcatggaaaacaaagggcctgtgatgaactcaactgtgcaggcattaaaggaagaactgaaggtatcagtattactgttccatgtctatcatcagtaacctgtgtaaagccttctgtgttcacggagactgtagaatgtagagtaacattacatctcggttcacttgtttcaatttatcaaacagggagacagagtaatgtttgttgagatatacgatgaggccctggaacatttgatatttgcaggctctgatatatttctgtgctcttccttttatgacccatcgctacaaatagcggtacgtaaaaactttttctatttcccgcttctacttagttagctaatgttcacttcgcaatggcatccaaaaacttagaagaagtcagtatcacatgatttaatggaaggaggtattctccagttttcagagtatgatttattggtagatactcaccgagtcaagagtgaatcagctccttgacacataaccggcgcaacttcatttccacagactgtgaaatgaagcaattgacaagctctttgaccaaaactccttgcagttcagatataattttgttctttggtggcatttttattttgcatgtccgctttagctgtgtacttgtgtatgcgttgttgatcttagcaacatcataagttgccggaattatattttgatttttgacacatgaaaatgaaattaattctgcaatgaaagttagcttacaagttgcaagctcactactttgtctcgtagcaagttgactcttatctttgtgggcagattagagcaataaaatatggatctgcaccagtacagataaactttcccagtaatggatccaggtgaaaactgcaaaatattttatagatgtttgatgtgccaattggcaattatgtgttgtcaagtttactaagaagtggcaaatatgtgtttatgtgtacttatggcactgtgtttaaatttacttgtaaccaggcaaactgagtggcatgactaccctagcacagccctctctcagtacatcatctcaacatatggggacatgtccctttctcaagctctcgatggcattgtaagttcacaatctctaggacactacttagttaacacttatcctttggaagctgttgaatcattaggacatgccaaatctgcaagaaagaaggcttataggaagctaaaatagcctccccgaataagctatatcaaattttttgcttcttgaatgtgcagaagaacaacccttcccagtgggattggcgtattaaggatgcgatgtcaaaagttttatcatgggatgctgagtgctacgacctacattgggaggcttattccgttattaggaagctgtgaatgatgcatttctctggggactgcatggtacatcatcagctatctaaatacaaggcacagtttttgcccataaacaatcctgtaagtccagttgtttagcgacatgtaatctagctaagtaaacattccattctagtagtatgtaaagtacatgttaattttaaattttgattttgtctcttgctataaagaccttaatcgaatgttattttgctatagagacaattatgacaacaccacaagaagaattatgacaaaaataaaaccagtgcgattgtgcgatccaccagtttattggggttatttcacaacgttattgtgactgaaagttctattctgataggttgatttcttgcaactgaatggacaacggagagacagcaatattccctgagtgtgttttggagaaagcatagtgatgattagtaccaacgcacattcaaggtaacaatatgtctattttatttctaccccaaaacacaggtcatacccgaatggcacaaatactaggatctgcaagctggattttcaggatcatagtcatggtggtgtctgaacttctgatccacatttctctgttccatgtcaagcaagctctgcttctcctccggattggcatcacctttatcccaggggtgtagctggtatctcctcagcatctccagcttctcagcgacctccttcatcatcggtcgttcctcaccactcatgctcacacatcgcatcacgaggtgtgtaatctcttggagcacctcctctgtcatctcattcctcacctggctgtcaataagttcctcatggcggccatctctcacagccgtcatgaagcaagacacgaggctcctgtcttcctctgatccgccgaagtagagtgccttcttcctggttagaagctccaggaggacaacaccaaaactgtacacatcactcttgttagtcagctgacatgtcatgaggtactcagggtctaggtacccacatgtcccttgcaccagagttgcaatctcgaactcatcattaggcaccagttttgatgtcccaaaatctgaaacttttgcggtgagtttgtcatcaaggaggatatttgccgtcttgacatctccgtggaggatgggtggtgaggctgaagaatgcatgtaggagagtgcctctgctgactctgccgctatccgaagacgagagtccaaggatatgacagtgttgagagtgctgccatggatgtagtggtcgagggtgccgtttgagacaaactcataaactagcatgggaacttcgacttcaagacaacaaccgagcaacttgacgacgttcttgtggttgatctgggagaggatgcacatctccttcgcaaattccttggtctgtgcctcctctatcatctttgacttcttgatggccaccaccatgttgtcctccaggacgcctttgtagacgatgccgtagccaccgcggccaagaacacggtcggcggcaaagctgttggtggccttctcgagctcttccttggagaaaatcttgaacccacccgctccgccgctggtgccaccataggaactcatctgttgctggagaagcacgccaccgttctgctcaaagaatctttgcttcgttctgatgagcttcctcttttggagccccaggtagagccagaacaacatgaacagtaacaggaacacaccacgctgacccctgaacatggtatgccaatgatattcattagttcccgacaagaaaataagtgcattaataatgttgcttgataaccggccgattgaatacctgtaacgactttcagagctaacgtgaacttgtccgttgggaggcatccattctcctgggttgcatttccactagtccccggtcggcattcgcaggtgtagcttccgattgtgtttgtgcattttccgaagcatgggtattcctttgtgcgttggcattcatcgatgtctagcgttggcaaagcaaaacatattcatcacttaatttttttttgtcagaaagattattactccatttgcgttttaggcacccacctttgcatccaccgtcgaggtaggggttgccctcgtagcccttggagcacctgcaccggtacccctggccgtcgctggcgttgaagcactcgctgtgcgcgctccggcacgcgtagtccgtcctgttgcgcacggcgatgtcgcagttgccggcgttccggatggcccagtcgagcacgacggggacggtgaagtcgctggttcggttgatgaaggcgcgatagctgtaggtggtgttgatccacttgtcctccgccacgaacacatactggcattttgttgagtcgagatggcggaagacgggttccgtcggcgggagctcctgttggtcggggacgtttcgcgttggttcctctgtcttattcaacgtgagtatgtaaggcttgtagacgttgagagcgcggggcatggtgttctggcagcaccccgactcgccggtgcactggcccggcaagtcaccctgcgactgcgaccgccggcacgtggatgtgcagccagtgacgtagttatcgtcggcgtcaaccaagtagccaaggacggggcacccgagcacgacaaggcggttcctcgctgtggagaaccggtaggcgatgctgcggccgtagtccggcgtgcggtagtgcccactgattgctttgaagcggtcgtcgtggcagttgcttcccgcgtcgacgaagacccggacctcgccgtcggcgatggaaaggctcaccagctttttctcacgatcatccaggtagttgaagtgcggagtgttgccgtcgcactcgagctggaagtctttgtcccgggcgcagccggcgccaatgccgaaggggtaggagatgctgatgttcccgcacttgtcggggcagcccggccatggctgagccgatgccggtgtcaccggcgccaagcagacgagcatgacggctaataagtaggcaaccgcctgatgcagtgtactagtggtagccatttctaacatgtataatcgccttcgtgttgttcttcttgccgtcttgcttttacatgccggccgggcttgatatccatataaatagatcgcgcacaagcttccttccttcgttttttggagggcaaatatgccaagatcaggaggatgtgtcatggaagctgcgtcgtgtattaggagttgactgaaagaacacgcggcgacgtgttcttttcttagagggcgcgctgtgtttagttcccaaagcaaaaaaaacttacgctgttaaaacaaaaatttttatgctgtcacatcaaatgtttgaatacatgtatagaatattaaatgtagaaaaaaaataattacacagattgcgtttaaattgcgagacgaatcttttaagcctaattgcgtcatgatttaacaatgtggtgctacagtaaacatttgctaataatggattaattaggcttaataaattcgtctcgcagttttctgacgaaatatataatttgttttgttattgaactacgtttaatactttaaatgtgtgtccgtatattcaatgtgagaaccaaacctaacaattttcctcagctaaactaggccttggttgactagaaagtacacgttgctttgccgcgtggaatactagactagaagaaaaagtgaatgtgcacgtagtattagttgaaagtaactaaatgagaaatgacagcatataattaaatattcattcaagaataggcagggatccatcagaccactttaagaatacttcgtcaacttaccctctaataaaaaaggaacagtcaaatcactaattcaattcatagcatcatatgatcactatcttttttgttttctaaacaaatacatggaactggacagctgatccaaatacaatagttgtgcaaaaaatattttgttgaaattttggaattgaggcaccaaagcttgttttgagagaagccatgtcaactctttttgttctctttttttttctcagaaccaactgcatataagctttaccaagcccatggacatgtctaattcataatttacgaagccgctgaaaaaaagaattcaatatgttcgtggttcgggtggacaggaagctcgtggctcgttagctcgcttggctcgtgacaggctcggcttgtttgaatttcctaacgagccgagctggcatttcagctcgttagaccgaagtagtcgtgccggtctgaccgcctggataccaccggtctgaccgagatttaatcttcggtcgaaccgctgagatcagctcctgacgcctgtagccatcgccggtctaaccgccgccttgccgccggtttgaccgccagtgagttgccggttaaaacacaaatcgaataactctcgaagtagatgacaactttattgcttctatctgtgtttacaaagtgcaacaacagcactccttaaaaaaaatctcgactaaactcaaaaccctaactaaactcacaactcaatactctcaaaagcgataccgggaggccacgccctccctctctatttatatatgaagtaggcagcccacgccctccctctctatttatatatgaagtaggcagcctaaagacacgaaccaaactcatactagaagtcctaatccacctaggaaaccttcccgtacaagaaacaaactttacaaactccaatcataacaaatttggactccttccaaattcgacttcgcatcccatactcacacaatacctcgtatgccatatagaatcttcaccaaccacgtgcattgaactctagcgtaagtatcccacatgatatctgaccgtcacagacatcgtcttaaccccaagccaactcccgatccatcaccgcaaatactatcttgaggcatcaagtcacctacacatgaatcaaacaaagaaatcatattccgagaccaagctatctccaacttgactcattagtagcaaacaacagtattacatacgcatagtatccatctagaagccataaacatgaaacaatcacggatatccaaacgaacaacccgaaaccgaaaccgacacagagtcgcccggtcagaccgcgggctgaccggtctgaccgctcgcatagcgccagtctgaccggcatcacctgcccggtctaaccggacctgacaaaacagcagtacctgtatatcacctgtaaatccaatcatctcaaaaactcctatccaatcatctccaaatatcaaaaccaataatctcaaataccaattatttatcacagaataagaatcaaaacacactttgatcttacagtatagtcagcggaatacgaaccgaaagagacaccaacaaaaccattctatcgaatggagaactgccaactgataatagaaagcacaagacgctattattgattttctatttggttagtgcctataaaacccataacaaatagctgatcagttcaagcaatttcatccaagaacaaacatctatatactataaaaagtacaagttcatccctaatcctacaatccttcagatccactatcacgtgggacccacctgtcatccctaagaaagaaatcatgcaccatcgtcgcgcacgaagaaaaaaaaagaaacgctgaagggacacacgatcccacgatcagataagaaaaaaggaggaaaaaccgctcgtgaccgagaatggcgtcactatgccgcccggcgccagcgatccatgcattcaccgccgtgtgcgccctcccaccgcccgctctccacgcctgccgtccgtcgccgctacaccacaacaccgtgcgccggcactgcgaaccattaattccgctcgcagccatcgcacttccacgccgcgcgccaccaaccgtccctggatgctgcacacaggtggtgccggcccaaccccagcgccgccgcttcccaaggtgtttcacgcctccggcgccgtccttctcggccggagtcgcgcctgaacctgcatattctcggggaaagctctaccgactgcctcacgatcccctccacccacgtctccttccacgaccatcgctggcccacgaatgcgttggcaaaggtggcgcagcccctgcccaagacggatttcagccgtgccgcccacgtcctgggcgggatccaccttcactcgtggggctcgcctgttccaccaccacccgtgacggttcaaccctcgctgtcggcctgccgctgaccgggaagggagcaatccgcgtcgccggcggtgagtttctctaagactattgaggtagctaacttgctcatggcctttgcagcacccatgtaggcttttttttttttctgatatgctctttgtgattctgatatgttaacgtaaattattcctgacaacagttgcttgaacgcttcaaagacttcaggcaccaacctgaagctcttattctttgaggccaacaagttcagggaacaatgaagaatcgttaaaatactataagcaggaaggtcccttgaaggatttcagcgagaggggaaccatgaatcagctttggttgcttagatcagaatgctccttccgaagtaatttttgttacagcatttccccaacgtattatgcacagctatctaatttgaagctataaattcaatgttgtattatttttgttatatacaagtatattgaaatgaggtatgccttcaccttgtttttttgggtggaattgaggcaaatggaaaagggcaaaagattggccatcaataagtcaaatatcattaatctgattctttttataaggaaagttgttgcttcagttgaaagtttatggttggccgttatggccttcacactagactgcttgttgaatcttttctataggtttttcatagtctgatacggtgtactgcacatgctatgagaaaacccaataagtatagctatctatatgttttttttttgacgaattcagcgaatggtaataactcagtcttaactagataaaactatgttctctcttgcatgacaactatagggctaactgaagaacctggatttttcagggaataatagtatatgttgcataccggcaatcccaaaatgttgcaatgaagaaactcatatgttacatactgcagaccccaaattcatgaatacaactttgggcaactttgagaatttaatcaagaataggtactgttaatgctatcctgtgtttgtcaacgacaattatagttctgaatattttttcacctccgagtatacatataggttatataacccactgctactctattttttagatttgtttgtgacttgtttttcccactgcccacatagatcctgatttcactgttaaaaatccatgttttccagccctacacctgcatgatctgggtagagtggaaaaaacgaaaaaaaaatccaagctgatcgaatttgatttttctattttcatctgtacctgtgaataatggatcatagcattagggttggatgctacagggagacagatctcggatgtgtcatgtattccatgatgcaaggtcgatgttggctattgtctcggcgtttcgaatagagaaggttaatagaagagaatgtaatggtgtagcttttttgggcatgatgtataacatgaacctttaactcaactgatttaagggtaggatgcattttttaacggaattgctaaccttctttcgacagattttgcatccccaaattaatcttgcagattttgggacactggatgggcttcgatattcgtgctccacgccttctcctccaactctagcgacctcctcttcttctttggtgccggcgaggaccctacgggttagggtcctggggtggggtgggggtgggaggggg

SEQ ID NO: 903 - DNA, 627 bp, Oryza sativa
gggctatagcacagctccagtgcttgaaggctgaagagtaatcagcagaagtaacgaggtccattgttggtctacagaaagtcaagggccgtagtttcctggtagataactttcctgaattcctctcttctttcttggcgtcaaactctctcttctcttggtttcctgctgagatcaaccaacacagataaaaccagctccatatccaacactgaaagatcgaacatcattgaatgtattagagcatctccggtaagccccttgccccccagagaatgccatccaaaaggccgtatactaatacacaccatgatgttccccccatgcctaaaccccaagctacagattatccttagaaccctaattgatccccaaaattttctcccacgtctcgtacgtgtgtcctacccttcacacggacgcgcctactgtccggacgccccagaacacttgcttatatacatactcctacgtcgaggcatgatgctgctgctgcggctgcggagtacgtagtacgtcgtacatggcgcgcggcgagcaaggtcgtcgtcgacgtacgggtcacttgaacgccgtctccagcgacgcctcgagcaagtcgaccggcgggaagagcgagaagccgcc

SEQ ID NO: 904 - DNA, 817 bp, Oryza sativa
aaagagacgacggcggcgcggcgctagggttcgggcggcggccggccggaggtagacgacaggcctgataggtgggccccacttgtcagcggcagcgagcgcacgtgggcggctcggcttgactgggccggcttgggccgaggaggagagagagagggttttgggccgactttcggcccaaagccaaaagaagacttttaaaaaacctttttcaatttaaattattcatgaaatgcaattccatttattaaaaatacttccttagctcaaataaatcccagaaaaatctaggaattatagaattaagcaaagtatttaatgaaattttatctggccccattttatattggaatttattaattaaaactagatcttctcttctaggcttttaaaataaattctaataattccaattaaacaacaatttatatatttaggatttttagggtgtgacacccttgctgctggggagtgggtatatatacccctaaccaccaaaactaaccgttggaaccgaaatccccaactttgtgctctgtcggtcagaccgccgttgtgaggccggtcagaccggactactttgtaatggctagaaaactagccgttacagggcaatcattgagcccactcaacctggccggtctgaccgcagtgtagtggccggtcagaccgtccacggctcggtcagaccgccgtcggctcggtctgaccggttgcagctctagcggctctgtatcgccaccaaaaaccagaccagtgcaacagaccagtggggctggtcagaccggccttaccacgtcggtcagacctgctaaca

SEQ ID NO: 905 - DNA, 507 bp, Oryza sativa
ggtgccagctttcaggtcagcccgcctgcttgcatcctccttttcatccaactgcagtacacggcgccgaagggaatcaaacatcatcaggattccttccaccgattcctttggttgtctgatgaggatgaacacaagttgaactcgttgtccaggctcctccttattgatctgcgcttgatgttggcatcattagatttctcagcttgctggggcctcttggctctctttggcagcgttggttttttctgcctgcaaaagggcttgtaatcttgatctgatgattcatcttcatgttgcggtgttggaaatgccgtagattggtgtagcttttataggaactggtgactttggtaagggcagagaaaatgaagctggggcttcttgaggctgttgtgatgaatggtgtggcataaactaacaatggattggttgattgagtttccacatcatatcccaaaatagtaggaaactttggcgctaatgagcgcaatgggggctgcagga

SEQ ID NO: 906 - DNA, 625 bp, Oryza sativa
tcatgtaaacatcctgtttctctgttgaaactatgcatcattgcttcacatctctgctacgagcttgctgtattgatccagagcgaggtcaaacgaagtgaatgaaaaaggagggagcactgcttccatcacctctgcagcatttggcagctcgctttcaaccggcacgacctgcatgcgtcattcacaaagatacttgtatgttagatgaactcgccaacacctgagaatattgcgtgttagagcatctctaacagactctccaaactaaatttggcaactctatcaaaaaaaggtgcaacttctagaaatacttgtaggaaatgattccagacattgagacataaccaaataaactatttcctggaaaacttacagataaaactgaaagacagaggagagggctcggtgaaaaaaaaagacagaggagaggacatctataagactacaaaagtttatgccttatgtataacatacactacttgattaaataagtcatacggcttgcatatatattggcagactgtaaatttgtaatggtaaggttgccctctgctaaattcagtgcatggttatgaaacaagaaacttgtgatggaaacaatggttgtcttgccttgtttggt

SEQ ID NO: 907 - DNA, 585 bp, Oryza sativa
cgccagctgccccggaagttgtcgcctgagcgtcgcccgagggagtgggcccaagcgatgcgcccgcgacctcgtcgcgagctgcctcggaagaaaccattgcctcgtcctggcgaaatccggctttctcccgagcggcttcctcggcctggtgggctcgggcggcctcctcccgagcggtatcctcagcctggcgagcccgggcggcctcccgggcggcctcttcagcttcccgtaggcgatctgcggcctctcgccggtcagattctcgcctccgtgcctctgcggccgccggatcctcggcctcagattggccagacttggaatgacgggagggacgcgacgggatctcgctaaaacagaagaaaagaccagaagacgaacaaagacgggtgagtgaaaactcgcgttgaagagaatggatacagccacgatgagtgagagatgaacctgcgagggggtcggttgaacgaccactttggaggggagatgaggtttccccgagatggttctgtctcccccatcttgcggagccgtttcttcttgggctccccctcgggctgtgatgttggcgcggccccctcc

SEQ ID NO: 908 - DNA, 692 bp, Oryza sativa
aatttgatagagatatttttgttgttttgtcttttgatgtagaaacttactgttggcgggatgccagaaaagattgtaacagcatatcagtcagtgcttgatcaacattttgatgaagacacagctttaaacaaatgcaataatgctgttagtgttttggataggatggataaagatgtagatgatgcttgtactcaaggtaaagcatttttctcacttcaataggtctgttatgttatggatatgtaccgtcgaaagattggcacttaatgcattctgataccttggcctgtattgcatcatgattgttccagcgctattttacttctagttccatcatgtacttgacttgagaaaaaaggaatttacatagtatttccggttttttgttgatctgccatgtaaattctagactaaacaaacatctcaaatacataaatatgatctagcatgttgacaaagaaaattgctgtacataattttataattatgttaaaaaaactataatgatgtgattgtagcatgcattggcatataaagggaagaaaatcaattttctggcatttgttttcataggtggtggtctagcatacatatccttattctgtggagcacatccagcagcttaattattttacattgtgatagttccttgagtcctttatagtgcacactaggcctgtaggccatga

SEQ ID NO: 909 - DNA, 757 bp, Oryza sativa
tcctgcagcccgacaaaattataacaccggcatccacacaaaatagtggtggaaaaggaaacagtggaatgagaaaaagatgtacaacataggagttattttctgaaaccagaaagaagatttgcatgaagatatatgaagaaccaccatagttaatacagtgcagtgtagtgtgaacaatggtaattcaactgaaaagactagctgcagcagttaggtaaggttgactaaattattgatctcatcctaacatattttgatgccggcagagaaagtgacgcgataagatgaactgacagagctaaataggcaaaatctgacctcaaaaaataatccaaatagtgtgtcagggatctttcgtgaaacctcccatgaagcatcaacctctactagtgctgtctgaggcaggtccagctctgaagataggcatttggaactgaaacaaaaaagaagcaaggagcagaaggtgcaaaagaatgcatctttggaacccatgccctcggtcctgcctgccgaacaacagtaggtcagtaaaaactgtaattcagaccattgctacttcgctagtagtcatatagaaatatagagtaagaaaaggagcagtaaaaagaagagtacggaatcgattgagttgttaaacagcaagaaatttaacagaaaacagtatgcatcattggattagacctactagaaaattgaaactgcagctgccgcaacagaagtccgctaccaaacactaacaaagggaactccaaag

SEQ ID NO: 910 - DNA, 851 bp, Oryza sativa
ttagtaaatctatggagacatactaccaggtacatctaattatttaaccaactttcttcttttctctgactacttggtccattttaaatagatcttattgattttaggaaagtggaagggcagggagagatggactaccttcagaatgtattctgtattatcgacctggtgatgttccacgccaagtaaactaaagatgtcttcctttttctcttggtgtggcttcttgcttcctcttatcgatatgctgttttttcaatgagcagagttcaatggtcttctatgaaaactgtggcctgcaaaatctttatgacatagtacgatattgtcaggtaaattcccagtgctccgccaaaatgaataatatttgattttcttaattctttataccctcaacatagattttgttagtctcagttccgccccttttctactcataactgtacaagaaagtcatttatgtataatctcacactgctgtttaagtgatcaatccaactgaacttcctgcctggaattttgtacaacactccaaaaataacttccactgaaaatgtacaggagcatagggatcaatatacctttccacagaaaatggacatcataacttgctgtcggatctctctctctaggaataaaacatgcaataggtccgagataacataggacaaaagttgttcatacaacgaaaagtaatattgtaaagttttattgcaatatacttatactagagtcctactcggaactgtgtgaacagacttaggcctatataacaagtaataaagattaggaaatagtttgaagctcattaacttacatgacctgagcatgctatatttgccataattagc

SEQ ID NO: 911 - DNA, 5832 bp, Oryza sativa
cctgcagcccttatactcgatcgggttttggtatgtgtgactgcaaatactgccatgcgaattcacaagtttattaatggtgattaatgtccattatgaatctcacattcaggtttataattcacctagtactgctactattgaaacatttatttggagtacttcacttgtaacattaaatgtatgtttatataactactgcaagttctataagaactacttcaaccatggacaagggctgagcaccacacactccagacccagcccaaaatccaagaccatggtgtaataccagatctggtttagttgtatatttattggtttgttttatttttatttttttctgtatcttataatggttttatattccccccatttgtaaatgtagctgtgtaagacagcagaataagaaccaggttccagtggttgctatactcctggctactagctgggatttcataaacttgcataaaccaactggttttgggaaaccctgtagatttgaaatgagcattttgctttgataatggcaatgtggaaaatagtgctaccttttttctggttaactacacgacacattctctataattaccatgctgcattgtcttgtggtcaaaataattatattttgccactaatgttttgagaaaaaaaatcaataaacgttttgaagcaaaggtgtttgtgcttgtattgtggccatccccaatctttgttttccaaaaatgaagcttttgcttttataatcttatatatcaataaaaagcagtagcaagatcataacattatgaaactattttaacaaaaagtctaataatatggtcttcacattttcatagctttagctgctttctttgtttgcctcaaagaccttgatttgatttgcaatgattactgaagaactgtttatccctcttagaaagaagaatttcagcatacagcatatgcaaccaatgcatatgttgccttgggaccactgtggaagccagcactacaaggtaaatgtttctttctcgtgaactttccatcttattttacgagcgatggatgaacatcttatgtgtaaagttcaacgcttgaacacaccactatctttgttattgctagatggattgtgaccgtacactaattaaaattctggcccttgacctgccttaaactttgaggtttttcttgatgtggtcatgtgttcatgtttggataatttaggaaattgtggaacgtatgtgaatatgtttttttcgtatatatgcagggaacagaccggtcaagcttagcgttgcttttcactctcaggataaaggtagtggatccaaacggactaagcgcaaccagatgagtaatttggaagctaagcttgatgacctgcggagagagctctcttccagtaatggaggcgtattcccacatgctgttctttctgcccagcaaatttccctcctgaaccgccaaaaaccaaccactgttgctgaggtgaggtttggttcaaatattctcttatcctacttagtgctatcctaagtgtatatatggaccgtctctaatttatatgtacattttatctgcggcctgcagcttgaaaagcttataggaaaggttaagacaggtaagtacgggagcgcgatcattgagctcatgctgttacatattgattcagaagtagccggaggaaaggcctgtgcatcgaagaggcaaaagaaagataaggaggatgttatttgtgttgagagtagcgaggaggaggatgtttaagcgttatcatggtttttcttttgaaggctaacgaggcaaatttattgttgaaccttgagtgaaccttgagttgtgttgggatttaaacgagttctgaaatatatgtagttgaggaattacagtgtcaagctaaggcaaatatggaatatctagggaatgttttggtttattgtcattttcaactttaccaggcttggtattttttagaaaaagcaacaaaccatcgtccgctaattagctatcatatcacaatttgataattacataagttcacttataaaaaactataccaaaatttgacaatccttcaaatcgaacacattctaacattggccgtgtttagtttcatgcccaaaatttttttaatgtatatggacacacatttaaagtattaaaagtaatcaaataacaaaacaaattatataatcctaccgtaaactgcgatgtgaatttattaagtctaattaattaatcattagtaaatgtttactgtagcaccatattgtcaaatcatggcgtaattaggctcaaaatatttgtctcgtaatttacatgcaaactgtgtaattggtttttttttccgtccatatttaatgctccatgcatatgtccaaacatttgatatgacatttttagccaaaaatttttacaatctaaacacacccgttactaaaacttcgtagcattgtcatattttggaaaggttgacttttttttctttcaaaccctatttgggagagcttgaaactagtacaactctcagaatctctggctcagaatttttcccgaaatagggcctgactgatgttatagaccggagaggtcagaaaggcagcatgttggaaatcaaagatgatgcaatatcccaacacgttgaaatgaaacttgggaaataaaaatggaaatccaacaaaacttgaagccaatttggcatggtaatgagtggtgccgccagtagagaagtgctattgccaattagtagtactccagtagcaatgaggagaaactaatcaactaataataatgcgagcaacaatcatccattctccagtccattgtgaggagaaaattagtgagagaagacgattgttgattcacattcaccatccaccggtgcggagctgagagagaagaggagagagggagcaggagcaggagcaggagctgctcagtgggagcgggcggcgtagcgctcgacattttggtcgttgaggttgatgccgacatggcgtccccgaggccagcgctgacgtcggcgaggatctccggatcgctgtagtgggtgacggcctgcacgatggcgcgggcgcggcgcgcggggtcgccgctcttgaagatgcccgagccgacgaagacgccgtcgcagccgagctgcatcatgagggcggcgtcggcgggggtggcgacgccgccggccgcgaactgcacgacggggaggcggcccagctgcttggtctgcatgaccaggtcgtagggcgcggcgatgcgcttggcgtaggagaagacctcgtcgtcgtccatgttgcggagcgcgcggatttcgcccatcacggagcgcacgtggcggacggcctcgacgacgttgcccgtgccggcctcgcccttggtgcggatcatggcggcgccctcgcggatgcggcggagggcctcgccgagcgtcgcggcagccgcagacgaaggggacgcggaagttgtgcttgttgatgtggtgggcgtcgtcggcgggggtgagcacctcgctctcgtccacgtagtccacgccgatggcctccaggatctgggcctccacgaagtggcctatgcgggccttggccatgaccgggatggtgacggcgcgcttgatgtcgcggatgagcgccgggtcggacatgcgcgcgacgccgccctgggcgcggatgtcggcggggacgcgctccagcgccatgaccgcgcaggcgccggcctcctcggcgaggcgtgcctgctcgggggtgaccacatccatgatgacgccgccgcgcagcatctgggcaaggcccaccttgacggagaaggtggcggcggggggcttgcaggagaccttgccgccgccgtagagggccacgacgccgtcgtcagaggacgccatcctgtggatcttgccctggacgaggtggagtggaatagtagtggattggtgggattttttggcgatttgggatggaatgtgatactgatatggttgcggtggccgtgctcgtggccccaaatgaaaacgttaaggtttatctttcccacggactttccccatatttcactcaaatttactgtttaaattttcaaaaactgtcccgaaatctacttttatcctgtattgaaacctcaaatttatgtggtttttggttgaaagtttcttatcgagttaaaaattttctagtttgagctgaattttttctccgcacaagtagaaagggggtgtatttttttttccgcacatgtagaaagggggtgtttagatctaaaggtgtaaagtagagtgtcgcatggggtgttcgtgcactaataaaaaaattaattacagtatccgtcaagtcaaatttattaagcctaattaatccatcattagcacatgtttactgtagcaccacattatcaattcatggagcaattagccttaaaagattcatctcgcaaagtagtcgcaatatgtgcaattagttatttttttagcatatatttaatacttcatgcaggtgtttaaacgtttgatgcgacaaggtataaaattttgggtgggaccttaagtttctattttgaatcatttgttttttacaattcttagttgaaagttttcatatttttcgaataaaatttttaccagagtttaaagttactaggattttaaaaacaaggggtgtatgcacggtatactaccataatccgacttcttatcgtatcagatatgggaacacggctgcacgtagcaaaaaccccaaatagagacgtctgcgtgatcacggccctgactcctgcctggcgcacctgcgcacgatagcaaaccgcccacacagcacgtttatttctggtaaaacttaacgaaagcctcaactttgtaaaggttagtggcacagtttaggggtaaaacccaaattattgaccaatttaagctaagcacgacttgtctgcaaattttatggccggaggattattgggcacgaattctataggtaaaattttgcatcagaataggacttctcccagtcccaagatcattataatactctattttaatataggctttgctgacagagtagattgtacacaagccagatggtattctttatcttcttgtttttccagggcgaaccctgctcggctccgttcttttctccaataaaagttggatgaaattagatattcatggcacgttttttaaagtgctaaacggtacgtttcgtacgaaaactttctatatgaaaattactctaaaatatcatataaatatatttttcaagtttataataattaaaactcgattaatcatatattaataccacatcgttttgcgtaaaacacgtattctttatcttcatcttcatctttatctatatgagtttcaaagggttcccaggtgtaactttatttcctcctactcttttgagtctgaaatccaaataagtcacatactccctcaataagtcattactctcaccgtttcatactacaagtcatttaaccttttacttagtcaaatttctttaaatttaatcacgtttatagaaaaatatactaatattttttaatataaataaatatatttaattttaaattttaaaaactaatttggtattgtagatgttgctaattttttctataaacttagtaaaacctatatttacctaagataaaagccaaacgacttataatatgaaacggagggagtagtatatagcgaaatgagtcacatagtatatagcgagataatcatgtgcattgtctcacttatgatatatagcaggcagggagcaaagcagttaatatcatcctaaatctgattttttttcagctcgatcgagctgaagcctaatccatgacccctcgtcatcagctagcattagaccc

SEQ ID NO: 912 - DNA, 6442 bp, Oryza sativa
  unsure (1)..(6442): unsure at all n locations
ccagacagataaagctttgacaacacagatattatcctatctctctcatacgtgatgtccatgggtgtccttttgtctacttgatgacttggaaaatgcagtgaaaactacgatcttgaaagcttaaatacctggtcctggataagggaaagcaaaggactaacaaccaatgtaattccatcatgaagtacagcaggtagttgatagcagaggctcttccctccaccagcagccattatgaccagtacatctcttccactcatgatggcattgattatctggaaggttgcaatatgcttaaaaggatgcaaaataaagaaactgtaagcagtatagcaagttgtggtatgtacatctagggctaggctcaacagtaccaagagaacaaaagggaaagaatgtggggatagtaacataattctaaaagattatttctttttgagcaacacacaagttaatgataaataatagaatacatatagcagcccatgtatgtctgaagcacaccaaatatatggtttcttcgctaaatgaaatgattatatgaatctcactttgtattttatttcgtagttgtaagcagtgtccaacataaaaaaagataacttctactcttcttagttgtttaagcagtgtccaacataaaaatatagataacttctactaaccttacctctctttgattctgccggtatgaagaaatcccaaatacattaaaacgaacatcatcagcccgagagtcccataagaagctcccagaccaatcttttggaccaactgaaggggtattattgattgtgttgttggatgctttagatacttcgagcatagctttcagctgtgattcacgctcatacagctcctcttgacgatcaatcagtgcactaatttgccctgagaaacatgaatttaagtgagaaaatgaaaggataatttgtaatatgaggaaataacagagcactagcaccacaaaggaaaaggtggccactgctgatcataatgcaagtgaagatacataatgacattagcagcctatttatataggcatagttgctttgtttcatcatagtgtaaggtgataattagacttcatgtaaattaatgcaagtgaagatacataatgacattagcagcatatttatataggcatagttgatttgtttcatcatagtgtaaggtgataattagacttcatgtaaattaaagactaaatagtcccggcnaaaatttatgaatcccggcaaaaattaaagactaaagagggatgtggttttgtattatttgtatgaaagtacctatggatttataacaattagtatttgtgatgtaatatagacagtgataaaatattcatcaatgagaaaaacggagcaggagatgccaatctaacccccgaaaattgttgtacttgctataatttaattcaactgcacttagatatggtgagctagaaacccctgcctcccatttatgtattacacagaagggttaatcacttgatctcatccgaggaacgtttatgaatcaaagggatagcacatattgcagaatatgcatgattagcggtgaccttggatgtcatcaagttctgcctgaacgagtaacaattctccctgaatgttgtcttcctcatacatgctgcagccctgcacaatgacaagggaaaaaaaaggcaactgactttcttagnnnnncgctgccttaaaaacgagtattgagttagagtccatgaaacagaattgtacactttgagttgggactatcaaaaggcatactcggacccaacatcaaaacacaagacctaattatagttaaacaattgaggtaaactaatactgacatgtccatgtataacaagcatcgatcggcatatatatggcatttgttcaagagaaccagttagaggctgatttggtccattttcagaaatacagaatcctcattctgccacataataagtaattctttttaaaaatagtctagggcataccacatagcacatccatcttttcaaaatcaaagcaacacaacagttaggtggtgaatcgaaccgaaccgatatggaggcaggtggacggaggtcgggcgcgtcgccgtcgctactcccccaaacctgcacgccccgcccgccgtgcgcgcgaggaggccaaggccggtggaggaggccgtgcgcgcgaggagggcaaggcaggtggaggaggctagggtgtctacgaggcttctctctctacagccgcgcgcgcgactgaggcgaggcgacgcctgcgtccggctcgcaccgcaccacaccacaccgcagattggggaatcgggagaggtaggtagagccgaggtgcggtgcggggaagaagatgaataaatactactactccttattacaagtcgttttacttttttttccttgcaaactttagatttttaacgtaaaacaaacacattatcaatatatatccatattaaatttaataaaactaatttgattattgctaaattatctataaacctagtcaaatttaacaaagtttgattaagtaaaaagtcaaaccaggggtgtagcgattaccccgcgcgttgcagcggaaaaatttagaaatatgtaaaaaaaagctttaagaaaagaaattataatatataaaaagataatattttaagcttgatatctggtgatttaaaatttttattgtatatgacacataaattgttatataccaaacatgagaaaaatctaatgtgtctataatttatctaggtgacatgtatggttctaatggatatttagatttattataatataactacagtaagtaagtatgtggccctatgcatgtcaagcttttggttctaactatataggatatataaattacgagggtaccctttctggaaaaggaaaagtacctatactaatcgggcagtttatacgagttctcaaattaatgaaaaaaatctggtcgttgatttgctagattgtattatcaccaccgtagatgacaaaatcaaattgtgggacacttttaaagaaaatctaatctatgtaaaattgtgggccacttttaaagcgaacctaatctacgtccgtcggtgatatgggcccgggggtaccccgtacagagggagaaggccaccccaaacccatgtggcaccccccaaggggggtcgggcccggggttggagcggtggctgcctcccgagccaggggtcggcccgccctgagcccctcctcgctttgattcgcgtgtgtgccacgggcttgcattcccagcgtccaactaccgcgtttaatgaggtcctgtctgctgcggcacgccacatttaatgtggcgagcatgcacactaacaggtcgcttgcagcgggaatgaccgatgtgacgacggataggcataggacagggcactatgcacacgcgcctgctgctggcaggggacatggcttgcgtctgccccgtcccgtcgccattaatgaggggtttttttgcctctcccttagactcggaccaacattttctccacgccggtccgttcgagagatccctaccctgtggtggagccggatggccagaaatcatcgacatttaaggaggaatgacatgggcggacgcccacgtcattcggcatgatgggatggggcccatgtcacggtaaggcgcgcatggcttcacacgtcgagaggacaagacacacattaattacctataaagaatattattggtaaccccttaacatataaaaagatgtccatgcgtgggggaaaagggggacggagggcggaaagcgcttttatttcctcaccagatccaaccacacacaggagtagggtattacgcttccatagtggcccaaacctgtatagaccgtttgtgtccccattgctcccgaggggcccgaccccctctgcatcaccttcccttcatctctcaaaccttcacccgtgtccccggtccgaaccaaaagaggggcccccacagtcccccgcttgaggagtttaccctccgacaacgtccgatatatttcaaagcccttctaccgatcttatctcgatcagtaacgggagaccgagagcagatgatgttgatgatcatgagatcacaagtagaccagagctgcttgagtcgctattcaggtgccagatcatattggcgcgatttggggctccccctgtatacatcatcagagcctccacaagcaatgcagggttttgccatcatagggggtgcttagatctaggggtgtaaagttttgacgtgtcacatcggatattatatagggtatcgcacggggagttggggcactaataagaaaactaattacaaaatctgccagtaaaccatgagacgaatttattaagcctaattaacccgtcattagcacatgtttactatagcaccacattgtcaaatcatggagtaattaggcttaaaaaatttgtctcgcaaagtagtcgcaatctgtgcagttagttttttaagcctatatttaatactttatgcaagtgttcaaacgttcgatgtgacaaggtgtaaaattctggatgggatctaaacaggctcgctgctaatcattgtgttgatcggttgctcatctaatatatattgtcaatttttgcagtcaactgatgttaaattgaaggtaaattgcatgttaaggttccttgaatatgggttctttcttgagaattagttttctttatactcgcagttgaataattaaatcttttgatgcaaattagaatccttcaaaccagctgaaaatagcgcctcctgcgtttggcgctggcatagatagcggcaggagtcgacgcgtcacctccgctaggagcttgtgcggatggtatttttgcaaaaaaaaaacccccttatttccgtagataatatgttaacaaagtatatgccatttgctgattccattttattgtacagcttgagaacgaggtggccgaactgaccttctgattgcttcctgcagatgacggtgctccctctccccgcagtctcccaccatcttctcttgtcaatgtgtaatcatcacctctattactgttaggttcgtaccaatccttcccctcaagtgcaatcgcatttgtctgccgctgttccctgtgattcatgaatatattgtccttgtgattcagagctttctgatttgagttttcaaggaaagcattaatattatgtgattaatattgtccaacttaactctctaatatctcatgtgcagtctagatttagaaaattatactaaatatgttcttaaatctatgttatttttactttgctttcttatatttttagaaaacattgtgtgtaagatgtttttagttcacaaggattaaacgtacatggctacttctaatgttgctgataaaatttagaggcggcgcatgttgatcgtttattcttttgacatggtcggcagagatgatggatgggaaatatccagtgtcactgtttttttagaaatgtgctcaatgtacatatatcttaattgttcgctgcgactgtttttcttatattttgccatatagtgattatgatgatagctaaattcatggcttatttaataacacaataccatatcatattcacattgttttgtgtaactctagctatagacttccttcgtggtttatatttcagtctaataggtcaggatagagatcatttacaactcaagagttcaagtgtacttttggaagacaagaatatctcattgtagttcttaactttgtacatatacatctattaattatcagatgaactattttatccactactttctctctgtcaatggagtgtgtacatatatgcatgtataattatcagatgaacgatgacaataccttctatttatacagtcctttctgtaccttctctagccgtgatgtactccgaaatttaacttttaagggtgtgtttgggaggaggggttccacacacattagcgcatgatttattaagtattagcttaaaaaacttttgaaaggattaatatgatttttttaaaaaaacactgcatactatgccaaccaattccaattcctgccttaagatttcatgacaacattatatttcttgcaaccaaaaaacagaaacctgccacttatgtcagataaactgatcgaatttcttttgctaattatatcaagctaaaactgccaaaagtaatcactaacactccattctgtctccaccggtgcagcgcgcgtcccacgctagtctgaattaaataagatgaatcgtagtgcatgcatgtatactctggtcgcaagctgctgcgacaaaaacgtgtttgcagtgtattcttgggtgcttcttatctagaaaattgccaatctaaacttcagctctaacattaacgtgggcagagaaaatcaacacaattggccatggcaccaccacaccgtgtatgcctaatgggatctgtatcgctgccttgtcgcttggga

SEQ ID NO: 913 - DNA, 1209 bp, Oryza sativa
caaaagttgtggtattaattggcacttcccaaattttgtggtattctttgaatttggcaaaatctgtggtatggatggattttcctcgatttgaaattgagaaaaggcatactttatagaaaaggttgggcctgttaattgtgctgacaaacttgacacatctagggatatgaagcatctctatcaaatcaatttgcactttatttgtcgcagttgcctgcaaaaaaagaagcaggccttatttcacattacagttaaaatttaattattgtaaaaaatggatattattttcgcaactcacagttaaagctatcataggaacactgggaaactggacctttaaaatgccaagattcttgtagtctgggcgaaaatcatggccccattgactacagcagtgtgcctcctgcatgataacacttaattacaatgataaattggtaatcgcagactctagatacacatgtgcttaactgcttaaaacatatgtcaactagctatgctcacacttgataagatcattatatgatgagaaacataataaaaactaaaaaccaatatgaataacttataaaatgtgaacagtgaataaaccaattcatcataactgctcattttgtacaagtgattagcacgagtgtagacaatggcaacaagtcttcttcgttttttttgcaaatcatttttttctagtccaagaaggatgggttagtatttaaatagtaaaacacactcaaagcaaaacaatattcttaagagagacagagtaagcaaaagcatgtacaagcacatcatccaaccttaatcagagtaaacatgctttattgtgtggtaaaaaactcacatctattgcaatgagagaaagacgccctgcatggtggcatttctcaagcttagacatgaaccttttacttttggatatcttttcaggtgtcacatacaatatcttcagttctccttcacctttatcaagcgccttgtagacgaacttctcgacttccttattggtagttgaagccagcatgtatgcttgtatacctaaagctgctagtcccatgacctagaattgaacaaatcaaataatggtaatgatcatatacaagataaaataaattctcatggtagtcatggtggcctagacaacaccatgtcagcaagcagactaggcaggtgtacaggcattgcctggagaagacaagagacttaaag

SEQ ID NO: 914 - DNA, 1193 bp, Oryza sativa
tcagacaagctttgaacataaaggcaccagtcaagcaagttcacaaacggtacaagcaatttgcattctgtaccttcaggtggtctgcgatctttgtcatgttgtctatgtactcctctagtggcacatgaggtccaaggccggatgaatgggcagcaaccgaatcattgccaccaaagtaaactattaccaaagaaggttgcacgggcgaatcctaagacaaaaacggagtttacaaagtaagtaatttggtaacagtcagctaaatttgaacctgcaaatcgtaatgaataacatcatagtaaataaaatgtattaattctggacaatgattctcaagactatctagaaatgggatgctgaaagtactccagaaaattgttctctggcacatttgaagagtaacataaatcatacaacaactgagccactaaatgatagccaacctgcctattccaagcacggaaacatagagccagatttgttcttgttagatgaacaatgaacaaaagaaggggatatcactaagataagaatcatcagattagaagggaggacctaagcaagcatgttagtcaggaagtacaaccacagtcagtaccaactacccccaaccaagttaaatcatccactccacttgatctggtcctagggacaagagaaaaatgcccatacgtaccttgggaaaaattttgtcaatgacttgaagggcgcgccttgagttccaaccaatataccctctgagaaggatatcagcctgaatgagttgagcattagtgaaatgtatagtatagtatagtaggagaccgattaatacacacattatgctgaaaatggcacaagcaaaacagagggtatttgtgggtgggtcgacctgggaacaggacactgattcaagccaaaatgaacatgatagatgcaactactcatagatgctcggaaaatcctggcctacaataagtcaacggacaaggaagcatttttatcttgaaagacgtatgagttgtttaagaccgccaatggccatagaaaggaagtttcgctgagccctatgttttgaggcacttgtaaccctaggtttagcagtttgtttaaagaacatctccctcccactcccaagcaagggcagactgaaatcagttgccccggagtatatacctttagatatagcatacttcctcgttcctatcaaa

SEQ ID NO: 915 - DNA, 1934 bp, Oryza sativa
ggtggtggtgcttgagcttggacttgcgacgccattcctgccagcgcttgcccagggagcccaaggcgagcttggtgttggttggagcatcagcagcatcgggcaggactagagcatcctgctgcgggtgcggctccaagtaggatgaggagcgggcgtagtaggagaaggacttgcagcggcggaggtcggatggcgggtggaggccggcgaggcggtcgcggaggcaggccgggcagaaccccgtcaccgccacgcccgggtggagcccgcacaccgacaccgtctccattatccaaccacaatatgcctctgcaactgcaactggactagtagtagatttcttcttcttcttcttcttcttgcaattaaactcttgactgaatatgcatgctgctaggtctgcgttcgttgcagaggaggcaaacaaggcaaaagaaaacaagaggagcagagcaggcaaaagagacagatcgatcgatggtctctctctctccctattcttcttcttctacttgagttgagtcttgagctgctgctgcttcttcttttccctttttccctttctcttttgcttttttcccttctctgaatccttctcttctttccccaccctctgcctccttggacttcactggaccccatgcttgtttagctagcttagctccgcattcctataactgtaccaccatttttttttctttcttctttgttttggattgcagtgttagctttgcttttactttttacaacttttgatttccaacgtatactcgctcgctcacttacgtatattactactagttagtacaacccatcttacccctttgatctcatctatcgatcgagctgtgtgtggttttagcactagtaggtgaaattgatgcatcatatcatgtcatatgtgtgggtgtagcatgcagattattagctggatcatgtcgaattatcaatggaccggccccttccatgccatgcacttgccatcataattaattattactaacaaactacgggggtgcactgcatcatggatctccacgcacgcatgcccaacttcgattcctctccttcatcaccctatccatccatatcacttctacttatacactggacagagaataacccaataaatactgtaggtaggattttggatgaatatactagctagtactttctctgtcctaaaatatactaaaatatagctatctaatatagaatatgacattatctatgtctatatttatagtactagataatatcacattatatactagatagctatatttttagaatggatgtagtagtacattaacctaattaatgtgcgttgctgtctaccgtacgtaccgttgagcttcatcatttagccactcgtcgtactcgtatcgtatagtgtacatatgcttgcattaccagtaaattggtaattgcccatagccaggcaatggtgcctccaattatcaattgaacaaaatctgaaagcaagcatctacaaggaaaagaaaagtactagtattaattacctccgtcctaacctaaaatattgctagtgttactatgattctgacatgctcatatctagattcataaactaggtaatgtcacattatatactaggtatctcccgcttgtatacacacacttgtgcacgaaattaagggcgtgtttggatgccaccctgggaatcacgcctgactcaggcgtcgatctcaggcgttcgatttcggtcacctgcggctagatcgacctgcctgagtgatagcgctcaggcgagggcagcaaccaaacacgccctaaatgcctctcacatgatacctgatatatgcttctcacatttttcccccatgactcaacaatgttaacaagtcattgttaaacaaacagtgggttgcacaaagtgacggtgatgaaccgacaattggagtatgtca

SEQ ID NO: 916 - DNA, 1725 bp, Oryza sativa
tgaaggtttcaccaagtatgaacagccagaaactgggtgcggcagcatagtggagtaatcgggtaggtagctttatgtggtactgaaggaatgcactatcaggcatgtacagaagcagcagcagctgggattgggctggtaaaatttaggcgaatggtcgtgaaagtaaatgaatcagaaggttcctagccttgttaagcaaggcttccccacctaaattttaaaacgacatggcagctaaaaacccaacaccgcccattccctcctatctagccagtgcgccattataagcattcgttacctccgtatttccatgcactgcactgcactctcaccagctcttagttctccttcccctgccgctggtcacgcagcaaacatggccgtcctgccggagtcacgccggctctccctgctcctcatggccgcctgcttcctgcttcaggctctcagcgcccacgccatcacccggcattacaagttcaatgtgaggatatatcgtcatcaaactttgccgcatgataactgcaagcatgcatcgcaattgtcacatacatatacaggttgcagcagaaatggcaagatggtttattaccacggttttgtctgtcttttctgtgtcttgtgcaggtggtcatgcggaacatgacacggctttgctcaaccaagcctatcctcactgtcaatggcaagttcccggggccaaccctgtatgcaagagaaggcgataatgtcctagtcaaggtcgtcaatcatgtagctcacaatgttaccatccactggtaagcagcttagctagctagcccatggctactccatgcatatgcttcaactccacgtgtaatttgcaccacaatttgaatcaccacctcaaggctcctttgctctctgtaagtacccaaaaagaaaaggagaatatcatgctgtgttagttaaaaggtaaaaagtatgtatagcttgcattagatcctctctgttgaacagaaaacagaaatgtgctagttattgttcccatttatgcaacaaaaatacacttggtgaataacttgataaacaagcatgtcatactaatcaggcacggggtaaggcagatccggacagggtggtacgatgggccagcttacataacacagtgcccaatacagccaggaagcagctttctctataatttcactataacagggcaacgaggcacactcctctggcatgctcacatcaattggctaagggctaccgtccatggtgctatcgtcatccttccaaagcttggcgtgccctaccccttccctgcacctcacaaggaggctgttatcgtgttaggtatatatatacacacacatatatatagctgcttctctacatcttgatgcatccagcacttaatttatcaagtgctgcatgcaggagaatggtggaaagaggacacagaaactgtaattaaccaggccatgcagctaggagtgggacccaatatttctgattcacacaccatcaatggtcatcctggtccgctgtctgagtgtgcttcttcacaaggtaatactcttactctacatgaacacgagacagacagtgcatgttatggctaactatgtgctagtcctacaactgagccaaagacctaacgatttcctgatgtatgcttgcaatacaatgcacagatgggttcaagctcagcgtcgaaaatggcaaaacatacatgctccggatcatccccgctgcact

SEQ ID NO: 917 - DNA, 543 bp, Oryza sativa
tgattacagaatttctaactaaaatgtgtatatttttcgtatgaaaatatgtacatatgtataatcttaatgtggtatggcaaggaaagatgatgatggtggctggaagaacggctcttataaagtcagtcctctttgcataacccatctaccacatgacggtcctgaagcttttgaaggggatcctgaacgctatagacaaaacaagacgcaaattaattcctgtgggcaggaggggatgatatcttgggagaaaaatgcaaagttaattgggaaaaagtatgcaagccgaatgagctaggagggctaggagccctcagattgatatctgtggttcgaataagaccttgggctggcaccctagtgttaggtgatcatttggacagagagctgttcgcggtagcgtagcgaccaccataaccataggcgatgggaagacaacaggcttctagagcactcgcattgattgcgccggaatctacacagcctccataagcaagaatagatctgtctgtgaggccctcctctccaacaagtgggtca

SEQ ID NO: 918 - DNA, 2270 bp, Oryza sativa
tgacaacaaaacaggcaccgctactttgcactacgccaacacagtctcgtcaagcatggcatccctcactctcgtcaagccaccaccacaaaatgccacccatatcgtatcaaaatttactgattcactccatagtctcaattccaaggagtacccagccaatgtgccacagacagtagaccactcccttctccttaccgttggcgtaggtgtcaatccatgtccaagctgcatcaatgggacaagggtggtgggcacaatcaacaacgtgacgttcatcatgccatcaaccccaattcttcaagcccactattacaacattccaggagtgttcacagaagacttcccagcaaccccactgcacaagttcaactatacaggaagtggtcccaaaaaccttcaaaccatgaatggaaccagggtttacaggctgccatacaatgcttcagtgcaggttgtactccaggatacgggaatcatatcaccagaaagccacccaatccatttacatggctttaatttttttgtggttgggaaaggggtcgggaactacaaccccaggacctccccttctacattcaacctcatcgaccccatcgagaggaacaccattggagttcctactggtggttggacggcaatcagatttaggtcagacaacccaggtattgattttaaaacctatgtttttttaagataaataaccccttctgtttccagacacattgattgagctgttatattgcaggtgtttggtttatgcattgtcatttcgaggtgcacacatcatggggactcaagatggcctttgtggtggataatggaaagagacctagtgagactctgattccaccacccaaagatcttccgcagtgttaacaacatgggattcaaaactgcccccacggagaggagcctattacaagaagggtaattggctttggtccgatgtacggaaagaatcaacggtgatttctaccatgtgctactacttgactcttgccacacatttttttctcctttttgatttttttgggcttgtttaccaaagatagtgcatacagggcattcaggttgtaattagctcttgccatgaccaacttgttccccctttttcaattaatgaaaatgtatatgttggcatgcctcatgaattgaatgtttgttgagaattagagaaagatgaatccgccttaaagtatctcagtcaccaaattttagaaatatgtcgccgctatctcctcctttctaacacctatccagtactccctatcttctctggctggacccacccctgtatagtctatttagtactagatccagcttagtactttaagttactgtaaacctgttcaccgacagctcaatccaaaaaataccaggccagcctcgccatgcctctcgggccaggcttgacccagcttgagcctccacacgacccctatattaagcagccctagtttctagattttcttagaaaaaccttccaagaaacaagtgatggatatctattatcttctaacttgtagtattatgtccaacacaaatagtaatcacgtactagccataataccaaagtagtcactaatgaattggtaaatgttaggaacaggcattgaatataccttacaatgtgccaacacggcatctgatgcatgtggtactccccagcaactgaattattgagatatgctgtcagtatccaagaaataattgtttagcatttgacaagaaaaatcacgctgaaacaagctggtacatgaacacttgcaacagaaaaatactgtaatatgatgtcataccaaaatatgttcaaattttctccttttctttttgaggaaaactgttcagattttcatactgcacaaagcaggaaaagaacatttaacctgggaagaagagcacagaggagagaccatccatttgcgcccctgcgtcgctctaggattgggcgacatgggcgatgtctccctcccctgctgccacccaccacctcctcccttctccacctcaccgccgcctgagcaagccgccggaaaaccatgtaactgcaaggacagcggcagcggggccttccctctccccccggaggtctgaggcctgatcccatggcctcggggacagccgccgcagcaccgggaggcaaagagggagagccggtggcactttgggagtgggctctagcgaccggtggcgcgtggccggatctggtgtctcctgccagatctggtcagagccggcgacaacaacggctcgtcggcaggtgttgg

SEQ ID NO: 919 - DNA, 3857 bp, Oryza sativa
tggtcggccgcccgtggtgacctcagcggcttatggcagcaagcaaggaagcggttagaaggtggagagtttgttctctattgccggccaagcatcctcttctccacagggctcatccccttctatggcccaagtgcttcagttttggtcgtggggatggcggtgcgagccaggttgagctgcggggtggtggattgggcttggacgttgaagggttggcgcggtggtccagtgacggtcgtttcattgtgcatgatggttgtttggggctttgattgggaatcgttggcgaaagccttgctaggccatgggccatcttgacgacaacgacaccattaggtaccgttccgcttcttggaggcgttattatggcgttgagccctcctagcaccaagaaccttccgcgtgcaacggtgaccattggtggactcctgcaacggctccgaagctctataggcctagagagtttgacgaggccttcgtcgttggttttgtgtcttgctctgcggcaggtgaccatcatttttggttattgccgagtagaacaatggcgcactgcaatctctatatagggttgttggtgctagctgtgtgtgtagaagtggctccttggtagcttgggctgatgtccttcgttggtgtcgaatcggtttgttcattttggcgttcgggtaacatcgcagtgaagtcggagctgttgcgtcgcttgggtggcaagcttggcaacgataacacgtgtgggctactgtgtcgtctctatggcaagctcggtgctgatgcctcatgttgggctccatcgtggtagcttaggttaggttagttattgatgtgttgttttaggtttgattttcactcagttttccctaattaactgggcacggtaaggtttggtaccttttactccttaaaatgggacaccttctttatataaaacgtcggcaacggccagtatgagcctccagaagtgacctggctggcgtttatggatgcagagaaacaacattttctggacgatcttatcaaacctcgtaccagaaaggcagtaatgtgcaagtatttgagcttgacactctactgtattttgactaccattttctgaatcaacaacctccattctgggaggtatgaattctgtacctcactaaagcagtgctaaagttacttgtcaattccgggcttctgcaaatcaggacagtctcatgcaaatcacagcagcctactttcagatttccccaacattaccaagcagcatctgtcaagtgatacaaaagcggaaaccgtagagcttattgctgtatatcatgaaacactctagagcggtgttggtggtgtaagatgcgtagactactagatactcaagttcagggaaacccatagctagagaagaaaggtattttatttgtccccaataatagaagacagttaaatcgtattaccaaccattgttcacaaaggtggccggctagtcgactagttggtctagggatggcaagttgccacatcaatatcttagtattttgcatgaagattccatgcattcagcaagattttcacaacattgcagacaaatcaattaaaatatttacagatcgaggaaactatcccgaattatgaacgaaaatactaaatcaatctaatctaagaggatgacaggagtggaaggcacaagtcatgtcacaatctaatctaatcttaggaggaaataatcgcacaccaaattaaggcgaaatttcaatacttagctaaggacgaatcttgatctgagaggatgaccagtaaaggcagaaacaagacggacctggaggaggaaggtggagaagaagtgcaaaggcgccgtcgttgaggacgaagcgccctggagcagtcgaggtgttgggcgtctgggggcaagacgacaccgacgccgccgccgccgccgtcgccgccggctcggtcgcctgggaatgctccgagattggatcgtaggcctcccaaacaggcccgtcgcacgttgggcttgggcttcacctacaaaatgattaggcctcattaggttgaaggaaaaacttttagaatgattttacatgttgggaaaagttatacacaaaaccttttcctataaatgtttctacaaaggttgatgtagcacctgtcattcggtctttattttatataaatccctactaattaaattaaatggttgaaaactttatttgtatgaactttttaaagtacatatagcactgttcataaattatgtacacaaatttttttaaggccttaggagtaaagccattgtaatataacgttttctataaaaaatttctatgagatgaactatactaccaaggaaattttctataaagttgtacatcatagctttattccttggtctcttgtaattgtacatttcttcgaagttatttcatccaacctcctttgaaatacatgaattttacaaaatatttcatacaacctccgtcccaaattcatgaaatgcatgaattttcatactatctctttgagatacatgaatttctgctaagttatttttcacacatcctatacataccaacaaaaaaaatactatctcttttatcaaatcgcaatgcaactgttctctactttatctagttccaatatatttatcctctactttcatatactctaatataataattacttaaagataaattaaacttgctctagcactatacaaacactagagaacaactgccacctgcttgctctgcatgggggcatttattcggatggatgtagtagtaaggctgagtttagttccaaactttttcttcaaacttccaacttttccatcacatcaaactttcgtatacacataaactttcaacgttttcgtcacatgtttcaattttaaccaaacttctaattttggtgtgaactaaatacaccctaaatgtgattgccaagctgcaagcctgcaaatcttcttcttcttcttcttcttttttgagaactcaagcctgcaaatctgcagctgcaactactcatatgtttggaattgaatggcaatggcctcgtagtagtgatgccgtgatggtcgactggcgtggttgaagaaacggaggctgactggtggtccttagccaaactcgagtagatgaggcagcatgcctacatccaactgaatgatgatgggtcatagtcatgcactcatggatcatggttccatgacttctaatctccatcaaaactatcacagaagctgtaataaaattcattccatcctttacttcaattcccatgtattatattttttaataataaaatccattccgtaaagtagctataacaattattgctgtgagattacatgacgaatgatcgcgaattacaaatcacagcttgattaaggacaataaaactacttgaaaaaagacaatttccatcaatgatttgtgagaatcttcacaaaaattgtttcttcctaacggcttactcttgctgaaaaggaaataaatccatggttgatcattgtgctgaccaaatttctcacataccttcattgacgactgacgccaaaccaatttggatgataatatcggagagtaagtgagctataaacaatcattcatccagatattgccaccctatccattgaagccaatccaatgaggacataaccatcatggatccgcacccccatgggacctccaagatgttggtggtgttgatggtctcgacaccaaatatgcaggcaatccgatcttatctttagctggtagcagcaatcttcatgagcacaacggtgacatcggtggctagggctgcattagtggaaggtggttggcaacagagtgcccgaacctccacggtcagatccagatggtgtcgacagg

SEQ ID NO: 920 - DNA, 11229 bp, Oryza sativa
  unsure (1)..(11229): unsure at all n locations
ttggaccaatggatgatcctgcgtgcttgcagctgcatcaatcctctgtttctgaagctaaagccgtctccggcgccgatcgagatctatcgatgaatgatggatgaagatgaatggccccttcctctgccactttttgaatgcatatatgtgcacgtgttaaataacggttggatcactatcagtgtgtcttgattaattaatcaaccatgcatgacccatgaagagccatgctctgttttttacgtcctctgtttcgagcgatctgttgaagagagagcactgctctgtttttacatgttctgttttcctgtgaagtgttcaacttgagtactctgcatttacatgatctgtttctatgtctataaacatttgcacatgttatttgcatacaaccttaataatcgtagagaaatttgaaacagtctaattagattggtgattacgatatgcccttggaggagaagaataacaaaatttagtactgcaaaatatagacaagatatgttatttgtatttttcttagtgtgtagctgcatgtttatgtactaacttatattatcacaaattaaaatactttactaattgttttgatatttttatttaactatttacaccacatacatagactaggtgtaattttatcggtgttaataaagtaatcacaaaaaggatatcgagatacggagtagcactatattttctaatgtaaaacttagtacatttatactagataaaaattaatgtcaacttttagtactactttatcaaggacagtaaaatttataaaaaaataaatatttccttgcacctgtttttcctgggaattaactgttgaaaaacaatcagttgtctgttagtacgatacaggcagcggcacacagcaaaagattagctagcttctcctgtgtccaccaggttattatcccacacaacaaaaaagaaaagcagatatactcatcaaagtaccctttccttagaccatagtggcctaattccctgacttttacgcaaacgacctgagatgattgccatccagctcttctccttcaagccctatcaacaattaagctctggatcgagcagcaccgacgaagtagccgccgatcatcgagtcaaatgctcacatctcataaccttcaatccacgtggaagaatcaatccattaaacttatatcctcatgcacatcacgcacaccacaagaggacatgaagcttcacctgaaaatctctctattaattcatcacaaaaccatcaacctagcacacagcaacttgctttacattgctgcaaacatgggcctcgtgcacgcactcctcccttcgcagcagcagcagcattgctgctcctcgccgcgccgccgccggcgacggcagacgacccgggcctcgccgtctactggggccccaacaaggaggagggctcactgagagaggcctgcgacaccggccgctacaccaccgtcatcatcaccttctacaacgccttcggccacggccgctactccctcgacatctccggccacccgctcgccgccgtcggcgccgacatcaagcactgccagtccaggggcatcaccgtgctcctctcaatcggcggccagggcggcgcctactccctccccaccaacgcctccgccgccgacgtcgccgacaacctctggaacgcctacctcggcggccaccgcgccggggtggcgcgccccttcggcgacgacgcggcggtggacggcatcgacttcttcatcgaccagggcggcgccgaccactacgacgacctcgcccggcggctcgacggctacaacaagtactaccggggcagggtcggcgtgctcttgacggcgacgacgaggtgctcgtacccggaccaccggctggagaaggcgctggcgacgggggtgttcgcgcgcatccatgtgaggatgttcggtgacgagcagtgcaccatgtcgccgaggtactcgtgggagaagtgggcggcggcgttccccggcagcaaggtgtacatcgggctggtggcgtcgccggagcaggacagcgcgtggatgtttcagaaggatctctactacgagatgctgcagttcgtcaggtcgctgcccaactatggtggcttggccatctatgacaggtacttcgacaagaaggccaactacactggtgagggttaattagctagtgatcatcgtctttgctgtctgaagtgaagactagatttttaccattatgtaaaagatctgaataaagacacctcttttttctgtaacattgtgattttgatgtacttcaataatggacgaataaaatgaggtctcaaaagctatgttggcatccctccaaaaaaaaaaaggaaagaaggttatgtatggatcagatctcaaataatgcttaataaattaatcatcactggctgtaatacatcactgtgtcagtttatgtttcactgctattttaatgtgcgaaatatataaattgtagggagataaaatgccgcttttcgcatatttcgattagctgccttggaaataaactcggcgcaacgagagtttaaccgacaatcacatttctttaacctggtagcatgtgagctgcaaattaattaattactctctcgaggttaaaaataactatcattcggtaccagattaatgttaaacttattgagataatatgtatacgttaatcttaaagaaattacttcaataatacaatatatttatcgatatttttatatgtattgtaatgaaaatagtgtcaaagtattttttttacattgtctgatcctatccaaaacattttttttccaacctggagggagtattttatacccagtaaaaaaatgacacttgacagaacgtttgattattaacaaattccaaattgttttgtatgaaaacataattaaaatggtatatttggatttgtatggataagtacttccatgatctcataaaattattactcccttcgttcctgagtagttttcaccatttgctagcacagtttcaactttgaccccctaatagcttttaaaaggttagtctatcatcacaatagaaagcttaatgtgtatgtttaggatgtaaaaatttgaatgtgaacactgtccggtgataaatatttaggtaaagagggagtatatatagtttacaaatttccaacagaaaattacttgaaaataaaaaaaaaagatacaaatgttatgtatttatcaccggaggtcctattaaacgaaagagtcgccatacacaacgaagaatcacccagagtgtgtgagctgatgaggatcaacgagagcatgtgaacatgtgaagtgaagcagatcagcagagatttgtcgagatttattatgtgtagctcatcccttaaaaaaaaagtgtagctcacaagtaaaacgaggtcagaacgtctcctatataataactgtgcatcaatcgtatctgaataatatctttctgcgaataatcaaacatgtacagcgcgttgtgtacgtatttcactcatagcatccattgaattggattcgtcgttcgatcgttgaccaccgacatcagtagaatccggagggcttggtataataggggttgtaaatggcctatgtattctttctcaactcatctcaccacttaaatatggtaagaaaaaaagaaaaaaaaagaaaaaagaatatggtaaattttatccagttctattatttacggtgttttcctctcaaaaaaaatatttacgatgtttatgttattggacttgttggaatgtgataaatctgaacaacgtaagataaaccttgctccattctcgatcttgtccaaggcgtcattagttatgagagggttttttatgaaccgtttcaaacggattgagagactctataacttactttcctctgacatagatcgatatctagaccctctacctgtagtaaccgatcgaagggtacaccatttgtgaggctggtctgagctgggtgacagtagtagaacaggatttaaatcaggagcctctgccattggtttgtgaagctacatcgtttggctagagtaattaaacaatacaaaatggtagggtgtatcatatctgtcggtcaagcatgcatggcgtccaaccccaccagtcgtcggtcaaccatgtctgcttgctgcaggatttttataattatattggatatgcatgcatgcattcatctgaccttgatcccgtcgtcgtcagcttaatcatgcataaagatgaacattacatgcatgcatggtaactatataaactactataccttcacagctaatgtatctactacatctaaaaacagctagctaattaactcaccatcatggcgttcggacgccgttcactcttcttgccggtggtgggcgtcgcggccatcctgctgctcgccgccggccacgcgaccgccgtcaacaccggcgagaccgtcgtgttctggggccggaacaaggacgagggctctctccgtgaggcctgcgacaccggcctctacacctccgtcatcatctccttcctcgccgtcttcggccacggccgctactccctcgacctctccggccacgacgtctccgccgtcggcgccgacatcaagcactgccagtccaagtacatccccgtgctcctctccatcggcggccagggcggcgcctactccctccccaccaacgcctccgccgccgacgtcgccgaccacctctgggactccttcctcggcggcggccgagccggcgtgccccgccccttcggcgacgcggtggtggacggcgtcgacctcttcatcgaccagggcggcgccgagcactacgacgagcttgcccggcggctgttcagccactacaagttcgagatgctgctgacggcgacgacgaggtgctcgtacccggaccaccgcctcgacatggcgctggcgacggggctgttcacgcacatccacgtccgggtgttcggcggcggcggcgacgccggctgcacgacgcgccacagggcgtcgtgggagaggtgggcggcggcgtaccccggcagcctggtgtacctcggcgtggtggcctcgccggagcaggacgccaacgcctacctgccgcgtaaggttctcttctccnnnnnnnnnnnnnnnnnnnncgagaagcccaactatggtggattgatgatctgggataggtactacgacaagaagaccggctactccgctggaaaagttttttaattaacttccaatagactggaaattagttaaccatggtgaccaatactaatgaataaggatttgtagaaaacaaggatgtggttttgtcaatgatgtgcttctatgctcataaataaatacacggacttaataagaggatcagaagaatggattttaatctcttgagagaaattccgtttgttcttcatgtcatcgaaatagttacgttaaaaacttgactagataagaatttgatacatcaatcaataaacatataattacaagttcgacttgtaaaaaataacaaattaaactccaagtggtatcactactacccaaatcgtttttacatgcaggtaaaagcgaattttgcatgtggccaaagcaaccgcatgcaccaaaaggtatgcaaaaatcaggattttcgcatgcgggtaacgcaaactcatgcaaaaatccgtttttcgcatgcggtcacctataccggccacatgcgaaaataaattcagcgaaaatgaataaaaataaaaaaaaaaccccaaaccctagactgccgccgtcgtcgcccagatccgtgctggacccacgccgctcgcgcagtcatcatccgctgcccccatcgcccgccatcatcgccaacaacggatccatgcgagggaggcccccggtgccggcggctcagaggaggagaggagagaaagagagaggggaaaggaaatgagaggagagaaagagaagatagagaggtaaatatctgtagagggagagagagaggaggggaggtgaaaaaaattgaagtggtgagaagggaaagagagaggaggaaaataaaattgtgaataagtgggaaatattttcacatgcagaccactcaagagactcacatgtaaaaatatattttcggtcccttatgagacccgtatgcgaaaatagatttttgtatgttgaccacttaagaagctgcatgcaaaaaggaggtcgatttttgcagacatgaccagttacggtccttctgtaatctattggggttctcgtatagaaaaaaagtcatttttatagtttatgtgtatatttagttatatataatatatttgtagaagttaaatttgaacttgtatttcatgaaacgatatatcatatatcaatctatcttaaaaagaaattgatatctatttcttgggattaaaatatttttctcaaggataaatcggcaggagtaaataaaagaatccacaccgttaataaatgtgaagtagtatgatgtatactttacaaacaatccaacgggagcaatccagagcagctattggtttctgaacctgcagaggtgatcgaaatggtcggtacgtccgtacgagtcgtcggtccatgtttgcaggcgaccgtacgtacgtggataatatgcaatgcatatgcattactgatccatatcacgcggtgtcgcgatcagctaattagcttagctgctagcagatgaataaatatgtgatgagatgaacaacattgattaatattggtcaaaatattttcaactctaaaacttattagttgtactcctacgtacgtatgactgtcggaagagagtagtacgtaattaaatcattttcattattaaaaaagaaagaagatgatgaacaacttcaccggccgcgcgctgtctgtagaactcccatacatgaacagctaggcattgcaaggtatacgtacacgtaccaactgtttgctggcaacctgcattctgcacgcgatcgagcggcacacagcaatttatattgaagaacaaatcaaagagcttaattggtcaacaagatgagctgccaataagtacagctgctacgcatatactcctatgctgtgtactatatatatcatgcgtatgccttttgcattccaaatcatagccactcatcactggctcaccgcaattaaacgccatctcgatcgaaagctagactaaccaagtatatatacgatcgatggcgttccggcgccgttcatgcatcccggcggctctggccgtcttcttcctgctgctcgccggccagtcaaccgccggcgaagaccagaccgccgtaatctggggccgccacggcgacgagggcaccctccgtgaggcctgcgacaccggccactacaacaccgtcatcatctccttcctcagcgtcttcggccacggccgctactccctcgacctctccggccacgacctccgccgcgtcggcaacgacatcaagcactgccagcgcaagggcatcgtcgtgctcctctccatcggcggccagggcggcgactattccctcccctcctcccgctccgccgccgacgtcgccgacaacctctggaacgcgttcctcgccggccgccgcaagggcgtgctccggccattcggcaacgcggcggtcgacggcatcgacttcttcatcgaccggggctccggcgaccactacgacgagctggccaggaagctctacagctacagaaacaacaaggggaagggggtgatgctgacggcgacgccgcggtgcaggttcccggaccggcggctggagaaggcgctggcgacgggggtgttcgcgcgcatccacgtgaggatgttcggcgacgacgtgaactgcacggcggcgccgagggagtcgtgggagaagtgggcggcggcgtacccggcgagccaggtgtacctcgggctggtggcctcgtcggagcaggacccgggatacctgtcgcccaagccactctactacacgctggtgatgtacatcagagacaggctcaactacggtggcaagatgatctgggacaggtactacgacaagaagaccgactactccattggaaaacttatttaaaacctatatatatactcctttttccattgggagcatggagatatatatatatatatatatatataccaagtattgaatagggcttaatttctagctatatggaataatgtaatcccatgtcgcaattaaataagggtgattatctaaattgttgttgttttttgtaatcctccaaaataatatcaataaagttcactgcatgtgaaagtaaaatctttagtcatatctcctgatagctgttcaaacgcatgcttacgcaggatcgatgcaacgtcgtcatttgtgtattgaataacctttcatccttacgtagcgttctaaacagcatgttgacgtaaaattcatcgcacacataaatgtctgagagatttgctcaactctagctagtgcatgtcctatcaaccgggttcagaacgtgccagttagtttgatcctataactaatacgataaaaattaaagattatatcgtggggccgatatagtatcatacgatagaaattcgtatcaacgactataatcgattggattttaagtataaagaataaattaaaaaaaaacatcgcctaagacctaggtgtaatataattgtaaacaatctaactcttattaaaatcaatcttaatagatcaaacactgagatagtataaaaataaaaataataaaggaaagatattaaacaattatatattctgtgaatacagaccaatgcttcaagttgattggaaattatcattaacttctataggaagagatagattatcatcggctataaccagatagaatataattgttaatagccttttcttattgatcacaatcttgatagatcagacctaaccaatacaataaaattaggaattagccaattatattatctctgatagttaactgatgaaacaatttagttattgataatttagataacttatcggttggaactccgatgaaacgatgagtaatatctattgacttgagcatatctaactaccaaatacaatccaatagatcggactcaaacaaaacagtacgagattaataataaacttgatagatttaaacgagctgatagatgttaagcaaagtggttgatatattgagtctaactcattccaatacatttttcaaccaattttcgataatcgcggcattaattccttccctgacccagtcatgactaacggcaattgctaaatttcacagttaacacgcctattaaagcttattgattgctaactttattataggagagaattacatattacacatgtattatatacctaaagattagaaacacatgaatagaagtagataaagaattggaatattatggtttctcaaatcctagagaaaatatggagagaaaaagcacaacataagtttatcatgaggttggacttatgttaaaaatttcttattaaaaaaactacgaattgaggcaatccataagaagttaataagattttagaagggaggcattcttatgttccaaagggacacataggattactaactactccctccgtttcatattataagtcgtttgacttttttttatagtcaaagttccctaggtttaactaaatttatggaaaaaaatagcaacattcacgacaccaaattagtttcattagatttaaaattgaatatattttgatacaatgtttgttttgtattgaaaatattattatattttgctataaacttgatcaaactttattaagtttgactataaaaaaaagtcaaacgacttataatatgaaatggagagagtaaccttttgcgaactagactgccccgtttgcattcactctacagttttgaacgatcttttgcacagcactgtcctgtttttcttaactagttgcatgcccgtgcattgtaatggggatcaagatataaaaatatgctttaattttttatattcgaccttttgtgatgggtttttttgggctttatgtttggagcagttcatttgaaggggggagcagttttttataaggcggaaggttttaaaggataagaaggagaacgaccgtgcttttaaaatgagttaagaaatactccaactactactatggtttgcaatttcggtaatttcgaacgctaccggcaagcagcacaaagcttcccccgaattttttttgtcttttaaaatatttgtgaacttggtaaaaatttgtttagattcaataaaaatatgttaaattttcaaataatttcagccaaaacaccgaaattcaattttttaaaaaaaatttgggtggtcaccaaaattgcaaatcctggctactacggcacatcaaacacaattttgtttctaacaccagctatgcatgcatgcatacctcctaacggcacacaggaaaaactaacaatagcttttgctttatcagcatacttatcgaccaagctagttttactttggaccggggccaaccggataggatcgaccatcactagacaccgttatcatatggagtataacaggtcaatggtcgtatctcatcaactaaagattccacttgacacacctagcagtggcacacaacaaagatattcgagagtttagaatagttttccaagaggccctactgttttaggctttagccatgcatcagctgctgctgctgcattcttgtctgcctatatatacatcacaataacttacttgcttcagatcatgcaaatcacatacacataacgtgtgcgttgctgcaacatgaagatgaaggctctcctccccgtagccgccatgctgctcctcgtctccggccagctcgccgccccggtcaccgccgacggctacgtcggccagctcgccgtgttctggggccgccacaaggaggagggctcgttgcgcgaggcctgcgacaccggccgttacaacatcgtcgtcatcaccttctacaacgtcttcggctaccagcgcggcaggtacgggctcgacttctccggccacccggtcgccgccgtcggcgccgacatcaagcactgtcagtccaagggcgtncaggtccttctctccatcggcggncagggcggcgagtactcgctcccgtcctcccagtcggnctccgacgtcgccgataacctctggaaacgcctacctcgcgggncgncgcgccggcgtgccccgccctttcgcgacgccgtcgtggacggcatcgacttcttcatcgaccaggcggcgccgaccacta

SEQ ID NO: 921 - DNA, 632 bp, Oryza sativa
atgcaagctgtgcaagggaagaagaggctgcacatagtggattacggcccgcgctgtgggctgcactggccagacctgctccgccggctgggaagcagggaagacgggccgccggaggtgaggatcaccatcgttgacatcctccagccggcgtttcgtccatttcagcgtattgaggaggctgggcattgcctgagcagctgtgccaatgagtttcgtgtgccattcagattccaagctgttgcagcagcaaagtgggagacagttggtgccgaggacctgcacatcgagcctgatgaggtgcttgtggtgaatgacctctggagtttcagtgctctgatggacgagagcgtcttctgcgacgggccaaaccccagggatgttgccctccgtaacatcagcaagatgcagccagacgtgttcatccaaggcatcaccaatgatagctatggagcctccttcctgtcacgcttccgtgcagtgctcttgtattactcggctctgtttgacatactggacgcgaccaccccaagggatagtgggctgcggctggcgctggaacacaacgttctggggccttacgccctcaacgccatcgcctgtgaaggtgcagacctggtggagcgccctga

SEQ ID NO: 922 - DNA, 8701 bp, Oryza sativa
  unsure (1)..(8701): unsure at all n locations
ctcgtgaactcctcgtaccgactctgctcctcgtcctcgtaccagcgacacggaggacggtgcatgagatggtcgcggagggcctcggcatgacgcagctcatctccatcatccaccccaactccacctccggctccaggtcgccctccaccacgatgtcggcggcagagggtgcgccgttgtggcagctgctgtggccggtggattgtttgccgctcccacctcggggtcccgcacccctgcgcgacggcgcncgccgtccacctcccgcccctccgcgccatcatgcgcacctgcgcctgagagagagagacgggtgaagaggcatgataggtgggtctcaccaatttttttaaatgaaaatgctgatggaattgacacgcgtacgctgtgttggacaaaactgctctgaattgggtcgagggggtgtaattcatccagtattaaaagttcaaggtgagtaatgtctggttttcaggttcaagggggtaatacggtcgaccacgatagttcaggggtataattcgtacttttttccttattattattatatgttcatgttggcactaaagtggatgccacgttagctgggttaactggccaacaggtcacttaggacaaaaccaagatgcatatcactaaaggaagtaaattgatctcgttttgatacctgagggaggatgtgtaaactagcatgcagagctaaatgcccattgggtaggaaaagaagaggcaagaggaaaacaaatgaagaaaataatgatgaagatccctcaacaatccgttccttgcctcacaatctcgcataaaaaaaaagaaaataaaagccaacaattaaagatcgaagcagaagcatcaagctaagtgcaggatgaagagcaaggcaaggataaactttgttttaaanaaatagactttctacagtgcttgtgatatattagagccattgattgctctaaatccaacacattaagatagaaggtaccagcgcaaaggtacttaagatttaggctatgtataaaattcatgcgggtggagattgggaataaaatcgacagcgcgggattcaattgcacaagctctgcctctttggcgagccctctccaccactgggcaagtgcgggttttacgttcaaaacaaatctacactctagttacacctgtaattaaagtgaaaaggtttttctcctaaatattgttgaatgtgctagctattggtaaactcaattattaagccatgagaatcagaaagatttttttttttcaactactaatactgtgttgttagaattggaggatgtcacatagtactgctttccaaatctcttgttagggtgtgttcaggactctttgccgacctctattatattgttttccgtgtgcatacattcttgagcttgaaaaattttctatattaaagttgttttttaaaagatcgtattaatatattttttaactttttttagatttaattaattaatcatatatatatatatatatatatatatatatatatatatatatatatatatatatatatatatatatgaaaatgattctatacacctgggaggatgtacacctgctctcatccaccgtcgatatgtgattagcttcgatggatcctgatatcggattaacgagcggacccgtttaactttttgacgagaaaaaaaattacgtaccccttaattaagccacggaaaccggaatgacctgagctcgcacaattcctcgttcccaccagtgcatcggatccgaaaatcaggtcactgggagagaccgcgatataccagaactcggagaaggcggcggcgattcatcgtcgattccgcaacagcagcgagatgcatcgtcgatccatggctgcgttgcaggtgatggcgtgatgcatcggcgtggcgacctgcacgcgcggcgcggcggcggtgtcgaccgatcggcaacatcgtgcggcggaattgcaggtcatcgtcctcggcgcgacgggacgggactagtcgacggtgcgatgcagcaatagttgaactaacccaggcggcatcaatcactcgtcgatctcgcgcaaagtcttttcgatggcgacaatgcattcggcgatagccatacgagatcgatcagatcctgtgtacaatgtggttagtactacttaattatttcttatgtcgtgtatatcacatcaatattttcttcttctttgcccaggcagtcgcatggtgcatatgcacaccttggagaggctagtgatgctagtcgtcgctagagtccgcagtacggtgtgcttgcatatatatatatatatatatatatatatatatatatatatatgcgctaataagctactgcgtggatcagtaagccgttgaatctgacatgatgagtagtagtttgttaatccaacgggataggtgattcgacaatattgatgtgtatgaagatttccatggttcaaagatatgcatttgcccggtcggtcgaaagaaaggccgaccaaattttattaagaaggggtatgtacaacgtacttaccattttgctagggtggcaagctgatgtgcagatatcctaagtgactattttttaaaaaaacttaaattgcacccactaacaaggttttaataccaacatagtcaggtttcattatcttgtactcaatcacagccaacaaccaatatttatgtacccacggtataatttactcaagaagagggtagaagaaagcaaatgaaggaaatgatgacaaggaaaaagatggaccctgcaatgagcccttccttgcatcacaattaatctgaccgaaaaacaaagaaaagaaaaaaagagctaaaaacaaattaaaagattgaagcagaagaagcaagctaagcacatgatgaagagcaaggcaaggcagggataatctttattttaaaaaaggaaagaaaaaatgtctgctggtagctatatatacgcgtacgcgcgggcactgactacttcatcaaccaatctgccctccagtgtgtgttagtgtcgaccactcacatatggccattgttctggatgcgttcgcgtcatacgtcggcgacctgctcaagcaggtggccaaggacgaggtcaacctcctcttcggcgtcttcggtgagatcgccaccctccacgacaagctgcgcatcctcaaggactacctcgctgacgccgatcgccgacgtatcaccgaccagagtgtccaagggtgggtgacgaagctcaagcacgccatgtacgacgccaccgacatcctcgacctctgccacctcaaggccatgcagcgccagcgcggtggtggcagctcatcctcctccaaccctgtgggctgcctggactcgctgctcttcttgctccgcaatccactcttcgcccacgacattggaagccgcatcaaggcgctcaacaccaggctcgacgccatctgcaagagcgctgccgctttcagcttcctcaagctggaggcctacgaggacatggcagcgccccgacggtccagcgccaccgaccgcaggacggacccggtgctggggaaggagagatcgggtgttgttggggagaaaatcgaggaggacaccagcgcgctggtgcaaaggctcaccaacggcaacacggctatgacaacgatcatggtggttgccgtggtgggcaccggcgggatcggcaagacgacgctggctaagaaagtgttcaacgacgagaccatcaagaaagcattccacaagaagatatggctgagcgtgacggaagaccagaaccaggtggagctcctgagggaggccatcaagtccgccggcggcgccagtggcgccggcgatgctcgagacagcaacagcaagtcccttcttgtcgacgccatcaggaacaagaggttcttctttgtgttagacgacatgtggagtgacagggcatggtggaacctgctcagggagcccttcagccatggcgccgtcggcagccgtgtcctcatacccactcgacatgacgacgttgcccgagggatgcaagccgtccgccccttccaccacgtccacaaactgtatcctcgagatgcctggtcactcctcaagaaacaggtccgtcgtgttattctcccatacaacaacgtacatgtatgttacttgcataaagtggtttttatccactcaagtggacatacactcatttcgtgcatgtcacctaactaaaaacctacccaaaattttgaaaaagaataattgataagatacatcaatatttgtgtgatatatacaccttacaaacatgtaagtccatatttgactagcttatgcaatacataaaaaataacaaatatcaactgtgaatatatagtaagctaaaataatctgacttgttcaggtagcgtcaagtgatatggaggagcttgaaattgacgacatgctcaaggacatcggaatggaaataatagacaaatgtgacggattacctcttgctgtaaaagtaatgggaggactgttgcgcaggagggagaaacagagagccgattgggaacaagttctgcaagattttatatggtcagtacctcctggtgaactaaatgatgcggtatacctgagctatcaagatttgccttcttgtttgaagcagtgctttctgcactactccctcctcccaaaaaatgtagaattctacgatgtcacggtcattggcatgtggataagtgaaggatttcttcacggggacactgatgatttagaaaaattaggagaaaggtactatcaagagttaatttacagaaacctaatagagccagatgtagaatacgctgatcaatgtgttagcaccatgcatgatgtcattcgttcatttgctcaagatatctctagagatgaagcacttgtagtttcaacttcagatgaaagaggcaaaggtgcacttagatcacaaaagtttcttaggctgtctgtagaaaccaatgattttcaaccgaacgatgaacttgagtggaaactcatacaaggccagggatcacttagaacactaatagtgattggcgagctcaagattgaccatggggattcgttgattaattttacaagcctaaggactctgcacatagaagacacaaattgtagtgcatccttggttgaatccttgcaccaactcaagcacttgaggtatctgttcctagaatgcagcgacatagctagactactacagaacatcagcaaactcaaattattgcagtaccttgagattatatctgaaaatttggtcagacttcctaacagcattgtaaagctagggcagcttaggcatcttgaccttctaggcataagcataagtggcataccccgacagttctgtcgactgacaaatttgaggtatttgtatgggtttcctgtacaagcagatggtgactggtgtagtttacaagagctgggtcctcttgctaagctacggagacttgcactaagaaagctagagaatgtacccgttacctccttggctagagaggctaggcttggtgagaagttgcatcttcgctacttgagattagagtgtagcagtagacttggtgaagatgggttagtagaagatgagaaaggtgtctctgaggaagaacagcggcgaatcgaggaggtgttggatgagcttaccccacccttgtgcctagaaaatattgatatcacaggctattttggacagcggctaccaaggtggatgatgtcaggagcagcaggtgcatatatgaggttgttgattgtgacgatggatgacctggtctgctgcacccagctccctgacggcctctgccagctcccatgcctcaacttctttcaggtcacccgtgcccctgcaatcaagcatgttagccctaaatttgttactatgcagccatcatcgagccaattccgccatgcccatgcattcccaaagttgaaggagatgaggctgatcgacatggtggagtttgaggagtgggagtgggatcatcaactgaataatgtcccggccatgcctgaattggaggagcttatgctcgaaaactgcaagctgagatgccttcctcctggcctttcctcacaagcgacggctttgacaagcatgggtctatgtgacatcaaatatctcaactttgtagagagctttgcttctcttgtcaagcttgagctgcaagataaccctgacctagagagggtcacttcaatgcctaggttgcagaagctcatcatcataggctgcccgaagatgaggacattggagggtgtgcctgagctacggaagctagcgctggaggattgcgacatggaacaactcccgagatacctacagcaaggtgtgagtcctatgcatctggtgttggactgcagcttagagctgctcacatccatagcccttggagaatctggtcctgagtggggcaagttgagccatgtccagcatgtcaaggcctatgctgaccaaggagacgataaaaggaagtggcatgtgttatacacaagagaaccctacagtttcgagacaaatatcggtgacagcccttcttccaattctggaggtaaatcagcccagctgcttcttctgatttctgtccataatactcttttttccttatttttacccatgtttgttccatctttcaactgcatgatgcacctccctactgtttccatttcgcttaatggacagcttcagaggatgagtaggagacaaatacttcgacggctcaaggcacccaaggggtaactggcagccatccactgtcgaagacattgctaaagacagcagtcagtacatactataaattgttgcggtccactactgtcagcaaatctcctagtctaacattcattatttatataatgcctagtctaacattcataaggaaaactatgcagctctgtacatgagatgggactgtgagtttgtgatttgtatttttgatttgttaagcttacttatatagctacatattctactagctcctgcaatgcactgaaagaaacaaatatattactatttgagccaacattgtttgatttgaggactgcagtgacttaacacaatgttaattttgtacttagcttctcacctgaatacaacctggtctatattggctattatattgagagaaggttaggaaagacctaagaaggtaaccttattgcctatcaaaaacagctgcaattcaaacctgtgactagaacaaaacatatgacacccaaacatcagtagtgaattgaatcttagagattacgagtggtatgcaggttaacacaggggcgcatcaggtaccagttcttttccattgttactactgcgattaattcggcatgtctatagatacatcgagcacagaaagggccactgaatcaacacaccatgggcatgcaacacggactgccattcaataacagttcaagatgaagctccaacagaaaggtgggtttggaggcttactactagttgtaagccacctaaagattttcaccctattagttgctggttggattcaggagattttgtttgctatgtccttgatgacctcatccatgtcaagtttcttcatttctgtgaaaggtcgtggcatgttctgcacacaaattggagtgtgttcagtcacacataaatcatgatacagcctaattcctgggaaatacggtaataattatatagaatggtctcttggattcagtgttcaaactggaatgcaacacagttgattttaataagtacataggtgaattaatgtatcgtcactgaaaagaactgccaatgcaagttaaagaaaaccaaaggatagctagcttgcaaacaacagatggagaaagctaagaaaaatcccttatgattcaggtaccaagaagtagtaaacaaagattaccagcagcgatatgaacacttcaccaccttcctcacgaatctccaagcaaccacgtcgtggctgagaattaagaggaaaacaatgatgacaacaaaggaagccagtgagataccaaatagctagcttagggttgattgtcgcaaaaaaacaattacttggatttaacaccatgaagataccttttcagggttgattaccacggataccccaggaacagaactttccagatcctcctttaccttcgcagctctaatcttgaactgtctgcattgagtgctggagaatcgtacaaagaggcaaggataaaaggaaattcaataagaattgctaccaataattcatttaatgcaataggacttttttagatatgtcaagataaaggaatgatgtacaagttatctagaataattcagctaagcaaggagaacaatttgtccaatgtgaaaaaacaaactataagtctgttcaataacagatctattgcaccatatgggagtatggtcaatcatcattgttatatgtaaatactccacaaaagaaggtcgatttacatactgattaagtgattagagatacattaaggaattcttttcggtgataattcataaaaacaaaacgccagttattgcagttacagtaactacaactacttgaacgtacgaaatacagcagattgtgctgatgttagcattttatttaactcaagtatcaaggaaggaagcagagtatatgaccaatgaaaaggaaacctagatagcaaagcaatggatcgaacttcacagaaaatcacagaaaactataatccgcaagaagaagtaaaccactacagccagaatactataatctcca

SEQ ID NO: 923 - DNA, 27134 bp, Oryza sativa
tgagggatggtcgacgatgaacgtttcttgtttgtttcatagtactccgtatgatattatggtgtagaatcatgaaagtggagtgctatgggctttggatagtcgttgtggggtgtacggtgactccatctgtccggagtaaactaacactgtagaggtgaggtggagtgaatactagtaagaagagtaacttttaattagttgttttgttttggatccctctttaagaaattaaattttattactactttgaatcgggtaaatttatctttattgattaacaagtgattcaatgtgaaacataaataataaaataatatggtttggtgaaattttctcaaaaagattaaatttaatggatggggtggttggttggaaggggtgttagactgtcacggtcacagacaaatctaggcggtgatttctttgcttgaggatatctatcactcgttcagctgcttggcaccacagcagcagagaaggcgtacgcgaatgcgacgcggtgaagagagagagatatggcgacgtgggaaacgtcactgcacgcaccggacgacgtcggcggtcaaaaagcagtcactcactcattcatctgggtcaacacgcctcatgctcacgggtcacggctctcatcactctggaaaaagctagtactccgttcctcctaatataaatttgttaatccttctctcttctaatatactacctccgacagagactttgacttttttctatactgtttgaccattcatttaattaaaaaagtttgaaattattatttattttatttgtgacttactttattatctaaagtactttaagcacaacttttcttttttatatttgcaaaaaaaaatttgaataagatgagtggtcaaacagtgtaagcaaaaagtcaaaattccttatattatgggacggagggagtaattgtaactagatagtataacttagtactacctccattccaaaataaacgtatccgtgaatatctgactccaatatttgatcatccgtcttatttaaaaaaatatattttttaaaaaaaatagtcccacataaagtacattcatgttttatcatctaataacaataaaaaatactaatcataaaaaatttaacgaataatcaaacgttagatatgaccaatacaaaactacatttgagacagagggagtattacacactggaacaactattgtcgcttcgccgtattatatgagaatcatatttcgtattaggtttattttttaaaggtgaaagttagtattcccttcatttcaaattgatctacatatatttttttttagctattcctaaatgatctacatatttgtgttcatttattaagtctattcgttatttgtgcattggagtaaatggatattgatgcatgcatccatgcacacaagtatttataacccgcatacaatattttgatttgctattggctaggaaatattggaggtggtgcatgcatcgagtttgttgctagagtaaatatagtatgagagagttattagcttttattggttttagtgtacctatgaaatatgtagatcaatttagaatggagggagtataacactagggtggtgttttgatgggagtgacttgttttagtccatttaaaaaaaattagcccctcccataggaacttttgctttttacttttgtgagagacatcccaaacaacccctagatagccacttgtagtacttctactaccgtactctcctcgttataatattgcaattagtagagtattaatcaaagtacagatacgtgtactgtaatactccctgcagtgcacgcacggcacaggttcctgtttctccgccctagctttccctgccttgtaacggtcccttcctccaccacccaataatcatccttttcttcttcctttcttttcatcaaagcaacctcctcgagatgcgcactcgctcacccacccccgacacaataccaccccttttcaactacagatcctctcaaattattttcagaccatttgaatcatgcaacaaaattatgtccattcctttacagcaaacgatatttttcaaccaatctttcttatgttttcatggaagacaaacatttggttttaagcttttatgttgaaaaccctctatttttttagatgtgccatctcaaacatacctttggctgctggttcctctccttgagaaaatgctctacaaagaactaatctttccggccattaattaattgcactctctttcttcactttgagaggatagaaaagaaaaagacccatgaggcatgcaaaatgagatagaccattagaatatgattgagtattaattattttaaacttaaaaaatagattaatatgcattttagcaactttctatataatatttttaagaaaaaaataccgtttaatagtttggaaagcgcgcgtagtggaaaatgaaggactttttcctctttatcttgtgtaagggtgttcatagtgctttgacatgctgttcggccaatcctcaacacgtcgtggccagctaggtgttgggtgtgaccaaacgatgtctacggagcctagagtgcgcacacattcttttgatacattgaggccaaacgacgtgttgggggggggggcacgatcgcgttgtggaggtcatggcctcaagtaagaggacgcggcggatatggtgcctgccttgttgtcgtcccccgctttaagccgccgagctgtgccgccgctcgttgtcatcacctgctccaagccacggggcctcctcgaccccttagtaacctcggtggtggcctccatgacctgtctggattgaggcgctgtcgaggagagggtagaggccgtactgtcgcttgtcgttgttgccctgaactgttggtgctggttcattgtacttattttacaggtataacttattgtacgtattcattgtgctaaaaaaaagtcaatctatgcaaagtatgttaggttatgttccattcttatctagagttttttttacggatagcgtactcatctaatctaccaaaacgtgcatttggacttggctggaatgagattcaatcattttggagttgacaatcccaatgaaagctgaacttgtgccttgaaaatacaaagcaactcggttttccgaggaaactaaaaaagttgaaaagaaatatatctgaatgtgaaattattttattccggtttactaacacgaaatctagagatacaacctgtaacagcaagcaatcagtaacggactaacggctagctgggaacccggtgcgttcagcacctgtctcagagactgcatctcaccaaaccgccattaatttacactaatcactcctactactcctctactctctatcaggaggtcaataggagagaagaggagcgtcgtcgagtttgaaatctcaactcgcaaacccccacactactttttcttcgtctattatatcccaacacaacacaaggtgaagctactcctaggcgagagaatctgagagagatgagatgagaaaccttcacccaccaatgatgaagatgctcctcgccgccctcgtcgtcgtcgccgccgcctccttcagggcggccgaggcggcgctcccgtcgatggcggtgggcgtcaactacggcgccaacgccgacaaccttcctccgcccaaggacgtggcggccttcctcgccgcgcacaccaccatcgaccgcgtgaagctgttcgacgccaacccggccttcatctccgccttcgccaacacacccatctccctcgccgtctccctccccaactccgaccttctttcctcgcgaacaagcagaccggcctcgacaccgcccgcgcctgggtccgcgccaacctctccccctacgtccccgccaccaacgtcaccctcctcctcgccggcaacgagatcctcctctcccctgaccccaacctcgtcctctccctcctccccgccatgcgccgcctcgcccaggccctccgcctcgagggcctcaccggagtccgcgtcaccaccccgcactacctcggcatcctcgccccctccgacggcatcccatccaacgcccgcttccgcccgggctacgacaccaagctcttccctcccatgctccagttccaccgcgacacgggctcccccttcatggtcaacccctacccctacttcagctacaacaatcagacgctggactacgccctcttccgccccaaccgcggcgtttacgaccccaacaccaagctcaactacacctccatgttcgacgcccagatggacgccatctacaccgccatgaagcgcctcggctacggcgacgtcgacatcgccgtcggggaggccgggtggcccacgcaggcggacccagggcaggtgggcgtcggcgtggaggaggccagggacttcaacgaggggatgctccgcgtcgtcagcagcggcaagggcaccccgctcatgcccaaccgcaagttcgagacctacatcttctccctcttcgacgagaaccagaagcccggacccatcgccgagaagcacttcggcatcctcaacccggatttcacccccatctacgacctcggcctcctccgccaatcctccgatgtaagtaatttttcattccccatcttcatttcttttcttttcatttggttggttttagctagctagtgtaattaattaccctgagatagatgcagattaatagaaaaaaaaacattggtggtacttattttcagtacatatatgcctgtcattgggagattgattagcctgcatcttatgccaaagattgcattatttaatcaccggggattattcatttcttcttcaggggagaaagaaatgaaagaataattagtactaacagatagattcgcatagctgtagcaaaccaatttttagtatttaactcatgtcaggacgttgatagggcaatcgatatgtacacgcacgctttgctgatctaagctggtcctcgcttccgtgcgaccgtgaccatgcggatattggtggtactagctaagtttggttgttcacaccgcattgtcaaaggtgtagccatggggttatggcccaacctgacctctctggaaagacctgtttccggttcaacttttgctccttatcgcatcgatgatctgtttgcccaggctgcttttctcgatgaatccaggggcggtagcccgcccatgtggtgaagccttggacacgtctgcattttttatacatgctattgggacagccgcaggcctctgattaagatctaagatgcacatgcttctatcgatggctgggcatttctcaacttttacatagtactattcactactcacctaccatgtcatcgaataattacaacttctgttcagtaaactaacaggttcaattgtgctctgttctttctgaatgctacactgacttatgggtttagttagtacatttttcttttaggattttgtgatggaccaaataaccaagagaatggtaggagtacaatatagtaaatatgatgacttacactaatttactatccacatagagatactagtgcttttgagatacataggacaacctagtgcatagtactgcatcagcttttgctgaaagcatcaagtcttgttctgtgggctgtgtagcttagcttctgccttctattgctgaatacagactgtttggtatcccttctttgtagtttgctggattttaagaaactaatgtggtctggtgcttctacgaagctaccttgaagcaaaaagggaattaacatgccctctgcctttcgtttcatgctcaattaaaaacaaactcaaaaggtaggacagtcagtccacactggcaacatataaggtgccattgcacatggagcttgctggttggagcagtgtgccagtgtcgtttccaactttgcttcatctggtgtcacctctatctatccatcccatgatatccacgtgtccatgtgtttgttatttttgatcatttgagccttgctatttctctgttctacttgagctatactgtgtgtccgtatggatcagcttcgctgaccgaagtttgatgcagccaataatgctagttagcctttggtgatgcttagtgaaagtagtggactatggagaatatgggggctatctaactggatcaatttagcgagccaagaatcttaggcaaacaatcatcgatttggacgaggaaacaaaccctgtcttggatggtgccaatgcagaatgcagaaaacatgtatttgctgtcaagtgtatcagtagcatactaacatgtacacacaacaatttagtctcagtctattgcaggcaaactaattttgttgaagagtatgttctaaactggatttacaatgctgtttaccctagtccgcagttttgtggagttactgttttcctgtttaggcactgtggtgcttgaattcttttcctttatcaccttacttatttgatgaaaccaatgctttcctacgttgcagtctggagctccaaacccttcgccgaatccatcacctaaccctagtccgaaacccgctccttctggtggagggaagtggtgtgtccctaaggctggtgcgagtgatactgacttgcagaacaacattaactatgcctgtggctatgtggactgtaagccgatacaaagtggtggcgcatgctttgatccgaacaacgtgcagtcccatgctgcatttgtgatgaatgccttctaccaggccaacgggcggcacgactacgattgcgacttcaagggcaccggcgcggtcacctccaatgaccctagtaagttgaaacaactgtttctcgttcatgttctgcacctagcagcattacacattactagactgtcaaatacacttattcagaaagaaagacctgctatgtttttgaacatggtagtagttgatcatttgaactgaaaccgatacatgcttgttcggcaggctacgggagctgcaaatacgtctcctgacgggacgcagcaagccatggcagtgcaggtgcagcggcaccaacctcgagtctacctccaggcttaagtcacggaagcgctggagggttgctaatactgcctggcttgcgcctaatttttctctgctcttgtctgacagcagccatgcttctttcttagaagagctatactattcattactctcgtagcaccggggaatgaacctattaaaattgtgtatccgttatcagtcaattcttgctcatgtttggctataccgcagttttctcattgtgtagtgaaatcatttgtgcttaacttatcattccattcttctattctatgtagaaatataaaatgaaccaccaaaagaattagagcctcccagttttgctgtccttttgtttccatgtttgaatgaaaggggtcgtacagggtaggaggtttgctagtcttttgcatttgttcatttctgttatttttatttttacatctgtggcagtcaaaacttctcccgaactgaaccgaagccttgttatgttttcatctcagcgtttactctacagctcaagctcttctttcactgtatagctagcatcgatctacaggttcagaaatactagaacttgggatgtaccgccgtgccggtacaaaatcaacactgaaactgatagctgcaaactaaacagacatgagacagtcaaattgttcagggttatagcaaggatacgtaggatcgaatacacggaaccaagcctaccatggcggatttgcaaaataagagcacgcatcatggacaagaaaacaactagtatcgacttaaggaaagcataggtttctccctttttcttttaaggttatcattgcaagcttcttgctttagatattttgtattaaccaaagaatcgagctttgggccgtcttgggataacttgatgccgatcgactagaatgcctggcgatgcaagaaacaatgccgggccctatgaaggagagaagtagctgtgcattagctcttccctagtttcagaaagtttcaaaagttccaattgatccgtgctcttccctagttgaactatacgtaaaacggaccgacgtattctcaaaaaagctttcggcagtgacgcatgatttttctccggctataatttcacaagtttgagcgttaggattgttgtgcacaccattaaccttaggagaaacaaatatgatttgtttttcctttgagttacaattccctgagttataccctcagggcgaaagttgatgagtgtgttaaattttagaaaaaaaaacacatgaatttttctctagcacacaactttacgagtagtagcatttcaatcgttgtgcacaaaattcgtgagtattaactttagggaaaaaaattcattatttctcttcttcgccctaaaccctataccctttgccgaaagcttaagaggattaacatttggaagaagagcttaaattttttctctcgccaaaaaaaattaacgaggattagcatttggatcatatattgtgtataaacttcgcgggtattaatcttttgactaaacgtttcatatatttttgccttcagcctattaatggattccatgagttatagccttcggagaaaattaatgtgtattaacctatttgaaaaaaaaacacttgaatttttttccttcggcccaaattattctaggcatgagcattgggattgttgtgcacatgaaattttatctttagtccaaactatcactagtacgaacatcagggtcactacatgtgaaatatgtgattacttacatcagggaaaaaattcatgaaatttagcttctggaaataaacgcatgatttttttttgtctgccccaaattttcactagtagcaccaggttcattgcgtgtgaatttttctagtattaacattacgacaaaaaaattatgaaattttgccttcaggttataaaattgtgagttatagtgttcgagtaaaacccgtgagtattatcctttggaaaaaatgcatattttttttgtttggcccaacattttgctaggaagagtcatggcgtgtgaaatttgtggatattaaaatgaagaaaaaattcatgaaatttcgcctccattctacaaattcatgagttataaccttcggctaaaacccgtgagtattaactttcggaaaaatcacacaatttttttcttcgatccaaattatttctagtattagcatcgagggcatggcatgtgaaatttgtggatactaaaatcaggacaaaaaaatttcatgcaattcagcctccacgctacaaattgacgagttataaagccttcagccaaaatatatggatattaaccttttggagaaagcataaatatttttctccatcccaaaatttcgtgagtattggcattgggaacgtgcacaaaaattgtgaatattagtcttaggaccaagattttcgtgatatttagcattcgacatataattttgtgttttatagtccttgggccaaaactcatgcaaaaatcatgaatatttttctccgccccaaaattttctatcataaatattaaccttaggaccaaatttttcatgatttttagcctttagcttataatttcccgagttatggcgttgcattcggctcgactcaatggatgagctacatctctgtagctcattttttataactactgcgctttttgcaaaaaactttttatatagatgttatttaaaaaaatcaaatctagtcacacgctcatcttgttttgtgtgcctctgataatatcgtctcacgctaccattctagcgtagctttgggcaaaaaaaaatatgaatattaacctttcgggagaaaaaacatactatattaacctttcgggagaaaaaaatacttttgtgggttgaaggttaatactcataaaattttagtccaaatataatatgtattcaaacccaaggctattgatgaaatttttggcccaaggttaatattcatggaattttcgtccaaaggcttatagtcaaaggtttatgtttgaaggctaatgttcatgcacttttggagtcaatgtgagtgtcatgaattctccagaatactactactcgtgtgttttgggctgacgactagcactcatgtgttttagcgctatggttattaatactaatgaaattttaggttaaagctaatactcatgttttttttcatgttgatactccatcttatattcatacctattttttcccagggttaagaataattaaatcatgttgatatcttatattcatgcctatttttttccaaaggttaagaacaattaaatttagggtagatggcaaatatccatgcgttttatgtcctaggtgtataacagaacttttggttgaatcctgacatatgtgcaactctgaatttttaggccgaatactaatacttgcttgtttctcagctatacgctaccattgatgtctttgagcccaaggtagtactcatgaaattttataccaaaggctaattgtcgtgttttttagggtttaatgcttatatatatatatatatagattttggctcaaataggcgtctgcacaggcctttactgggcagatgctcgactttaaaacataattttatggaacaaggccaattaatgtaagcaagacgttaatgtccggaagaatgggcggaaggggtcaatgttttgtccgccctgagtaggcgcggccccagcatcgaagcctcttttcaatcattgatagagttccttctgtccgacgcacgatatgttggatttctcctttgccgattgcgattttctgccacgacgcaggctcttcatcgaaatgtgttgctatgtagtaaaagaatagagtatgaataaatgatatatcaccagacgaaattttaatacattttgccaagggcaaataaagcaacaaagtgtcggtaattttgacaaagcattggactgtataatactccctcagttctaaaacataagcacttctaaaattattgacaaatattatttatcccatcaatcacttattcaaatattcctttcttacccccacccaccatcaccatcactcatgatgaggggcaccaaattcttttccctcgaacttaatttacgataaacaatctaaaaatgcttataattttttaacggatggagaactttacaaaaatgctagaatagaaacattaaaacaagaaatacaaaaacaattcattggttacaatattgcaaaaagaaaaaaaaatacggtttgagttccaaacttcaagcatagagatgacaccggtgaaacattttctatgtcttgtttgtcattaagtactatatgataagcacataactgttacccctaccctatcaggcactgtgatcagcctgaagacataatataaacggaaaatttctcaatggcatagtggtaacatgaaatacacgtaggcattctggagagttgtttcaggcacaataccagttacaatatactgtaatatagtaaagtaaattatttgctgtcatcttatttttgaagaagagcaatagacaaggtctgggtttgtattttactatgctgaccaaagcatctagcgtcttttgttctgtactattttttcaaactaagtattttggtttaatctaaacggctaacatctccgactaaggttctggccccatgccaaatgtgtccggaaaaaagagcaaagcacatctattctttcttagctacacaggtggaaggtccacccaatttggttaaatatggattcaaaagggggcctgaatgtgactggcaactgctcctggaccagagactccgtatttaacccgcagtttgagatacatggagcattttcatcaaagcaacagcactaattgattttactgtcagccaacatcgatcaacagaggttctaggcacatttatcgagccatcaagtgtatcttctagattgtttaaccttctagccccccccccctctttcttaatgatatttggtcggccaatccttcggccgaccagcaaaaatttaaccttctagtggttcggattcagaattggtggcaaaacgtgatggtatcacatggcgagccaacatctagtcagcaaacaaacttggtgtgtaattattgtatgccaacatttcgtggggcctccttcagtttacaacaatatcagagcaacacttaaagaaccaaagtatgctgcaactcaacagtaacaggtaaaatatgtgctttcatttgtataacaacatggtagtagatccagtgtattacctgtatagatattgatcaacaaagtaacggtcaggtgtcctcaaatttttgaccgacagacgaattggcataataaatttagctttgtgcctactccgattaagctgaaaaattgtgaaacagactttgacaatcttatttacagagcttatcaaaacattgagtatcattttcatgtgtagaaataagaatttcccttaccgtctgccatgcagatactcttttcccccttctcgggtatacaatcatcctcttgtttgaaaggcagctcagaagtgaaaaactatgaaggtttacctactacaaagaactttaagacatgtagttgcatatattgttttctatcttaacaaaaaggtgtctcattggttttcctatatagccctaagcaaataagcacatcaaatttacagggtatgatgaaatccatcctaatattgccaagagtagcaggatccagaacatggtagcgtatttgaatagtttacagaacaattcaaatctgtaaaccagcttgtttatgtctttcaacacacaaatcatcagtttgacatggaataattactttcgtatggcacattaaataagccccagccactgtccatcacaacaattcaatgggctaagtgaaaagacacaacaggaaaaagaacaataatatggctgcaagagggttcatttaactcaatcaactctcttgaagccatcttgttatatgtatcactaccatgtgtagatctatcactggacaatgggaaggccaagtgcttacccaaattaatagcaatggaagcaaaagctgcagaacaatccaacagcaacatacactagcgaatttatttgagctctgtttcttggatttcacaaacagcacaacactattaagtgcacagggtaaagaaaaggagagattagataaaacagaatgatgcaagtatagttggaacgatcacttacacagatagagaagcgcattatgtaagtagagagcatcaacaaaagaatatagatgaactgcagagaacgccagcagagacttgttcttgcaacgagttgcacaaggaggggatgccaagctccaagaaaactggatgtcggtgagaatggcagaacagagatgccatgtaaagatttagccaaagaacagtgattttcttgccaggcactatctcaagcagttggtaggcatctagtgaccagattatgcaaaacaataccaccaaaaactgcagggaccttcatacaaacaaagatcaacaatattaaatgtgtcagatgaaagaatagttgaaaaaaaaaacctaaaatgaacaaatgaaagctgttcaagagcaggaaaaggagcgtgctgtgagaggcaggtgcagacagaggttctgcttggatgcccatgggatggaagttgattaagtgattaaataagaatttcaaaaaaggcttttcaagagaacaaatgggatcaatcatgaataatggcaatttctaacgcaattacagacaggacaggcaaggagcgcctcctgacacacgtgtgggagtcatcccttccaggtgccaagtgaaggcatgggggatgggctgacatggcaaaagtggaacaggggagtccagctgggccagtctatacatgagactgatttgtgtaacggctgatatctaaggattagttcaatctaacagctgatatattgttggcgatgcaacatatcttagcattggggttgctttatagcaattactgcaattagttgtttgtacctatatagaaagaaaggataccagagcaagcggaccaatatgcaagtcaattgatagtgtaaggctgcacaactaaacgtatatgtaagccaaagcatgatttagaattcagttaaattgaagatcagttcctagactggctttctttgtttcaatttattttctctttcccatttgtaattattgtatgtgctctttttttggtgaaaattaacagcgggggtttcccctgctgcgattacgtaaatagaagtttcaattgaagataagtgttttgaacacatatacattccttcaaccaccatgagaagtgtgttgttcacgaactagttcatccggcatgagaatgaacattatcggtatacagcctaccttggtgattgacctgcaggtggaataacagccacttcaacatgctcatgagctgcgatggaatccaagacctttcctgactaaagttcaacctaacaaaagtattagataaaaaaattaggtgcatagcctctcaaggcagtttgaaaacatcaaagaaaaatgcacagaatcatgaagaaacgatgtggattttaagtggctgagttcatttgttagacatggtacttatggtatggtgtagtgattttaatgggtcaccttttctataaatacagcaagatatgctatggaaaaaacgaaaatatctgttcgggtatgctatgacagagtatcatgcttccaaatgtgggtacttaaacgtattattagcttctggtgtttctcttgaaagccaacaagcaccagaaagtgtgttttcactcgttaagagaactgccgtactgacagagaaaatactttcagtatggcagtttttataacgagtaaaaatactttgttgattctcagtgtttctcttcaaagccaacaagcaccagaaagtatttttatcattaagccaactgttttctatgacatacttacaaatgagaaaatactttctcattgattcttctacatgaagtacctctatttgaggttcaccaatgcaggagcgtatatttcaccacctcagggaaagagagagctactgattaagaagggtgcaaacacacttcttttaccacctcggggaaaagaaagaactatcgattaagaatgggtgcaaagaaaacacgatgtggtttaaatgggtaggggcttatgctatgaggtgttgttaggtgatactccttttacatgttagtttgagagggtattgctaaatgcaatacatgttaatcaagatgtaagagcggatcagtgaaagcggagaaagggggaacttaagacagattaggcaaagcttaacaggagacttgaaggggtatagtatgtattaatatctacataattcacaactacaaatattaactaactccatattaagatgtcacaaggtgctgtgaaatgaccttagctgtaacatcaggagaaaataggactaacagaaaaagaaattttggcgcataatttcagtgtgctaacagaaattgatgcatttctgctgtgataatagtacataagccaagtataatatgtatgtttggttcatggccttgctttacacctttggcaaaacatattggactgacttttaacatttagtttactgccatactttccggcaaaatcttaacctagatagtgagatatttaaacatgacagcagaactaaatatacacggaaaaactatacatggaaaaaacccatgcactggtagattcacaagaaggccaagtaaataaagacatgatactatggttgattcacaaaaaggccaaataaataaagacatgatactcgttactgtctttcaaaaagaaataggaggttaagaggcctacctgcaccacacatgtgtgcacaaaagtcttcacaagtaacatttttacttccatgcctatggaaatagatgcccatgacctacagaaaagatgagcttccattgatgaaatagacaaagaaaacagactagtcctctagaaaagagaacagaacatattgggagcagatatatttgcatggtacatgaccattatccctttggcctaacaagaaaacataatctagtgtatgtatcttacataaaacataagactacttatactatcaaatttgaattaccaaatcaagcttcaaacaatgtgttgtgcattctagaaacctcagggcctttgggatagattattcccatataacattgtaatagccagctgttgttgatggaaaagatggttggttctaaagttagattcttgcaacaaaataaacagaacagagtgcacatcatgaaggagtgctgcatgatgacctgatcttttcatgctagtagcctgtttgttagacttagctgggaatagtcaaagcaaatgaacgcctaataactaaactatcatgaagtaagcacatcgtttacagaagatgtaaagaagaaacatttatatggtttgttggatatgaaaaggtagcggaggttatcgataacagtaggaatcaaatggctttattattaaacatgtagagaaatacaaaaataactcaagtgtttcaatagatgatagttagccgcgagcacctgtcttgggaagccaaatttggcaaatgccgagaagcttctcggtgtgttaagcaattagtggcatatcagcacactcccaaaggttcccctgcctcaactatctctgtgcttcttgcctcgtagtactgcacaatgaatccatccacacatacgtcaagccagccagattcagttcaacatgacgcatcaaaataggttgtgatgaaacagaggtggtatttcccttgaatacatgccgacatcaaaccctgtattattcccttgagatccattgaaaccctagattatgagacctggaataactaaagattataggatgggaaaacgcccaaatttgaacctctattcaccgtcaaaccctagattgctaaaaccaccgaatcagtctaatattagcctaaggagagaaagacgtacacgaaccctaggcaatcaagaggagtaaaatccagaagaatcaaacagagttggatcttgtagtggagattgtggacaaattaaacacaagagaggcgaagggagcggagggcggaggtagacctcggcaaaggggtttggtttcggtggaggaggcctcgtccacgatccgatgttcgccgccgccgccgccggggtttaggggaaggcggtttctctcgtgtgattggggctccgcgagagaagggaatggagaatgcgctgcgcgggcaacggcggcggcggcggagcgtgtgcctaggtcaggcgaggcggatggaggcggcggcggcggtggtgggggcaagaatagccgctagattgggtttccaactgtagtactttttctctctgcttttttttccctttttctttgaggtgagatgtgtcttgcttgcataataatagtactaataaacagattaactgcactactgcagttaaaaaaatgtagtctttacattttctctcaccacgcgcagcgtggtactcgtatccaacgtttttatccccagtcatacttgtagctcatttctaatttatgagcttggtatgttacaatgttataatgtatgagtatattattactattacgagtaacaggtaaccgggtaaatattaaactgaattattggactaatttcgtaatgagccactattgaaggtacaaaatacatttccataggaaatatagcccaacccggttaaaatatttcatcactttatttgggggtacaccattacaagcattttcccgtgaatagtggaaacccataacatagcacatcgattaacccatcacacacacacacacaccccatatatattggtcaagcaccaacccaaatggccaagcttctttatttttctgcatcacaattcacacgcacacatgatagatggtagatgcaggcaggcatcttagcagttgcaagggttgcacctgcagctggaaccgcagctgcagccatgggcggtctcgccggactctgcggccgcctcaaactgctgcgccttcttctccggcgccacacccagcacgacggtggccttggtgctgctgctcttctcttccaggtcagggtacttctttctgcaacaaaatcaacatcaatcagttaccacaagaattaactctgcaacaacgattactctgcatatttagagaatattaataatgaaaagattgccctataaatcaagaacaagtcagcaaagttacagtgaaaattacccgcaggagcagtttgagccgcagctgcagctagatccacagctgcaagacatcttctctcagtctgtaattaagctcaagcaactgaagatgaaatcaactaaggagaagaagaagagcttttgagatgatgagcgcaatgcatagccttcgggtcctcctcgcttcttataggactggatcgaggccggccggcaaagaagcgtatattaccacggcgttgctacgtgtcccaatgatataggctattaggctgtctggaattagtcaatacaagttatctctcgtccaatggccattatttgacagtgaagctttttgtagagcatttgattttgattttgattttggtttctcacaaattttagtctccatattgatggcgagtgttattggatttactatggctacaacttctactacttggtggcagtttcttacaagtaaattttctaatgtgaattgaggcctaatggaaatagattacacaccgaaattacttgcttgaataatttttctgaacagagttcttcttcacgtctgtgtcaaaatgtgattgctttctgcaaaagcaacaatgcgtagttgacttctcttcccttcttctcattacaccagcaacgttatttaagttagaatatctaatatgaaaatgcaattatacgtcattttatatctaccaatgacttctgcaactgcctagcggcaagaaatgggccttctatgtaccttctcaccgtttctgttgcatcaaaacaattaagttttagataaagaagcattttgttcaatatgccttggcattttttaaggatagtgcagtatgtactgatggaacaattaaaaataacatctgagtatttctattttattcaagtacattctttatgttatcttggtttcctctgtaaccttcaaggctgtacgactacagccaagtattttctgcgtgagggtttacttcagaaaggtatggcccattgataaggtcaataagagtggaaaatacatgaaatttgcatggatgatagtcgatcaattcaaccttgattgttcataaatacgtttttttaaaaaaatgttatttataaatatgctaaactgctgcattcatgacacttacgaacaaccttttccatcatcctatgttatttccactctaaggcatatgccctgtttcaagcagagaggatagatgacagtaagaactgcctgaaaaatgacaactacccagactggtacacaagaaaccttccttgtaacattcatcatgagaaaatttactatccttgagaggtaccgagacaacaataggcttgatgctacgttgccaacttgtctgttttagctgacctgactgagacaacaataaaacatcacatccagcacatcaagaatccagaatgggatctccttttttttatatatgtgcactgaaaatagaaaacattatcgcactacgttacaaatattgtgccaaaatccttagcaacttgctaatcctatcctacgtctgggaactatgatagctaagtattttcacaagtagtattttcactatgatctatatatattagcagagcatatatatgatctacaacaaggagtattttcactatgcgtgtcctactaacataggacatgtaacatgttgatatataaaaaaattaactctaaaaaataatagtaacacatagaacaaggttatctgaaccatgggtggtactcactgcaatttcatttcacttatggaaaaaaatttgaaaatataccatttttctcataatttgcgtttatatacacgggggagaaagatttgcgcaaatatacctctcccgcgtgttgagaacgcgggagcgaaacgaatgcgtggcatggtggtgctggaccgagagctgcagcgtttgcgcggaacggtggcgtggtaccggctcggtcgcgcagaccgagagtgcggaaccgagccggtcctgcgcggtggcggcgcacgtccgggaccgagccgacgtccgctcgatcgcgcggaacggagccgcgggatcgccgcggtcgcgcggaatggatcatgcgggaccggccgcgctcccgcttgccctatgcacgggaccggataaagttgctaatcggttttacacatatcagtcaaaactttgcagctaaacatatattttgcagcggtttagtacgtaaccgcaagagcaagctactgaaactgggagtttgaaaacgataaagcaagccagtaacgcagatgattacgagacatttactgcttttctgcccaacacaaacaaaattgatgatgcaaccacggggctcagtagagagatctcacggtatggccagttacaggtccgtcgtcttcgagctctttgaggacgtagaaactggccagctgcaagtattaacattaccgtgattacaagtaatatacctaccctgagtttccagttagcaacaggcatgctcagttttatcccaactggctcggtcccgccgatccattccgcgcgaccgcggcgatcccgcggctccgttccgcgcgatcgagcggacgtcggctcggtcccggacgtgcgctgccaccgcgccggaccggctcggttccgtactctcggtctacgtgaccgagccggtcccgcgtcaccgttccgcgcaaccgctgcagctctcggtcccgccccaccacgccgtgcatttgtttcgctcccacgttcccaacgcacgggagaggtgtatttgcgcaaatcctcctaatcctttatatataaacataaattatgagaaaaaatggtatatttttaattttttttcttcacttatgtattgcaaaaatcagggacatgctcatatcagagacgtcagtggggaagaaagcatgatatttgagagtaacatcctactgaattcaactaggaagtcccagcgcttcatatgcatcaagggagaatgaaagctacaggtatattatataaatgtacagtaagttcggatgatcgattgattgcaactcggtgggcattttcccgaagtcacaattgactaactgaggactagaacgggaggccaaatgtcgccacttctgaaaggaacattttgttcagaacttcaagatgaaatgagcatggcgatgatgtgcaaatacgtaatggacttaccaatgttcagatccactcaggaaaaactacagctatgacctccagaaaaagaacaatgagatgttcagagacaatccaacaatgaaataaaagaacaatgaattgttcagagacaatccaacaaaaaaaaaaagcatcgcccaccgtggggctcgaacccacgaccacaaggttaagagccttgcgctctaccgactgagctagacgggctcacatgctgaagagcttctgcttgcctattcattgtgaagtcaagttctgacgaaatttcaagcaaaatgatgtgtctttgtttgccaacatctacagatgagaacaactattgtttacctatccatgttggttcgtgggagttcttctctgtagctattattacagcacaagctccaattccctttgtagggagaaaaaaatgctcgagcttagtcaagataaagtcagcagcagctgagtgtcaaaatggagttccaaggcattatacactgttgatgttgaaatcataagaactttttcggccccaaagcctagatgcatcatcacagatgcaatggaatagcatgaaacaactgaagcctgctaccctggaaacactaattttatgactagttgttcacgatctgttgtggattttacatccccagcctaagtaataacaagaaaaagcaaaacaaaagcaacacatttgtacgaactgccgagagggaaattttccaaaacatttccccactgcatcagcatctcaaggaaaaattctaccataattttgctcaacttaatttaatctaccacaattttgctcaactcaataccctgaggatctgaggcatccataaggtctctcagaccaactctcagatctggtactccctcttgcaagatggcacatattggaaacattggaacgccctgcactctcttcttcagttcttcatacatttcatcggctccctcttcatctattttgtttgcaacaatcaatgatgggcgctttgtcaggccttcttggtaatgctccagctccacgaccaaatcccgcagttgctcccatggcgggacaccctttcgaccattgagcgtggctgccaggtcaagtacgtaagccagaacttttgtgcgctctatgtgcctcaagaaagcatggccaaggccacggttctcgtgggcacctttgatcagaccgggtatatcagccactttcactgagaagtagtcctcataagttaagctaccaatattgggccttagggtggtgaatgcatagtcagctatctctgggcgagccctagagagagcgctcagcaatgtgctctttccagcattaggcataccaacaagcccaacatcagcaatgctcttcagttccaagataagataggtctcagttccaggatgtccagtactcaagctagccatctcctcttccttatgtgctttggacagccacatctccttgaggatacaagcattccctagtccaccttcccctcctcttgctatgatcaaccgctgcccaggctttgtcatttcagcaacactataccgaacatcttcttcctcctccttttcctccgttacctcctccatgtccaactcttcttcatcgtcctcccaaaattcatcatcctcatcatcaaattgatcattttcatctacccccacctggtgtggatagctagtgccatcataatcttcggtgcgcacaaactcagtcatgtaatatggttcctttccccgatgatttctgtttcctctttcacaatcattttcagcagtgttcttcttggaagaaatatgttgactggatcggctgctatccagacctttcatcatcttgctgccaatacgactggagctgaatggtgagtgttcaacagcatctgggatatcccagggatctagagctctggttggcttatttacagaaagagaaggttgctccccttcaactagatgaataacagtgcctactggtacctgcgcaatctgtcacaaacaatagaagaaagagatgtgtcaccagttttcttttgatagagaatcgcatatatatatatatatatacatatactggtggtaaccttgtcagaacctcttgtcccgatctgattctttgaaactccattggctcctcggcttgctttctgaaaatagagcagtgtacaggcatcaagtgaggtaagcaactaagcatgaattttctccagacatatatctcaacagaattgctccatatcatatgaaactactccataacaacaacgaaatatttaggctctgaagctagccaaaacaaattagtacttgatacaatttcaccaacaacagttgaacaaaagaatttccaaaggaaacacatgataatcagggtggataaataatcttggtcagccttttattgtaacaacctcattgtgtcttttatatatgcaggcatatatcaggatccttcatattctttcgtgatgatttttttttaaaaaaatctttaggatcatgattgggtagggttagccccttttagttcaacaagttcagattctcagcaacggcacagtgtttttaggaacacagatcctaaatctagcacaatatgatgttttcaaacagcaggaaaccaggaaggtgcagaaaaagtatgcatctctggacaaaacggacaatatgatggttttaaacatataccatgtgatgttgcaaaccactgaaatcccagacagaccttgaacactcaagaatgacatcaccacctcttcctccattaccacctgcatatttcacataaggaagatctgatctggctccattgtttaagaaagaaaatcctgactgactgactgtcaaattagaacaaatagcatgaattatctttggccaacttaaatagtacaagcctagaaatattctgatatagtcatgtgtgaagcctcattgacagggcataactaaaaagaaatccctttatcaaggaaacaacagaaacaactaggcattattacactacaaacaaatacacgaaaaagattactgctagcaccatgtgacaattccacaggctgtgcagcaggggagtcgttaaaaagtgctcaccatcaggtttgccttggcgatctgacctggagcgccgaagactgatgcagccattgccaccatcaccacccttggcacgcaaacggaacctatccaccatgccccttgactgcaaatttcagtatggatgtttcttactatcaccgtgtgatgacatggatttcttgaaacctcaaagaatgggtgcctttcagtatatttctattgtcaagcttttacataatgcaagtttgttattccccacaagtgtaattgggaggattaagaaagttaaaatccagtggaaatcaaagcatctctatggcatgtgtgtaagaaaatagtaattctgacaaaaaggacagcttgcttatgagaaattgttaagggggtaaaatggtatacgggtggtttcttattatgctgttgctgccttggatgatgttcagctgcagtgataaataatcagttcaatccgttgttctcagtgtttgaatgcagcatatactgaaacatttcgtacaaatacacaactcgtcgccgagaacacaaggtaagacacatatatattttaaatagtcctgcactcattactcaaaggagggagggatttgccatgatagcaagcaccgagcctagcctagagataacagattccagaaattacctgcaaaggcgccgtctttggcttcctgccttccggctcggtggcgtagtagcatccgatcccagtagccgcgggaggcttgggcagcgagatgcggcggaggagagcatgctgccgcctccacatcttggctgtggaacggaagtcgtggacggagtagcggaggcggcggcggcggcggtggcgacggcaggggagtggagaggaggaagacgagcggcctggcgtactgtgagattcggcccacgggctctccttctcattgggccatatcccacaggaaaacaagaaaagtagacttcaatttaagcccctgtttgtttcagcttaataatattattgtaatctagattattaaatcagattactttaaactggattataataagctaacataaaataagctacgagttgtttgtttctctggattattagaggcatctaagggtagtgggtctttagccactcaataatctggaaaaagcttctctagaggtgattattggattatagtaatctagcttatagattaaaataatctagcataataatctacttgtttgtttcagcttacacctaataatcctaagctaaatcaaacagggtcttatatggcctctcatcccctagctgagattgctaattggcgcgcgctagatccgtatctggcgcgtgtggccctccaccggccacgtgtcttttttagtgatttttttctctgttttctgcgtgatttttttggcgcgattttttccatattttttttactagacttcactgccgagcaagatgccggcggcgctgaagccgtaccgcgacaacgagctccgtaacctgcgcaacgacgaccagcagggcccgtaccaggagcacgaccacgtctaccgctacaacgtctacaacgacctcggcgagcccgactccgacaaccctcgccccgtcctcggtggttccgctggcgaggggagggagaacagagagagagaatgagagattggggagagagagaggggtggggcccaccaattttttattaaaagaattgctgactgtattgtcacgtaggactaaaaccagcatggattgaggcggggggttagttgtccggtttgcacagttgggatgaaaaatatccggttttgaggtttaggggggataattcgttcgaccgcgatagttcggggggtaattcgtacattttcattattattttcattattattattattattattattattattattattattattattattattattattattattattattattattattattattattaagtatgaatccccccaactatctcgatcgaccgaattacccccctccccccaaacccgaaaaccagacattgctcaccccgaactttcaataccggacgaattacccccctcgacccaatccagagtggttttgccctacgtggcgtacgtgtggcaatccagtcagtattttctttttttaaaaatagtgggccccacctgtcatacccctctctctctccaccacccattagattcttcacatcctgatctctctctcaggcacaggcgtgcccggcggcgcacagggtgggcggtggacggtggcgcgcgtgaggcaggcggtgagcagcgacgcggggacgagtggcgcgctggctggggaaagggttcgacgcggcacaccggcggctacgacggggtgagggggctgtgcgaccggtgaccaaggaggtgaaggcggtgaccagggcgactgcagtggacggggccgccagcgtccacctctctctctctctcttgggcgcaggtgcgcatggcggcgcagcggggcgggcggtagacggcggggcggacagaggcgcacgggggtgcgagacgtggaggcgggagtggcgaacaccaaaagctggagcagcgtcgggaggaggacggggaggaggaggaagagggtgatgccggcggtg

SEQ ID NO: 924 - DNA, 3761 bp, Oryza sativa
  unsure (1)..(3761): unsure at all n locations
atttacagcccaaaaattacgaaaacctagctgcatcgcatcttcttctcctttccccaggcggagcaccgtccgatgagcatccaacggctacggtcagcaccctcggaaccttcgagaacaccctccccgctataaattcccgcctttccggtagcatctagtcttcctctcccactcttcctcctccccaaaccctagccgccgccgccggcgtactcgagagaaacatcagcatccatggcgggcaagggcgagggtccggccatcggcatcgaccttggcacgacctactcgtgcgtgggcgtttggcagcacgaccgcgtggagatcatcgccaacgaccagggcaaccgcaccaccccctcctacgtcggcttcaccgactccgagaggctcatcggagatgctgccaagaaccaggtcgccatgaaccccatcaacaccgtctttggtaactacttattccctgctcctcagtcctctctctttctctctctccccccttagatctcatctctaaggtcttcgtcgtcgtcgtatgctagatctactcttgcccagctcgttcagatctgttagatttgtgtgggatgctctaattaattactaccaacttagtagatctggaactcttttgacttgcagatcttgctccactcctgttgcattttgaatctgtgttgatgtgatttaagttgttggcagtgctttttgcatactatttgaatttgtggatggttagcagtcagtacactaggatttattactggatctggacagatatgctcgtttcaatcggctcgatttgctatgttgatagctaacatgttgtgcttgtcctactgccctggcgcaaatttgatccatgcattcttttcgttaaatgatttgtcaagtagtaatgcttgtttgaaaatgatattattattattattattattttaaataaatatagcctgaaacattcttagtttcgaggagaagtgatgatgtcttatccataccacatgtctgcatctcatatgatgattaatctacatcatgcactaccatctgatctcctctagctcatacagcttttaacaagttaggcgatagatgtttgctacaaacagtcaactggatttgctttcttgaaagaaaaaaaatgaaccgtgtagtttgcaacctgtgatgtaaattaacccatttactgaactacattgattatttcagtaaaatcaccatctttcggctgaggttgcatgcttagttattatatttttaccaatgatgattttgttatgtagccagatactgtactttcttatgccatttggtatctgactcattgtctacttttgtgactatgtgtctcgaaatatggcatataataagggggaacggatcttgcgacattgatggctcctgtatgagcctccaattactatatagccgtttacatgttcttatcatgttacttttccaaattagtgctgcacatcttgtctgtttgcaagtttgggttcattcatattgctgggggcattttaatacatcttaactataatgtaaatttcttgtacatcgctaaaattttctgccttgattgagtagactcttagatgacatctatcttaccttatgcacttgattcgtatttctgttacaacattttgattacttgatgtagttcacacaagcatgacacatctctttgaaaaaaagatttcattttttaaagcaagcctaatgctttaaggtgggagaagtgatgatacttaatccatacaacatttctgcatctcagatgatgatcaatctacatcatgcactaccatctgatctccccatcatacaattttttattttgttttggtggattatataactttaacatttgataaagtgccaacagatttttatacacaatttcttatagatattaccatgacagcttgcagcctgtgatgcaaaagtacccattaaactgaattacactgattattccaaacaaatcaccatctttcggctgaggttgcttgcttgtttaaaattatgaatgcttcttgcacaaccatttagcactttcggtagtttgtaatgccatttggtatctgacacatggtctgcgcttgtgactatttgtcttgaaatatggcataaaacaagggggaacggatcttgcgacattggtggttcctctatgatcctccaattactatatagctgtttacaatttgttaagttaggagcataccttttgctttgtcatcaaagtcttggttcctttgtatttctagttcagattcatttttcttcagcttttgaaacataaactcagtatatttttactgtaattgctgacattgagtcttctctgcagatgccaagcgtctcattggcaggaggtttagcgatgcttctgttcagagtgacattaagctctggcccttcaaggtgattgctggacctggtgacnagcctatgattgttgtccagtacaagggtgaggagaagcagtttgctgcagaagagatctcctccatggtcctcatcaagatgcgtgagattgctgaggcctaccttggcaccaccatcaagaatgccgttgtcactgttcctgcctacttcaatgactcccagaggcaggccaccaaggatgctggagtgattgctggtctcaatgtcatgcgtatcatcaacgagccgactgctgcagctattgcctatggtcttgataagaaggccaccagcgttggtgagaagaatgtcctcatctttgaccttggaggtggtacctttgatgtcttccctcctaccattgagaagggtttttttagggtcaagcccccagttgttgccacccattttgttgtgaaatttttgccattggtatggtcaacccctttgtgcaagaattcaagaggaagaccaagaaggatatcnctggcaaccccaggctttcaggaagtttaggacagcttgtaaaaggcaaaaaggaccctgtcctccactgcccagccaccattgagatcgattccctgtatgagggcatcgacttctactcaaccatcacccgtgccaggtttgaggagctcaacatggatctcttcagaaagtgtatggagcctgtggagaagtgcctcagggatgctaagatggacaagagctctgttcatgatgttgtccttgttggtggctccactaggatcccgagggtgcagcagctcctgcaggatttcttcaacggcaaggagctttgcaagaacatcaacccagatgaggctgttgcttatggtgctgctgtccaggctgccatcttgagtggtgagggcaacgagaaggtccaggacctcctcctgttggatgttacccctctctctctcggtttggagactgctggtggtgtcatgaccgttttgatcccaaggaacaccaccattcccaccaagaaggagcaggtcttctccacctactccgacaaccagcctggtgtgctcatccaggtttatgagggtgagaggaccaggacacgtgacaacaacctgctggggaagtttgagctctctggaatccctcctgctcccaggggtgttccacagatcactgtttgcttcgacattgatgccaatggtatcctgaacgtgtctgctgaggacaagaccaccgggcagaagaacaagatcaccattaccaacgacaagggcaggcttagcaaggaggagattgagaagatggtccaggaggccgagaagtacaagtcagaggatgaggag

SEQ ID NO: 925 - DNA, 58408 bp, Oryza sativa
  unsure (1)..(58408): unsure at all n locations
aaaaatatgtgtcaaaaaagaggaaaaaatatgtacttagtatttgcaaggaaaaacatagatatatagcatcaaaaatgttgcatgtaaccacattatatctttttaattatatcattcccatctatataattatatgctaattattaacattatagattattccatcgtatattacccatgaacatgcataggtgaatcaaatatataataaaagaaaaaacaaaacaaaaaatatattaactcatatgttaacgaacgatggtgatagacgagcttagatataaccggaacaattcgcattcgcactgtcattatagtttaagggtgtaattcagactatttccttgtaaaaaaagtcacttccacataataaggattcatgatacaaatttaatcaatactaatttagtaaagtgcccgcgcatgtgcgcggaccatcttcctagttaaattagaaaaattgatgactatttagtggacatgcaagaaaaaaggggaaggatgaaaatcaatctcctcatcgttacaatgaactggagtatttgaattacaagaaataacaagatatcactactgtagatatgcacaaaaggaaccggcacgtatagtgcttttgtcctagacgcgcgtctgcggggtgccatcggctaggaccgacacctttgtggagagataggtgccggttctaaacaaaaactagcacatatagtcttaatgccggttttttcagaagaactaatatctatatataatatattataggtctctcctctctcggtctctctccgcctcctcccctctccctctcccccacgccgcagccggccagggagcaacgacgctttcgtcgcgccgccgccgtctccttccaaaattcggtcgatcctttccttctccggccgaattgattgaggggaaacaatctttgagatatcctctaccttttctcttttggaatcatcctctacttcggtttggaaatcgatggattcgagtttgtttcggattcgttcttcccgaagtttccttcgccgtcgccggccgccgtgggcctttgccgccgcctccgagcccctttaaaaggacccccggtgtctcctctacccgccgccaccctcgccttcgcctctcgtcgtcggaaacgccctagcgtcgtgcgaccttgcgccgccgtcgccgccgtcgctccagccgtcgccgtcgctcgggaagaccgtcgtcgtggtcgccaagtcgtcgccgtcctcgtccgccgcttcgccaccgtcggagaccgccggagcatcgtcgccgtcgtcaagccgaagaccgccgccgtttcaacctcgtcgccgtcgccgtccgttggtcgtccgccgtcgctttggtcgtcggtgagttcgccgtgccgtctgctacccgttggtgtcctccgttcgtgccgtagcgccgccgttcgccggtgagcgtgcgtcgtccgagccgccgagccgccgccgccggtggtgacgtcaccgctgacgtcatcggggccgttcgtcgtagtccggtcgtggaccgatcgatctcgaccgtccgttttggatcaagtcgatctcggacgtccgttcgcgtgaaccgccgccgtgcgcccagtccaccgcgaaaccctagcccgctgacgcaataaatctctttttccttttcaaaaataattcattattgcgtcataattcaattaaaatctatataagtgttttaatccgatttaatctttaaaaattcataactaattcatcttagctccgatttagttggttcaagtctctaaatttttctaaaattgagatctacatgttaaaaatatccacatgtactgttcatgcttgtttatgtgctgttttggtgattttgctcttttctgcttagattccgtcgtttccggagagtccgttttcgccggagaagagtttgaagagttccaaggccagcaaggcaagtcacacagatcccaaacaaccctttgagcatgttgatcccgtttaaagctattgtttctattcaactattgcatttatttttgaatgtcattgggtggaattaacctattgtttgttatagcccttttgttcttgtttaccttattccttgataccttgggttattataacttgactagttgagctttatttattggttcaactagatattggaaataattgcttagccatgcttagaaacatcagctcactattgggataacttatgactcactattatttaatgatggcttaatgatagttcatgatggtcaatcgtgatttgttaattaattatttgccaactaaaacctgataatggtgggttgtgagcacatggttttgatggtcgtgctcatgacaattaaggaccggttcacgagtttcggttgtgaaacattaaccgtgccaaccacaagccagcatgggcaacggctttatcttttgtatagcatggttcattgcggggcactagactgagaagtggcggagataagcccacgggggtcgctggggagtccatgccttgtttataagggggtgattatgatccaggaaggtgcgctgcagtggattgtgttatgcaaggggtattgtcacaactcctttccgaggtaccgtggtggtattgaggcacatggtgacatgatgtggggttgtgtcttgtgggtacagtggtacacctctgatcagagtaaaactattcgaatagccgtgcccgcggttatgggcgggtctaacaatgtctttcgtgattagtctcacccttctcatcataataaaaggtgctttaactggtaataatttgattagctcctggtttggaatggtatattcctggtttggagatagaactgtgcagtcggggtggttgttcagaatggttgggcctatgcaacagggtatgttgtatagtgttggtttaatattgtttaattatcacttaactgttttataattctcaaatgtttgctaaatgctgcttttgcaaatgaaaccctactatgccatcctttggtatccttgtgcacttgcatatttgctgcgtggcttgctgagtatgtcatatactcaccttgcaatcattcatcagaggaagagttctacaatgaggctgatggtgtggaggattaggtgtagccttggtcaagctgcctgtggagtggagccgtctgcgccgtttaatttatttttccgctgcttagatctttattgattgagaggaactatctacctctgtaatgacattttattcgcttattaattagagtaataattgtactctattatcaatttgttattgtgtgcctcggctgattcctggacgagggttcacacacatgtaagcgtttggaattttggatagaaattccgggcgtgacactttgcggggggcatcccacttgaaggcgcgcggcggcggctctccttctctccgtccctctccccccactggcagcgcacagccgcccctcctcctttccgccatcgcatccagcacctccacctccaggccagtggatccactgccacgagctcgggagcagcctgatctggcctccatgagctcgggggcggccaaatccgcacctccgttgctccctcgacttccaccttgccatgggctgctggtcactgcgagcttgaggccggatctgaccaccttgagctagagggcaaccagatctacgcggttgctaggaaaccaccacgacaatggtggaggcaccgatggccagatccatgcgccacgatgatgaaggcaaccaccaccagtgtcacggctccttccccatgctctggcaagaggatattttatggatttctttgttgattttattggttttctcctaatcttgcttgttgacattggttatcccttcgatgctgcaatggatagctaatgcttggatagtagatgatcatttgcgataaactttgtgattcactctgtgattttgatgttgaaaaaaaattgtgattgattgataacaatttaaggctcgaacgcgaggtttttgtgctactcgatgcatcggttgattcgagccgatacattgagctggtttttttttattcctgaaaccttaaaggtgttcttaccgagtgtcggttagaaaatctagcacccatcagtttttcagtagtagtgtgtgcagatagcattaatcatatatgagtatatcccagggtttcatttaccgcggtaaaccgcgcggttaccgcggttaccgcgcttaccgcgggggtacggtaaggggtaaaccgcggtaaccacgtcaaattcaaataaatttgaaaaataatttgaatttttgataaattttgtacggtttgtcgcggtttgtcacggttaccgcggttaccgtgcggtaaccgtgcttaccgccggggcgcggtaaccgcggccccggcggtaaatgaaaccctggtatatcctgcggaaggaacttctaattaaaagggctgcagcagtgtagcttcaaaaagtgaatttgccatgcaaggttatcctcatcatatcgatccatagggcaaaagcaattacaccagatcaatataatggtgtcgatcatctcatcaacagtagattccgcgtgcatcacacccacttgtccgcacacaagaagagaccagctaccaagcaatttgcagcggatgctaattcagctggcaagcaatccctccatctatatattggctgcagatgatcagatgatgcgctaaattaatcaatcatatactacacaatatgatatgatgggcctcctgagcttgctgctcgtcgtcgtgtcctgcctcgccgcgccggcgacggccgactggtacggcccgctcgccgtctactggggtcgccacaaggactacgagggctccctgagagaggcctgcgacaccggccgctacaacaccgtcatcatcaccttctacagcgtcttcggctacgtcaagggcaggtacggcctcgacatctccggccacccggtcgccgccgtcggcgccgacatcaagcactgccagtccaagggcgtccaggtcctcctctccatcggcggccagggcggcgggtactcgctcccgtcatcccagtcggccgccgacgtcgccgacaacctctggaacgcctacctcggcggccgccgcgccggcgtgccacggcccttcggcgacgcggcggtggacggcatcgacttcttcatcgaccagggcggcgccgaccactacgacgagcttgcccggcagctgcacggccgcggcgtggcgctgacggcgacggtgaggtgctcgtacccggacagccggctgcagaaggcgctggcgacggggctgttcgcgcggatccatgtccggatcttcggcgacaaccagtgcaccatgttgccgttggacgcgtgggagaagtgggcggcggcgtacccgcggtgcaaggtgtggctggcgctggtggcgtcgtgggagcaggacgaggtcgggtacatgttccaaaaggacctctactacggcgtgctgcagttcatcctcaacaagcccaactatggagggatcgccatctgggacaggtactacgacaagaaggccaattacagtggtgagggctaaatcatcgatcatactgtagctagtgtgtgtgtaatcaatcacaataaataaacatcccctctatatatgtgtacgtattgtacgtgtaatataatgatcgatacaagaaaaataaaaggatatcagatcattagaacgtgtgtatataaaaggtacatttttgtaccgacccctatgatgtttttcctatccaaaacgcacatccacgggacacctcggctagaaccggcacctttgtacaaagagataggtgtcggttttgattaaaaaccggcatctatagtatcagtgtcggctttttttttaagaaccgatatctatatttttattataggtgtcggttttataaaaaactgacactattcagaaaaccggcttgagccgaacccctatctctctctttttattagcccctctctctctccattatactctcatctcccttatcctctcttctctctgcctcctctcttctctttgctcctcccctctcttagctctctctcccgttccctctctctccactgcaccacccgacggcgacctagcggcggaagggaggtggtagcggcgccctcccctacggtccatccagctgtccagctgcggcggcggcggcccagcagcgggaggggagatggtgcggtgccctaccctatgctccatccggccgtccagcagctgcggcggcaccctcacctctgctagatctggcgggaaagggaggtagcggggccctcccctacgctccatccggcgtccaactgctgcggcggcggccggcccggcagcgggaacggagatggtggcagcgtcctcccctatgctccatcaggccgtccagcagttgcggcagcaccctcatctccgccagatctggagggaagggaggcggtggggccctcccctccgctagatctggcgggaagggaggcggcggtggcctggtgatgacggcttcccacggcaacgacagcggtggtggtggggggggcagcggcaccctcctcctctccatccgacggcaacggcaataatggagaaggcgcgtggggcgaggagacagttatgtgttcttgagtaatgttcttgatgtgttcttgatgaatgtgattttgatgtgttcttgatgaatgtgatgttgatgtattcttgatgaatgatgaacgatgttcttgaagtgctcgggtccggcttgattcgagccgagccggtttttctttttgggctcgttcatccttacagatgccggttctaaatcgacaacgaaaccggcacctatttgattttcacatcagtgccgccttcgtgctgctggttaaaaaaaccggcacctttgtggggttgtcaaccggcactcatctctatttccgtggtagtgtatttacaacaccatattagtttaattaaatatcacatgtcatatgttttgctattgtgtatatactggtattttttctataaactgacaaagttagaaaatatgaaacgaacggagtagctacttattggtgagaaaaaaaactacctacactcacaatgcatcccatacttacagcaaggatggatttattgtcgtcgtcaacatcatcgttgttgtcatgctttccaatctcataaaaagttttatttaaaaagaaaaactttgttctgaaccaaggtcataaacaaaaacgtggataggctcctatcctttcaagagtgtgaacacatcttaagatacattatgcgcgaatgcgcgggttaccattctagttgatactaaggatgacactaacctattagtactgatcaatagagatagaactattatctgtctcaaatatctaaacttgtataaaaattattgtctcaattatatatgtcacttatatatgtcgattcctgtctcctcaaatacgctcttgtatatgtgcgaaacctgtggtcggagtgttacccaacgacaatgacaatcaaagaacaagttgggcagcagtagataattattgtaagattgagattggcccggtttgtataactagaaaacatgcatgctaatcaccttgtttagaaaaaaaaggacacgctaattaagctagctagttatactatacctagctttatatagcaagcaagtaagaattattagcctagctagcgtgtggttgagttgggtttgaagtaatccaccgacgaggcgcgcgggccccggcgccggcccggccggagtagtagttatacaacagatcgatatagacatatatatagatcgagagtttgtttcaaattaaactttcagtggcacttttttttttcttttgcttggtgagtttcgtacgagttgccgcgagcacacgctacgtacgctagctaagagacatgatggtgataaatatatactccctccgtttcaaaatatttgacaccgttgactctttagtacgtgtttaaccattcgtcttgttaaaaaatttaagtaattatttattcttttcatatcatttgattcattgttaaatatactttcatgtacacatatagttttacatcttttctttgagtgtcatgtcgctcagtttgtttggagatgtgtgttttttcttttaatatccccccatcccgtaatgccaaaaacattttcggtaattggcttagagaggtatctaggtccattaagaagatgattctaattggagctagtgttgtatgttggtcaatttggcgttgtcgtaatgataaagtttttaatggtaaacaattatctaacccaatgcaggttatcttcatgtcttcctactggctccacttttggtctacaatgctaccacaggagaagcaggatactgtgtgcaatggtgctacactcttgaaatcggtagccaagggtctcttattccactatgggtggcgtagttccgtaagaattgctagctaaaatattttatgtggtttaacgctagtcaataataaaggggagttggggatttatcccatcaccttatttctcattttgatttacttttatcttacatttttattactattaaacttatggttgtgtgtcttatgacagaagccggagatgtaatccatttccattatctaaaaaaatatagttttacatatttcacaaatttttttaataagatgaacggtcaaatatgtgctataaaaagttaacggtgccaaatattttgaaatggagggagtattaaagtatatatatatatatatatatgcggtttgacaatggcacgtaagatggaattaatatatgctgatgcggatgtgcatggcgtatagacgtcaattgctggcctggccgtcaacaagacaaaagtcgacgtggattggtcaaaacttcgagacctatctacttcaaccggccgtacgacgcaactagtagtattatatttcggtcatcggctccatgcttctcgatcgtgtgataatttcttttgttggagctaattaacgagcatggaattatatttccgtgctataattatatttttgtatattttttagcatgcattactctttcttacaagaattatagtagctagtcgatctgactgctaaatggtacttgtgtttatatgttcttccgtgcataatcgatgaactaaaaataacgcttacgtattccgaactcctaagcagttcatcttatataaaaaatttctatatatgattttctaatttgcaagtaaatttatattatatgtcgatatcacaaatcattcatcaaccttttagaaaagaaaaacacgactcaaccattcaattatatatcgattgaattgttatatatggaaactatatagtcagattcgtagttaagggtaatttttttaattgcaattaaaaggtatctccaggattgtgaaatgcctgaccttttttctagagtaaaaggtgcacattattggttactcgcttcacttgaaaatattagtatttttagaaacacgtcataaaacgcgcacactcacctgtttatatcacactataaacatttttcttactgatttcaatacatgaaaatcctaacattttcaaaaatattataggtgctcggaggaggaagttaagcaattttaaatttggccatcaatatgatatatagctaaaaggaaatcgttttttactttagtatctttaatttgctaagcaatatagaaatgtttatattttgagacagcagcattagtaacttaatttgcattgatgatcacgttgtcttttctttttctctaccgtaagatctggttgacccgcagcaaatggcgccattgctccctcttatttttatgccctcgctctttgtttttttttttttacagtactttatggaaggttcgcggtaagatgcatatattattggtcgcataaagaaggcgtaggcgcgcgcgtggcctttgaatcatagccacccttagcatgtgcgactcgactcatcacaacatgatatagctagttctagctgtcatccatcttagctagctaacctgcgggtagttagcagccatggcgtcgatcgacgagaggtagacgacgacgatatccatatccatatgcatgcatggacaacgcatataccatggaatagatgggttcgaccaactttaatttgatggctaccttctgtttccattaacctttcatcattccattcgtgcacgcgcccgcatgtacatgttccgctgttttccatcgatccatcaacagcatgcatatgctgcagctgcaccctgtttcagttaattccaatcaccaatgcattgcatatattaatccagatcgaggcacacaagaacagactatagctacctatatctatcttgttatttctacctagaccttaattaactcgttccgttcatccatgatccatctatatatagacgtcacccgtgcctccattcttcacaccaaaaatcatccccaatcttacatcaactacctacttcctacgtagcccagtaactatacattattaaggctaaccagtaactaactaaggcacacgtacgcaatggtggcgctcggacgccgttcatggctggtcccgctggccatggtgctcgccgtctccagctgcctcgccggcccggcgatggccgccggaaagaccgggcagatgaccgtgttctggggccgtaacaagaacgagggaaccctcaaggagacctgcgacaccggcctctacaccaccgtcgtcatctccttctacagcgtgttcggccacggccgctactggggcgacctctccggccacgacctccgcgtcatcggcgccgacatcaagcactgccagtccaagaacatcttcgtcttcctctccatcggcggcgccggcaaggactactccctcccgacctccaagtccgccgccgacgtcgccgacaacatctggaacgcccacatggacggccgccgccccggcgtgttccgccccttcggcgacgccgccgtcgacggcatcgacttcttcatcgaccagggcgcgcccgaccactacgacgacctcgcccgcaacctttacgcctacaacaagatgtaccgcgcccggacgccggtgaggttgacggcgacggtgcgctgcgcgttcccggacccgaggatgaagaaggcgctggacaccaagctgttcgagcgcatccacgtccgcttctacgacgacgccacctgctcctacaaccacgcggggctcgccggcgtcatggcgcagtggaacaagtggacggcgaggtaccccggcagccacgtctacctgggcctcgcggcggcgaacgtgccggggaagaacgacaacgtgttcatcaagcagctctactacgatctgcttcccaatgtgcagaaggcgaagaactatggcggaatcatgctctgggacaggttctacgacaagcagaccggttacggcaaaaccgtcaagtactgggcttaattaattaacctactactactatttactgctactatgcgttaatttgtgcgtgtgtgtttgagaataaaatatgttggtgtgtgttggtttttttatgtaggtatatgaataaaacgagatccatatgtaacgatggagatctcgagttgtttgtttgttggtcatcaatcgaataaagtgtatgaacaatatatcagaaatggttattatgtaattttgtctcttgttaaccttcatttgcttgccgcattgctttcttgggatggaatgaatactgcatagagaaactctgttattggtctagttgaacaagctaactgaggagacagtggtttcgaagaaaagtgtgtgattcgttctaaacccaggctaatcctgctgttttagggtcttttatgtagtagtatctgttatcatttctggtcaaagtacgaaagtatcttttgaattttcagttttcttgtgcgtgtttccttgtcatttaacggctcaataacagcatagatgacgtgagtggaaaatcattctgaaagtgacggaaggatagtcaattttgtgacgcaaattaatcaacaaataatagtcttgtagtaggaataagtacgtgtagcagtgctctttgaaaaagtgtttgagcaccgaaaaccattccacagaggtttgtcgataccacaacaaccgagcggttatcgatgagaagtaatcaattttatcaaaattttgaatttagtgtggttttaattgaacttggccgatttgtcaattaatttacaaatacaaactgactcaataaagccaataactataactaagcagttatcgatgttttttttttgtaagtttagtggcattcacatcccatttatacattttgtctcagaaaattttagatattgcttggaaatttttgaacagttttttaattatttctttccttgggtaaaatggtatttagccctcgtgtatcacttggtacaaactctgcatccatagcattttttttacgcaaaggtgatgtacagtgattttatctcttcacatgataccaggcatgctctgtgttgctctgtttcatgtcaaaaaaactactgtcagcaatgttcacgagcgaagctgtataaattatcactcatagattttatttcttcacgtgatatgtgtgacatactaacatgttggtgtacgccaaagtttttgcaaggattaaacatctggaaacgcaaatttaacttggtgtatgaaaccacataacaaaagcagtgcagctgatccgaaatgaaacggatcgatcagagtcagagcatgcctttgatggtctgaccgtagcggctcctcctgtcgaagtgtcggttccagagcacgacgccgccgtagttgggcgtcccccgcaccagaggcagcgcgtcgaacaccagcgccgccgggttgatccacccgtcgctcgccgcgtcccacgccgccggcagcccgacgtggacgctcgcgttcgcgtacctcgccgtccaccccagccacgccccgtagaacggccgccgctccgacgagtcgtacgagcacctcctgtcgtcgtagaaccgcacgtggatccgcccgatcagacccgtcgccaccgccggcttgccgttcgttttcttgccgtccatgcaccgcaccgtcgccgtcagcagcacgccgccgtgttcgccgaggcgcttggccagctcgtcgtagttggccgaccccccgtggtcgatgtagaggtcgatgccgtcgaccacggcgtcgccgaaggggcggaacacgccatgtcggccgccgccgaggtaggcgtgccacaggtggtcggggacgtccttggccgacctgggcgtcgggagggagtactggtcgccgtcccccccgatgaagagaagcacggtgacgttcttggcgtgctggcagtgcttgatgtcggcgcccacgccggcgacggggtggccggagaggtcggcccagtagcgcccgtggccgaagacggtgaggaagaagatgatgacggtgttgtagatgccggtgtcgcaggcctcccggagagagccctcgtccttgttccggccccagaagacggtgagctcgccggtcttgtcgccggcgaccggcccggggccggcgaggatgaggagcactataacaacaaatgagagcggcaatgcacggcgccgttgtgacgacgacgccatttggaaattaatggaattagaattggatttggatttggttgatattctttgatctttcttattgttgtgaacgatttgtgaaaatctgtcgtgcatgtccatgctacttatagtgtgttaagtgagctactgtcgatcgatttttcagctcgattaattgttttcagtggtcgaattcccgtcttttaattctgtgtatcgatcgttatctgcgccgctgccatttttcattgactaaagacgaatgttgtgtgcgcctaactatacacaagttgcttgtaatgacaaaaccaaaggatggctccttatgaacaaatggactattttcagtgtagggcgcacctatagggacagaccctgattagattattcaatcttagctaaattatgcatgtgagctatatatgtatcagtcaatagttagattattagtatatattggaactcccataattatttttgcgtttgtcactactatgtatctctagtctattcttgtgtgccgaagtgtatatatactgttcatttgatgatatggccgtacgtgcgacgacatcgttgactgatcgacgaacgcaagtctttgagatctatatagctaaaagagagttgcattaatttgtcaaatgacccgaattctagatatacttgtatagtactagcacatgttatcagctgtctagcactggttagttttcagatgacgcacgttgatgcatgattgaggagatgcgtctttgacacggggagatagtttggtttgtgccggacctgtgtcttaagccctctcgaacacgtgaatggttaccattcatttcaaaattccctctctttttttctaatatactgtaaaaaaataaatttcttttaaaaaatagcattcttttttttaacaatctcggcgaattcccgttttaacaaagtagtcattacgttttatattacaaaagatgaaatttaagctaaatcgaaattgtattgtgcatatttatagattaatatatgaactgcaacaaaattttcattcattctcttttttctttgcgattacaaacaagacacgcgcacactctacacgcctgtgattatgctcccctagcacgtactcattgtgacggagattggcgatgggtataactttatcaccacgcatgctctctatgaagcaacgtgtgagtaatactccagtgggattcaaatccagtggatataactcaatcaccacatcacactgttttacagtaaagtacaaagttttgaatgagcattcggtttgatatcaaaattttgaatacaaactagacatggatatataggatagcagattctaatatcttgaggggatgttcccttgtgtatatttttcttttaaatttggtacaaataattatgaaaaattgtaaaaaaaaatattagttatgtagaatatagtgatatatatcggtccaccaaagttcaaatccaataaacatatcgaaaaaaaggacaaattcatatttgtgctactattctcacgttgaattttttacatatatatttggatgtgtgagttgggtttgggcctaagattttatagagttgtatagatacgttatatgaatattgtcatttatttttcagatttttataaccgttaaatggtttttaatcaaacgagaggacatccctcgagggatcaaaatagtttattcccggtatatagctagcccaagccccactctccaactcttgagaacaaatacaactactagcagatacgtagtgcatacttgaatttattgttcatgtaccttaattcaagcatacagcaccctgagagacactcacaaattacatacgcgcacacgtacacacgctacgcaaacaaattcaaagctggctccattattatacacaatcatgcatatactattgggaagaagaagttgatcgaattgaagctccgatgaagcagcaatggcggccggattgaatgtgagaatcgatcaaacgaagtccttgagcgccctgccgtagtagttatcgtaggctttgtcggcgcctcggtcccacagcatggcgccgccgtagttgctcgctgtctgcgccctctgcatcacggcgtagtagagcgactccgggtttatccagtccgccgccgtctcctccgccggaagccccacgtacacctggctcgccgggaaccgcgacgtccacgcgtcccagtcctcccagtcgaacaggctcctccgcccctcgccgtcggtcttgttcgtgcacgccgcgtcgccgtagaaccgcgggtggatgcgccgcaccagccccgtccccagcgccgccgccgcgttcgcgtccgggtacacgcacctcggcgtcgccgtcagcagcaccggcttgccgcggtagccggcgaggcgccnngacagccacgcgtagttcgccggcccgccgtggtcgatgtagaggtcgacgccgtcgagcacggcgtcgccgaaggggcggaacacgcccctgcggccgccgccgaggtaggcgtgccagaggtggtccgcgacgtccttggccgaattggcggtggggagcgagtactggtagccgtcgccgccgacggagaggaggacggggatgttcttggactggcagtgcttgacgtcggcgccgactcgggagacatcgtggccggagaggtcggtccagtagcggccgtggccgaagacgctgaagaaggagatgatgacggtggtgtagaggccggtgtcgcaggcctccttcagtgagccctccgtcttgttgcggccccagaagacggcgatctggccggtctttccggtggcggtggcgaggcacgggaggaagacgacgacggctactagcatcgtcgtcgtcaagagacatagctggtggcgcgccatggctgatatgatacgatggcttaattagtacgtgatgtgaaggcatcgccggcgacatgagtaggtatatataagccgccatggccatggccatgcagaagataagggccgggggagctgtggtcgtcgtcaatggcgtgccggtgccgcctgcagacaaatcctggcgcggccgccgcagaaatcgacgaccaaactacacatggagacggactgcaggttattgttttgttccgagacaagtcaaatttaagtcaacaacttgcaatcaggacgaaacgtgaggctggtttaatggtttttgtcatgacaacaatttgtcattctctgcatgaagaatttatacgcctggaagaagcatcacattgacggaatatattctttttcaagtctgacccatatacgaacatgcatgtgccagtagtagccttatatatacatataatcaaccaataatgcaatgcaactatggtaaacagcacagtgaaacatgctggattcttttatatttcaaaactaaattaacataatcatactactttcaagcctgacccatacgaacatgcatatgccagtagacgggtacagatagtaacagatgacgcaatgcaggttggtaaacaacacagtgaaccatgtagtataaacactggagtaacattgcaattagacaatgtctttgatggcacggccgaatccggtgatcttgtcgtagtagcgatcccagagcatgacgccgccgtagttggcatcgtcctgcaccgacgatagcacgctctcccgcagcgtctgcgggtccacgaacccgctcatctcctccatcgccggccaccccacctgcacccgcgccgccgggaacctcgacgtccacgtcctccacgcgccccagaacggccgcgtctcgaagtagttgtagtcgcacgagctctcgttgtagaaccgcacgtgcagccgctcgaacagcgacagcgtcttcatcgtctccacctcgtcgtcgaacagcgccagcgagcacgccggcgacgccgtcaggcgcactgccggcttctcgcgaccgaagctcctcaggcgcctggcgagctcgtcgtagtggccccaccggccgcggtcgacgtagacgtcgacgccgtcgagcacggcgtcgccgaacgggcgggacacgcccctgcggccgccgccgaggtaggcgtgccacaggtgttcggccacgtcctgcgccgacttggcggtgggcagcgagtactggtcgccggcgccgccgatggagaggaggacggtgacgttcttggccttttggcagtgcttgacgtcggcgccgacgccggcgagcgggtggccggcgaggtcggtccggtagcggccgtggccgaagacggtgaggaaggagatgacgacggtggtgtagaggccggtgtcgcaggtcgaacgcaatgagccctcgtccttgttccggccccagatgacggtgagctcgccggtcttgccggcagcggcggcgccattgatgatgaggagcacgagcaagctgcaatgcagagtagccaacagaggcggccggagttggagcttcgacatcttctcgatcgggccgatgatacaacacgcacacactaattcagttcattcagtacacaaattgaagtcagtgacagtcagtatatgtagctcactgatcactagctagacataccgtacgtatgtacggatcatgtcggcgccgtgtacaaattgaagtcagtcggtctcttcctgtgtgctgcagatagcacgggatgcagtagtgctggtgcatgcatgtatacaagtgaatgcagagaaaaaaagattgatgagctggctagatcgagaacgaaataatcagctgcaactttggtcataatctgggtggcatgcaattaagtcgtgtgctgtacataggaaatatgcatggagtatcaaaggtggataaaaataaaaaccaaatacacagtttacgtgtaaattgcaatacgaatcttttaaacctaattacgccataatttgtcaatgtggtgctacagtaaacatttgctaataacggattaattaggcttaataaattcgtcttgcagtttcatgacggaatctgtaatttgttttattattagactacgtttaatatttaaatgtgtgttcgtatccgatgtgacatgtagacctaacgaaatctataatttgttttattattagactacgtttaatatttaaatgtgtgttcgtatccgatttgacatatagagacaaaaaattttgctaaaaacaagtcctaaatattccattcaaatgagtccaatctttggttgcttggttcttgttcatctgcttgatttgaggcaggggcggtaccttgaccaaacaaaatcctactactgactaaaacttcaattcgtgcttgcgtgcgtgtttctgagtcatcagtgcgcgcgaggaagggaagcttatcacaaatactaacttggtagaaaaaaaaagtttattaagtagtgcatccacattgtcataggctaaacattgtatctgttttattgattcctaaatattttttgtactaaatggctgtaagttttttttcgctgtagtatactgcaagacagtacggtactatagcacacagcacataaaccactgtatattgagtgtatctaaacgaagagatcaagcagctgcagggaggaactggcccgaattctggcatgacgatctgcttatggcccagatcaatatttctaggccgatgcctcctcatgtggccacctagggcctggcccatctgaaagccaaacccacacacctcgcacgcgtggattagaggcttggacgggccgggccgccgcttgtggtagtgggccgaaggtgactggtccggtggccgccgagcgcctggtgcgacgggaaccgccgcccgcacgtccggcactcgaacgccgccgccgccgcctcctcgtcccgccggcgacgccgtggctccgcgtcctcctcatcgccggacgatgacatcgccgtcgtcgagccgcacgccagcgacagcgagagctgcacgtcgagctccgcgagctggctaagttggttatcgtcttcttcttcctcgagctcaagctgcagatcactagtgtagtcctcctgctggtccatggcggtgacgacgacgaagacgtcgctatctctcgcgaacgcaaaggttacacttacacttacacttcactagcttgggttaattaacaaaagattagattcaggtgaagcggccaagccatcatagcatatatttatagagagatctatcgatggatcgaatatataataatgcatgtgcagtgttaatcagtgtgtgacatgcatatatgcaagggtgtcacgcaagaaactactcgtaagagatagagatggaatatgttccatttcggtttgatttacacgtaggtacgagaatcatgcaagccgcgtgtaccactagatctattaatttcagtgtaattaattactagcagcgtcgtcaagtcctcagtccatgcttgtacttaaattaggatatctggatttggataactccggtcctaattaacttagtgagcaagtttgtggtaactactcctatagcagagaaattaatgcggaagtacttccattaagtcatccatcacaacacaactgcatgctaattaacatggctgtagttattagtagttggtaatctcctttaattcgcactccatagcttagagatttcgaacctactatgtcaaaatattagtaataccaaaacctagctaagttttgataatgctaactttttagttatgtgtcttgttgacatactttgatagtaaaccaaacactagcaatgttactatttgaagtgccaataattcaataggtaatattttggcttcaaaccaaaatggtcattcaagctatctttgcctgggagaagcatgcatcaaaatgttgatgatatcgtagatacatggctccatccacccaagccaagttgaaattaaatctaattttcacaaatattacatgcacatggatgtgcttttaataggattttagtgacattaaagatttaccgttggttttgtactcactagctagttagtgtgcgtatactaagcgtgcgtatctcccgtgtaataaattttttttattgcatgcttgtttaatttatagatgtgttgcaaataattagttaagaaatatatgtggtatgaaaagaacatgggactaattaatggcatgaatcaagacattagtttggaataagacaaggaattattagctactctttagtgctataggaaccttgctgtgctagcttatgactaaagttgtgggtacgtaggtcaagctagtctcctgaaaacaaactatacttattaagccatcactcatgcaggaccgctcgttacgtgttgtagatgagattcagatccatatcttagattgttcctgcagtgggatgccaaccaaaaaacgatgggccaatcgatcgaatcaaaattaatattaattaagaaaattatctgttaggaagttgcttcgaaattgcatggtgatctatcgaattcgttgatatttctttttgttttttgaagactattcagccattcattcattaatagtatagcagtacacaactagctagtgcccagtgacacaaaaaaaactgacctgtcaacaacaagcaaatttcatggaaattctgcagcatatatgctgtactccggtagcttccatcgtccatcgtttaattagttgcttaattagatttccaccaatcaaacaactgcgatgcgtcgtcgatcgcatgcatatgcgttaattaattagctcatatgttgatcgacgacgacaagctgatcagtagtaccatatactgctagctacttggcattgtactgtactagcaacgaacgtaatctacattgaccttgtcgcattattttaactatactctctccattttatattacttatcattttagcttaatttatcctatataaaactttcatatctctgataatcaaatttagacattcataaagtttaaaattatgagtgttatattttggattcattatagtaagaaatactttcataatacatcattggtatatatattgttaaattatagaaaattttaaaaattaatggtcaatataaaaatgtttaaattaaaaaataaaacaataaataattttgaacagatggagtacttaattagtttaggatagctactagctgcttagcttgtagtataagatgtgatatgcatatattagcgtattaattagtcacagtttagatttcaacttttgccttcaaacttctaacttttccgtcacatcgaactttcctacacatacaaacttctaacttttccgtcacatcgtttcaattttttcaaacttttaattttggcgtggaactaaacacatccttagtgcgacagtacattaccgtgttatatagcaagcacgtcgatcggtcgcgtacgcgtacatagttcaaattgaaggatgcatatatataaacaaatggacaattctgtattttctcttgactagaaaaaatgcccgtgtgttacaacgggtaaagtctattttaatcttattattgttatatggtttagttaagatgaaattcattatgggagtgcgcttggatatatatttttaaaaaatcatgagctgtagttaggagtgcgatcgtctcaagttagcatgcgagttttttttaaacagatttcttatatgattccttctgtattaccaaaagtgaacgattttaaaaaccgactcaaatacggatatatattttcataagcaaacgaacttaaaaaccgactcatacacggatgacgtaccaaaataccgacaaaaacatcttcaatttttataatagtagagaagaaatatagattaaaaccaaaacataaaattaaaaccgacttaaacatggacgacgaactgcggatatgataacaaatatcatgacgatcatgtcatggaaaccaccaataatcacataacaaaatctgtaacgaaaacaaccattttcaagagcaatatatatatagtggttgaacttgaaacatgttccattgaacgaatacaattaaaatcacgtgtatttaatcattgaaaaaatataattgaacattacaaaatcaaagacgaacttaattggtattgtatcttgtggcgtatacgtgtatatatatctagctataagcatgttgcgtgtttgtataccactccagaacaaacttaattattattgacattaatcactggttttattcaattcatatattgatttgtccattagccactcacaaaaagtggatgaaattataattgtgcacgtcgtcgtcgtcgtcgtcgtcacgctcttccgacgaggagccggacattgtcgccgccgccgccgccgccgccgtccacgtcgtggacattgtgccattacgactcaccagcggccggtggcggcgcatgtggccgccgagcgcctggccggtggcgaacaccttgccgcacatgtcgcaccggtgcactaccggcgtcgaggcgccgccggcgccgagcttgccggggcgcgcgccgaggaggaggtcaaggccgtcggcgcgcacccgcggccgcttgtggctggtccggtggccgccgagagcctggaacgtggagaaccgccgcccgcatgtccggcactggaacgcgccgccgtcgaggtgcacccgcttcacgccgccgccgcccttggcgatcaccttgctcgccggcgacagtgtcagcaccagcattagcttcaccggcgatcgtgtcgccgtattggtggccacttccatcgtcggtaaactaatgagcttaaagcttaattatatatattaattaacaccttaattgctgcatgcaaaattaaagtgttaatagcaaaccagctaccgaatgttctaatgtcaagagatgggatggtatatatagatcgagaggttggccggggacgttgaccggaagtcaacgtcgagctcgaggcagtacacatgtgtgaagttgccttgtgtttcatggaattttagttggagcgtgtaaacgcgcgcgaacgtatgcttgtgacgacacaatcttacgcactagtgtgcgcgaggatgagatcgatgccttcagctcgcatcctaccgtccgctctgccttgagattcgtgcggtagtttctgggaagctacgtgcacatggattcttgcacacggaaatattatcttgtggatagctagtatgcaatgccgtgtttacgaagaccgaattcccttgggtttgcatatgtgtggatacgatgttgtcattgcaaatgggaacaagaacttaagcgtgtgttgcatcttcaatttccttgttcgttggtgaagtgacatgtgccacatgcatcttctatcttccatagttgaaaagtattaatttgtactactcaatatccactatccaaaaaaaaaacaaatattaatgacctagacttaacatcgaatcatctttactggattggatattgatcaaagaaacgggctaaccaattgactcagaatgagagtcagacttaatatgtttaacaaataattaacagaaattggatagcaaaaacgctgaactaaaactctatttctttgcttctagccgtgttgtctcctagaaggaggaaattaaccatgtaagatgttctattggccattaactcgtgtgtcacatgataactattttaaacaatccatgttatcatcttgatgtttactagttcaaaattataaaattattaaatcatggaaaatatcataattgagatttcaggacaacttggtatttagtattacttttaaatgataagatactagttaaaaactgaatctgcagactaattacaactaaacttaagcgtgttggatattcaaaatgttcatcttttcttgtttgttggtgaagtggcattcatatctttctctggtaggagagtgttagtttgtacttaatatcaattaatgaccaagacttaattaagatttagtaatgcatcttgttcggttggttggatatggaccagagtaacttgtgtactggctaaaaccaatggtgagactgagactttgtttatcaaatcagagaaagtgtatgacaaaaatacttaacttgaacactgttttgataatatataaaaaggcaaacagtgagctaaatttgcttccagccgtgttgtctcccacagggaggaaacttacttagatttggtccatgttgatttacatattcaatcttgcgaaggaactcatcaattgtttatggaagtgatacacaaatacgctgtcaatctatgtagtctgcaattaatgattattggtttcgggtacaggtacccctttgttgaaatttaaaaattgcctgatattttagaagtaacttatgggcaattgggcattttcacaacagaacaatacaatgactttgttctaaagtcaccagtcaaaattaaatacggaacaaacctgtggcttttgcctatccaagtggttgaatgcactagtgaatttagtttgccgtttggtagctacaaaactgatcaaagccaagttgagcattcaaatacatttggatgcaattaattaattaggctagtatattaattgttaggagtcgatcctattcctatgcttccaaaagagccaaagaagatagttgaaaaagtaagggttaattggatttatgccactgcaaatatgacaaattaaaaatatgccactactattcacgctatctgctggatgccactgtaaatttctaaaattgaaaccatgccactccgtcactctttccatcctccccgtcaatctttccgtcatccccatcctctctccggcatgttcaccacgttgacccgctccttcatcttgccgacggccatgagctcgaggaggaagtcgaggaagtcgctgtcgtggccgtccgggtgcacggcgtaggcggtgacgaacatggggtcacggccggcggcgatggcgaggggacgctctcccatgaccaccgctccgtccggtgtgctacgtcgtcaccaaggcggccgtggtgttcggcgcggcgcctgacgaggccgggctggggctgcaggccatgttcctcatgtcgctcgcgctcgccgacacgcacatcgccatggcctaccgcgccagctgccgtgaacgatgccgcctgctcgtctacagaatcaacgtcgaagctataagtgattgattcccttatttgctcgtatcgtatctaaaccctggattttgcttagtggtagcttgttgtcgaaacaagatttcggcaatactaaaatgggtggctatcaagctagaaaagtcgatgggtttggaaacaaggaattttatataggttcaggctttcttaatcaagaagtaataccctacttgtagtgtggattggaaacatattgaacccaaaatatgcaagctttccagattctaatccgtgttttcgagagattctggagaacaatcgaggcatacgcttgccaaccttttactggacatgacaacggccggaagaacccgacgtcccctcacgcgaggaaagcaatggtggagcggtggccggcggacgagggcgggaggaggcaccgccgcttcttcttgccgccgccggctgcggcgcagggtgtggagaaggtgaccgcggagttcgcgcgctcgatgcggagctcggcgacgaggtgcaggtcgcgacgtacctacggtcggcgaggtggccgagcaccgcgtcggcggcagcgtcatccggggcggtggagaggaggagaacggggagaagatggggaagacggaaagattgacgggagagtaacgggagtggcatggattcaattttaaaaatttcggtggcatccagcagataacgtgaatagtagtggtatatttttgatttaccatatttgcagtggcatggatccaattaacccaaaaagtaaatggttatccagaggaaaagtacttcaggtaattgatgagagtaagaccaggcagctagttaattgtagactcaattgcagaagttacagagaaatacattcagaaatagctgtagatgtggtaaaatatacggccagtggtagtcaacgagcgtacgcagtcgtatgtatgtataattgcaacgaattgaaacaatcaatcatgtgaacaccaggtagaaagagacgtcaaattataggttaaatcgaccttgcattagatatttacaatgagagatctttacagtggagtatgctggaaaactgcgtgaatgatgctgttaaattgttagtactgaattaactccaattgggccgtcttggcgataaatttctaatgggctttttattcgtcggctgcttgatcaaacacagactggctgaaaagggaaaagtacacgcaaggtccctcaacttgtcatcgagatacaaaatcgtccctaaaccgcaaaaccggacatgcggcatcccccaacttacaaaaccggtcataaaagatccctcggcggttttcaccccggttttgccccacgtggcggttgactcagcgtgggacccacgtgggccccacatgtcatggagaccacgtcagcctcctctctctcttctctttcccttcctctcccttcctcatctctctctctcacttatctgtaaagctagccggggcgagcaggagaggaggagggcggcgccacgacggcgacggcggcggcggcggccatagtggggaagcacggcggaggcgcggggagcccggaaccctgccgacgacggcgagcccgtagcccttgagcccgacaaactttgctacctaggcgccgatgccgtactcgcgggagtcgacagcgaggccgagctcgacgttggcctggacggtgtcgtggccgtcgtccaggaggttgtaggcgcagtggccgtgcgaccaggggagcaaggtgtcggcggcgacgacgcgggagcaggggagcaaggcggcggcgatgggcgcggccttgacctcgccacggtgcgcagcctcaacggcgtccgcgtggccgacgagatcctgcggcttgtccctgacgctggcacgttccacaccacgctgcggtgcgtgaaggaatcgacaagctgctcagaggattcgacggcgccgtgccgtcgcatcatccgtcgtcgtcttgtagccagcaaggagctgcggcggcagcggcagcgggagcgggaggacatcttncgctcggncgcctcgacgccgaggatctccaggcggcgcggtcgacggggaaggagcggcggagaggatatcgaccggnctgctccccacccgacgaacgcgagcgcgagcgtgaggttcgtgctgggtggtgacgcggcggtggagacacgggacagcaagctcggcggcggcaggcgagcgcggctgcggatggggagcggcggcgccgacgactccgcgccgctcggcctcatcgtcgtcggcggctccgggcgcgggcggaggtctcctctgataggcgatggcggccacggtcaccgcgccactgtacgcggcgggggcgtcgcaccgcctgcttctcgtcgctcgtccaccatcaccgaccgcacgagggggacgaggaggccggcgagctcgcgccgccctgagcccgcgcgccgccaccgaggagccgccgtcgccggctgcaccaccctccggccgcgcgcgccgccgcctgtgcgagagcagagagcgagaggaaggaaggagagagagagaggagaaaaagagagagggtgctgatgtggtctccatgacctgtggggtccacgtgggtcccacgctgagtcagccgccacgtgggacaaaacaggggtcaaaaccgccgagggaacttttgtgaccggttttgtaagttgggggacaccggatatccggttttgcggttcggggacgattttgtatctcgctaacaagttgagggaccttgcgtgtacttttcctggctgaaaaaaacggaagtattgaggaagataggcccaacaagaggaaggcctaatatagaagcagcccaagagcccggattcttctggtcgggtgaccaacgcaatacatggcattttctttttccagatagaatgaaatggaacggtgaatggtatgatttaaaaaacttattgttacaatacttcttataaaacccatttaaaaatttatttatggacttgtagcagttaatttattgtcttcactcctaaataattatcgcaaaatcactcagggtttcagccaatttttcgggaaaagtatacattgtggtacgtgtagttgatctcaaactaaaaccacacaaagtgatcgaattcgtgcagatgaggcccatccatttgtgcgcatggcaacatacatactccatatatttgctgcttgatatgatcgatatcgacttatctgaacgtcaagatcgatcgtgccccatgaatgacggatcgatcgatcaatttattattgtttcttgtctccatcatatataatcctcttctgttcatcaaagcctttttgatacacaacaaggtgacaaggataaaacggacgcacacagcatatatatccatctgaaaccacgcttatacgtgccacaagaatccacagaatacggaataaatatttccttcttgtcgaatagttccatgtatatccagaagataaaattaaaaattgaggaaatagatatccaaattaaattgtcaataaacatgaagcttaattaataagggtcagtttgttttttttgggggaggggtagaagagattaggagttatatggagggctaggcatatagcagttttggtgggatagagattgagagaacttcctacttttcaatatctggagggaactgctcctttacgttgcctaaacaatacttagccctctcttttctaagcaaaacttaatctctatctaaagtctgtgtcgattcccaccatctttacaaataaaagattaaaaaatcaaattcccaaacatcaccatcaattctctcgtctaaactcttaatattcttactcgtcttgccaaacttagtgctattatagatgattagtatatatttcccctctttcgtatcatatgtccctttggtttgccctaaagcgaacctttttaatttttttatcaaaattataaaataataaggcaacattttaaaacaaaaataaatatattacaaaatatgatcgatagtggattttatgaaactaatttggtgttgtaaatgttgttatatttttttataaactttgtaaggttttatgcccatagcttctcggaaagaagaagagtcattgtcgttacaacaaacataatatgaaacagagggagttgaatgatttcacttcacaaattttgcctgtggcaggtatccaccaatttattcctgtccacttcaagtctcaaacttgaagcttaaattttgtcaagtcatctggattctgtgatctacagaaccttttatatactcagaagtgtaggttggaatatgaatgtacatctctttgtattttcctcacttttacccctatttactatgaactttatattgtgttggtggtcattagtttgtgcatccttttttgttttgtgctctttgttaagagaatgttttgtgctctccgagaggtttggttatgctttttgttagacgaatattgtaataaatgaccgtaggatttattccatcgtccaaaaaaattctaatgtttttactgagaactcatgcaactataaatttagtgcacaacgtgtagtgtgaaccacggctcttggttggtgcaagtcacggtgtgaacccttttttctccttcacaaacttggataatggcaatgatcagctaatggtgaccccaattttgttcaataatagtatattcttttgtgacagagacccaattgtttgtcatgtaatttgagtccacatcatcacagtaccctactcttatactcctctatacaaatacaactacaatattcatctatacttttatatgtcatggttgttaacccaaatctcttgtaatgcaaatataacaacgagacaaaaaaagaaaatcacaattttatagtcaactagtaccaaataagccaaaaattacccttatcgtaaagacacatctacatcgtcaaattaagcgaatgacatttcttatcttaattaaatcattctacataaaatcctcgatccgactcaaattattccccatttagacaagatcgtctaagataacctccatttcttcacagaatacactcaaacgtacctccatacatatttgtatacacatacaaattgattatacacaagttcctatagaagatacatataacatgatactactacatctacaaataaagatagagggggagaaagagaaagaactccatcttccatagttccatccaacatccaggcagaggcagagccatccttggcttcccaaaaactctcttttttctcttctcccttcctttgttgcttctcctcctcctccatcgtctcctcttcaccttgcgtcctccccatccaaagctcacaacttgacgacacacgcacacgcgctcccatgtcctgtagcctcctctccatgtcaagccacgccgccccctcgccgtcgcagccgtgagacatccctccgcgccgcggcgagacttcccctgtgtccatgttcgccgctggttcttgattcgttcaggtctcgtgacaaacttgcttctcctcctgatttaatttgtccggtgcgggaagggaagcctccctctgcagcatggcgccgttgcgcggggccaagcgccggaggaaggcggcggcggagaagaaggctgcaatggcggcggccgctgcggcgggtggcgcgcccggagcaggcggcggcgactggtgggacggcttctgcatgcggatgtcaggtgcgtgcatctctctgagtctgtctgtctgtctgcgacgacggcggcggcggtggtggtgccccccgtacgtctcggtgagatttgtgcagattgcgtggcacgtcggtggctgctctggtgccgattttttttttagatctaatttgcatcgggttcgaattcttggagagctgaagtaatcttgtgctttatcgatcatatcaaggagcagttataaacttgttataaatggtggtactgcaataccactgtctgtctggtgatgctgcattctgatggatggacagccactttagtcttaggatttgtttaggacacctgctgctgttgctgcattatatcagttccgaatcgtagagaattttgagctatcaattcagatcaatcgattattctgattactatcagcaagttgatatgctcgtgcagttatcatgtctagcaaatcgagtatggtttcagagcaaatgcaggctgcagacaccatgaaattgaaagataattgcttgtttaattactgatgctagtcattgcttcttctgtatgttcccattttccaagctaaatgtgagagaataattcctgtcacagtagatgtgttctgcacttctgtattggctatatggaaagctcctgatcagtccataaaaaggcgagatgtactatagctactcttcctctaagtatgccgtgctagtcagtggcgaagccaggatttagagatggggggtgccatttacgagacgtggtaactcacttaaggttaagtgaacagtgatattgtagcgttgatgtatgatcactaactcgacatcatacatgttatagcgattagctagaagagagaatgagaacccatagatcataatttgccaatttaaacagtttgttccatgattttaattggagtcttgtaatcatttttaaaatgataaatcagttaactaagtcatttcataagtcctatatatagctaggcagttatcctatatagctaagctcatctgcaactaatgatgtaattaatggctagattataagggctaattatccttgggagaagagatgggaggggaggtcacataggggttaggggggtgttggccctccctggcccctacggtggcttcgccactggtgctagttgcagatcatgaagttatacatgtgatccaaccatatgcagcaccaaagcaactgttgttctaaacaatagccagaattggtttcgaactctttctagatggtaggggagttacatttttttttggaggaccaaattactgcagggatagcccccacagtattgtggtaccattttcttccaagttgcaaagtttctttagtcctgatttggtggtttagtaatatcacattgagagaagcacatcttccgcaaaagggtagtattgatttttctgactatcttcagacttcagcgaagggagatggattctaagttattacatatatctaaacgcaagcaaccaaaagacttaggaacttacatatactattattcaatgattgagctttctgctagttgtatttgttcaattaactgcaaacaagtttgtaaaatagcttgatgtttatccaaatcgcaacatatactgaccattttttatttccttttcaggaaccttgtctggtatacaggatgcacaaagatttgagtttatcttcaaaatgccaaggagaaccttcaactacatctgtggtttggtgagagatgaaatgatggtgaggtctagcagctatacctttcttgatgggaaggtgctgtctttagaagatcgggtggcggtggctctgataaggttgaattctggcggatcactagtgactgtaggatctgctgttggtgtaaaccactcaaccgtgtcactgattacttggaggtttgttgaggctatggaggagcgagcaagccaccatttgcggtggccagattccagtgaagtggagaagatcaaatccatgtttgagaagatacatggtttgccaaactgctgcggtgttgtagacacaacacatatcacaatgtgcctttcttcagctgagccaaactgtaaggtctggctagaccatgagaaaaattacagcatggtcttgcaagctgttatcagtccagatatgaggttcatggacattgtgacagggtggcctggtagcatgaaagagtcgagcattttgcatagctctggtcttttcaagatgtgcgagaaaggagcacggcttaacggcagcaagatggtagtgtctgatgggtcagaaattggtgaatacataattggtgatgcaggatacccccttcttccctggcttctcacaccgtaccaagaaaaggacctctcagattctaagctggagttcaataagagacacgcagcggccataacagttgctccaagtacattggcgaacttcaaggacacatggaaattcctgcatggcgagatgtggcgccccgacaagcacaggctgcctcggataatccatgtgtgctgcatgctgcacaacataatcatatgccttcaggatgcaaccatcgacgaggcagccatgtcgaacgatcacgacgcgaattacaagcagcaggtgtgccagttagcagatgagaatgctgtgagggtgagggacaaactgtctgagcacttggtcagcaggtgaggacaagagaagaaagagggtgtggatgtcccgaagaaactgaaccttcttagtctgctgcagcctgcagctgagtcttttagctgtgagtttcagttttgatgagtttgtttatttcttttaggggagaaaggggtagtgctaaactgctaattagtcagtcagttgtgacaaatgaaaacccaactgtaaccgtagagctctccagctcgcccctgtgatgtgaattacatttgattactttggttctgaatgaaaaatatcatacagatcaaagctaaagttgaactgcggaaactatctatgaaatcattggcatgattaatatttgtgatgaacaattagctttgcaaatgatttaatcaatgaatttgtttgagaatatgtgtgcatgttggtgtgagtgcgtgtgactaatgtgggtcaggttgtgatatttgtgcccaaaaacggttgttttgcctgattatatgtaggtaacttgaggtcagccttggtcaatggtgaggaccaagactatgctcatggaggagcaaaggtctagtgtggtcgggatatcatgtgaaaaagtgactagtcaggattcttagagattaattttggtcaacggtagggatcgagactagacttagggaggagttgaggtctagacggtcaaggatgctgggtgacgaagttggatacgagatggcacacgttggatggacacactgtgtgaaagagatattcgcaacaggcttcacgaggtgtgcgtgcaagcgtcgatgttcacgaagaaaattggttaaagaaaattgagcaagaggatatggtgctacagtccatgtgacactgtagcggcatgtatggatggcatcgatgcatgcatgtgtgtgttggctgtttgggaggcaagcagcatgcagcggctcggcaggcagagtcgggtcggttggctgcaggccgagtcggcaaggtggcagtccgactcggttggcgtttggtgtggctgcaggtttcggagagtttgagagaattacaaatttggtacgttgtaatttgatttggtaatcgacggatagagtcatagtgaaactagggggtcctattcctattttgagtaggagattttcaatataaataaagagggatggtatgtcttgagggtaagcaagtttgagaggttagacagggtttcatgagaaacttacgagaagtgttgtggctgcaccttgtgaacaatatacttgagaaatatagatcatattcaatcattaaggcatcgacgatctcttctagcttcgtaagttttatgtttatgtttggttttggcgttagcttgtgaatgttagttttgctacgattttgttaaagttaatccatccaaaacctttttaatacttcatagatcagatctggaaagtttcgttagttggttcttgctagattcgaattttgcttaagttttaggttttgtttagttttgctgaaattctgagacagctgactttcgatggtgttttctcttaaaccgtccggtggagttgttacttggtttgtctagtttattatatcaagtttgcaactcgatctaacggttggtttaagagaaatcgtgtttttacataagcattgtcgtgttgtttttaggctgacagtcagactgcgagaatacatgcggtcagaccggctaggcttcagtcaaaccgatcctagaaggtcggatagacaaccaaacgtgtgtgtgttttgatcaatcaagttttgattatttgacttccgctggcgtaatctaccattcaccctcctttctgctagatttggttacttgtgttcgattctgcactatccttttgcctcattcgggagtaaatttgttcatttccattgtaatcggtaaagaaacagaaattggaaaataccatcagaaacacctacgcgtgtatgtatgtatggaggcaattaaacttggtgtggttagtattagtgttgatttgttcccttttaagaaaaaaaaatccttcataatattattatgagtttgctgaatcttataaacaaaatttagtaatcaaagttactccatatgtggatacggtttcaagggaagagcgcttgaagaagacgtactccgattccttataagtttcatgaaaaagggccatagatgatggatcaagacccaacggggaggtaatccggccatggatcaagccgaccgccgtcgccgccgccgccaccaggagcttgaacatgcggcggctgatgatgattacggtggtgcctcctcttatcacctcccgctgccctccggattcaaggtacatttatcttgtcattttttatttttaaaattttttcataactctttagttgacatacaataaatggtttaaatttttcacaactattttttataattatttagatgccatgcatctatttgagtatttgagttttgtttgttacttgtacaagttaaatttgtacttgtatgcttgtgaagtgatatattatatattgatctatcttatcaatttttttgaaaattttttataactttagttgacatgcaataaacgggtagatatccactcgagttattagaatccatcttatcttatacaattgatcaaaccaataatccacttcgttgtgtgactgtgatatagtatgctttgctgttgcttatacagattccccgtttgcctactactgcctgcgccttgatgaggaggaagaagacgcacagaacgaagctctcgttggagaagctcagactaccgtccttgctatataggagtatattcattggtaaagtgagctgatagaatgttaatcgacacagctgttttgtatgtaggacctgctatgcaaagtggtatcacaactcacattaaaagaagcagggaagacaagcatactttcttctcggtggaaagatcgatggacatatcattctaatctctgttttgatcactccgagtttccaagatacaccgcagacagatttatcaactatgttaaccatgtgttgcagcagcacagcttcttggcggtggacaggttcgagatcaggtttccactccagaaacagcagacaaaacatgtggatagctgggttgcttttgcctctgcatcaagagcaaaacattttgtgcttgatttgagcccagctgtgcacaccaatcaccaaagtgaagagcacatgtatgtatttccagttgatcttctcgatggtcaaaatggctctcctatcatatctctccggctcggccttgtgtgcttaaagcttccttctgattttcttgcatagtttggggcatttttccctggtaattaggaaggttgtaactgctatagccaatcatagcctctgtttgtactaactattttcaattaacaccctgttctaaaagtacgatttctccaaaattcgtagtacatcagcattgtttagacaacttgttcaaagctacagtgtttgttaagtttataatatataatagttgatttatccagcgttcttaagcatttctcaactaatttaaacggccaagtggttcttgattcaattgtataaggcagttgtacatgatgtgtcaggcaggttgcatttcagagcatgcttttgctgctattgaactacctctttcatttctatcttaaatatacgtagtcagtaagaattcatcacatcaaggagctaagctagccaagtagtagccatggctctggccttcgccgtgctcgccaccttcgccgcggcggcgacgccgaccaccaccaccaacctcaccctccacaacctctgcacccaccctgtctggccgctcgtcaccgccaacgccggcctccccgccatcgccgacgccgccggcgcggccacccgcctcgacggcaacggcgacggcctcgccaccctcgcgttcccgccgggggcgtggtccgggcgcgtggtggcgcgcaccggctgcagaggcaacggcagcagcaggtgcgacacgggcgacgcgccgccggtgacggtggcgcaggtgagcgtgcacggggcgggcgggctggcggagtacagcgtgagcctggtggacgggttcaacgtggcggtggtggtgacgccgcacgggttcgagcaggggcggctgtgcccgtcgctcgggtgcgccgtggacctcgccgcggactgccccggcgacgggggcaggggggggtgcatggcggcggggcaggcggaggcgttcaaggcgaggtgcccggacacgaggacgacgccgacggacgtggaggtgacgccgcagcggtgcatccagccagccgagctcaaggtcgtcttctgcccgccggacaacacctcctccactcactgactgattcattgatggttagcaaggaggagtagtgattagtcgcaaataataatcctaattagcacgtagtaagaggcttcatgcgctgatggtgattgcattaagaaggcgcgcgtctgttcgtcgccggtagctacacttgttactgttagaaatgcatgctgtacgtgtgattcattcaataaatggtttaactccgaatctgccagttcagacctcaatccgatttatttgaaccatcaccaaattgaattccactagctacatagctaggccacaaacaatgcatggtacaaattcgtaaggttattattaatctgtgtggctgaggattgagatgtagtacaattagtatatggcatctgcaatatgctacgcatgtctctctccatcagtgccctgcttaattggtagctcaggcaaaataattatatttaccaccattgccgtcagggctccgatgcatatatgcttcattttcatttcgactttataagagtatattttactttaagggatactccttccaatttcataattcttaatgctttagataatgacaaggttttcaaaatatatctttgactatgttttttctattataacatgtacaataaattaaatatattttagctttagtaatttgtaagataaatctatatatatatatatatatatatgttgttctagtgaattagaaataaatattttttatattaatagttaaaattataaaagtttgatcccaatcttatcgaaaacgtcaagaattatgaagccggaggaaggattgagatatgattgattattatatcatatactctaatagacttgctctcgttttccctaatgctagtgctacgtccgtggtttacaacgaaattgcgaggaacatcaatgaatagttgtatgggttcaatttttatctatgtttttctgcgggccgggttggtttgtttcctacgcgaccaggaaagtaggatggtggaagaaaagatgtccgcttttaaagtagtggagcaacgaagcactatggagtatataggtccatttttaatataaatcaatatggagtatataggtagttagtggtagtaagtagttaaccttatgacgaagtaatcaccaaattaaggccatgcatggacgtctcctcttcctcttcgtatatatataccacacgacagcggttgcatccatccatcgatcagaggaggcatcatgaaggcgtccatggcgttcaccgtcctcgcgctcgccgtcgtcgccgtctccggtgcggcggcggcgtggaccaccaccttcaccatgcacaacctctgcccctacacggtctggccgctcgtcacccccaacgccggtcagcccgccatcatcaccggcggcgccaccatccgcctcgaccccaacggcctcgccagcctcgcgttcccggccgccgccgggtggtcgggccgcgtcgtgccgcgcaccggctgcaccggggcggccacgtgcgccaccggcgacgcgccgccggccaccgtggcgcaggtgagcgtgaacgcggcgggcgggctggcggagtacagcgtgagcctggtcgacggcttcaacgtgccggcgacgatcacgccgcacgcgttcgacgggagccagacgtgcccggtgctggggtgcgccgcggacatcaacgcggcgtgccccgcggacgccagggtcggcgccgggtgcagggcctcgccgcagttcttcaaggagatgtgccccgaggcgaggacgacggcgaccgacgtggaggcgacgccgcagaagtgcttcggccccggcgagctcaaggtcgtcttctgcccaaccaattgatgactgatcgatcaagccatcatccatatatgtggtcaattggcgatggaattaataagcttgcgattaaattatttgtgtgatttctgtgtacgtgaccatgtaacaaaaattcctttcaaaatctaaaaataaaaaaaatcgtggcatttggttccaaagcacaaggctacaaatggcggcatcacatcacatcagccattccaacctcgtagcaaccgtcgaacaccttgtcttgtagtcgccatggccaacaaccatgcctaagcaaagcagagcgacacctgatcgcgatcgggctcaatcatcaaagcctcgtcgcccatgtctctcccgggggtgagcgcgtcgacgttcaagtcgccggtgttcatcggcctcctggccgtcatgtgcgtcgccgtcgtgctcctgctgcaccactgcgtcctcgtcaccttctgcgacaccaggaggcgccgtcgacgccgacgccgccggggcacctccacgcagcagcagcacgtgcagcagggggaggacgacgacgacgacgacgacgaggacgacatgatgagctcgtcgtcgcaggcgaagctggtggtgtgcccgtacaagaaggcggaggagtggggcgaggcgatgtgcccggtgtgcctgtcggagttcggcgacggcgaggcggtgcgcgtgctgccggagtgcatgcactacttccacgtggactgcatcggcacctggctccgcgccaacaccagctgcccgctctgccgcgccgacaccacgcccagctccggcgatctccaccaccacctctccatctccgtctccctagaagaaatcctagtgcgcacctagcacccacttcaccaccgcgatattatagctgtgggcgggcggctcgccggcctaaccaaatggctggctggtgccgtagcggagtgtaagcagctgctctgcttcagtttttggagggagatgcagaaatgaaattcgttttttgcctggatttgatgcaatccgatcaatgatgaaatgtttgtctgcaaatcaatctagcagtaactgttaaattcttactcattcttatgcacatctgcaggtgatttagattgacaccctgactttcaatatcctattgaaatgaaatgcagaactgtacacaactttgctcatggtttttcgtatgcagatgaaagtagtctaattctacgaattgaggatgatgaacaaagagcaatcgtgctgcaaatagtaaagatttggacatctcccagagcattgagagtaaccagagaaaacgataaaaacgatatgaactacagatttccactcgatagtaacaagtaaacaatccttgtgaccgtcgtcaagcctccataagtaggagtagtatgataagtaagttaccgctaatcactttgcccacggttaatctagctagccaagccacgccaccgacttccggcgatgtccaacaacaacggcaaccccgggtactacaacaacaggaacgccggcgatcagtcggactacaaggcgacgatcgccatcctgttcagcgtcttctttgtcgtcatcctcatcaggctcatccacttcatcatcaaccagtcaaacaaccgcgctccggcgaacggtggcgccgccgctactagcgacaggcggctgggaggcggcggcggcgtttcacgtgtgccggccagacttccccgtcagcgtccgggcggcgccggcgccggcaacggcaccgctatggcgtggcagccaccgccgtgcaccagcacgtaccggagggacgacgggtggaaggagacggcgtgcccggtgtgcctgtcggagttcgccgacggcgagctcatccggctgctgccggagtgcatgcactacttccacgccgcctgcatcgacgagtggctgcgcacgcgcgccacctgcccgctctgccgcgccgcgcccgccggcgatgtctccacggcgtgacataatgctagctcttgtctgtgcatctctttactgtttttttacttcacagataactcattcatcaatgtacattcattccaatataatttgatcatatatattccgccaacaagagattaaaaagtgcttccccatttagcatccgattccgcaaaattcaacctgaattcgcaaactgcagcacttcacagtgcaatgcacgcacgcacactgaaaattttcagactcaccagcagagagaagcagtcgtcaggaaaattattcagaacaaaagcaaccgagggctgttagcttgttaggtgataatatgaccttcttctaggataataagagcttctatatatacaagggggctagaaaatcgaagcctgcagttatgtgcccaacaatctaagaaaaatgatggcataaaatgtctatatgctgattgtacaatgacaccgtatagttatttcttccaagccctatatgctcacatcttcctcagattatcaagccgggcctgtaggtcgtcatctatcccaccgtccccacctccagcggcttcagcttgagcggcaacctttcctgctccaaccggtgcagcaacagcggttgaaggagccccgacaagctgtgtttagagcacaaggttgtcaatgttacattgtgaatcgaaaatcccatccatacaactgctaagttagtgtatcctatcgtagactcaagagaagaatggcatactagcatgatgcttacctctgagttgacgtcgatgccaatttcgtcaaggacctggtttaccagttcttctgtttcttcctcctcctcatcgccctccaaagcatcgtcaatggcatcattcattgtgctactgactatctccatcttctcgttttgtatctcaaactcccgcattatcttctgcagagctggtagattcatctgcctgttcatctgtctcatggcttttgtgacacccttcatggcctcacccatagcttgtgtcgatttcaatgtctgcaagcattcagtaacagccattaggagattttgcacaaaaatagtttgggttgttaagaaaaaggtcagttatctgaatttggtaagactgttcttatcacaatttacggatagaataatccgcttaaatgcccgaacagaactatagcacctgcttgactgagataattacctgaattcgaagagatacaccctgtagctgggacttgagggcatagaattttgtgatctgatgtcttgtgcggataaggtcctttgccataatttttacggctccctgtgaaaaatgttaaagggcatcaaaacatatgccacaaccgatgatcactaaaagcaagcatttggagttctttttctctttttaatttcatgttgggctttgagttacaagcagcacaaaaactataacttagccttaaggggacaaaggtaaattctatgaaatagaaattcatcaaacagatcctgacagaaattctgctttctcctaacagaacatgtcaacaacaaacaaaagcctgtaactgataatctcaaccagattaaattggttagatttaaccaatgtgaagcaatcctatgcaaataaatgtaagcaatgggaactggagagtagaataagataatgtgtatgatacatttttagacctcataacatctgccaagctactgtgcgaaattgcctaatcaaggaagaaatgtaacaccaagccatctattgtataaggtatggtggggatttttatcagacataaagcttagtatgttggcattcagtaaagtatgtgacaaggttgaatcgaatgaaactattgatgaatatgatgggagtatgaaatcataagtgagggaaggcaatgagtttgggggggcgcaccatctgtccttgcttggccaccttcttgatctcggcgatgagcttcttctcctgagcctgcaggccctgcctctccctctcgatctccctgatggatttatccagcatccgcttgttctcccgcagcaactctgcatgccgttgaccaaaaacgaattcaatgaacacaaagacttattctatttcgctccaagaaccaattccgacaagattaacgccgttggatcggaaggaagctattagggttcttccggcgacgggagaaaaatctcgagtttggatcccaatcgggggggaagaagcacgcagatgtggtaaggaggagaaagaggaaggacgaaccggctggggtcttccgcttgccgaagatgaagctcatggcggctcgatcgattggattcgggtttcgatctgctccgcgattacccctttccccctcgctgcgatcgatgcaataacccttcttcttcttcttcttcttcttgggtggattcggttgggttggggattcgcgatggatttgataaattgggtttcgattgattcgtcaccaagtaaaccccgtaacgcgttttagtgagttgtgacgcgatgcggcggggtgaccttttctttgcgtccgtgtcaacgcgatacaaataagtttatcttttctcctttgagttgtttcaaaaaaaaaaacttttcttatttgaatcccaaacgtattcggttggaagctaattttgatttgtttaaaccgaaaacaattagtagctagtactactctaacccctttctgtttatgctagacttgtggccttagatttttaagtcaattttttcctggtttattagttgattttctatacttgctaaaatactccatccgtttcgtaatgtaagactttctagcattacttatattcatatatatgttaataaatctagatgcgtatatctgactagattcattaacttctatgaaaatacaggcaatgttagaaagtcttacatcgtgaaacggaggaagtagtagcacataagctcaagcattttttttctttttttcttcttcgagaagtccaatgcaaccttccctccctacagtccatctaaatttatttgttattttgttgtgaatcatccaaataagtcatcaatcatgttaagttcatgtgttttatattcctgtaggatcggtacctttttctgttttcatagtttcaaaatattgtgttcgaaaaaagacaaagtatgttgtgtagattttctaatcttctaaacataataagcctaaagattaccccgatgttaaatattaggggtaacggcctaactggccatttgtttgacatatttgcgcctgttttttatttaaccagagggaaaatagggggacgttgtcccttgtaccgctctaatgttcgtcgacgtatgcgaggcagtcatagcaaggctgcaagcagtgttgtatgcgaggccactggcttgatcccaaatgggtcaccggcgatcaactgcagtatggcgtcgtccttcggagtgccacctgcattgatctggaaccaccctttggatatgttccatcgctctctaaggattggggttattcgtcagcataacacaacaccggcatcctctattaatatttcgttatggatattggggatgtaaaaaaagaaattagcgctattgatcaatgcacgtgaatagagaaataaagtcgcatgggcaaccggtggaaatggccatagcgtgattttctcccagttttcatgccgagagataaatttctcaacacgttgtgctaaactttcgtgtaccaaccaattatgcttgcattagtaaaaaaaaaattgtatggagacaggcagagtggtgttggatatggattacagaatattggtaagcgttagatatcatattctaccattaataagtagatgccgcgtttgcaatgaactgaatcgatctgtactccgtgtgtatcagtatcatcaattcatcagtgttgtatgtccaggatatatgtatgatccatccatggatggatggttccaatctttgtcagcaaccaagcgatctagctatgtggatcatgtatatggatgcgtcctacaaaagattaaagtagacgcgttgcaggcagctatccatccgctgtgtgctagctacttgttgttctctgtatgccatatgctgatatgcgtatcatccacacaagatatatatgtctctcgatccacttgcctgccaacatgtacaaatcttgttcaggatactgttactgcaagtgttttcaggtaaggagttcaggaagagtctcaactcaagtaaagataagtcatatgaaccacaacatgcaggatgcagcctaatttttctgatgaatagcacagtgcacaaggacagaaagtggcattgctgtcatgggacaagcatatatgttgttttgctttcggtttgatttctagcactagaaaaattcagaggcgctcctgtgcagcagcctgcaggcaaagcaaggctccttccattccgtcagattcaatatcgtcacaggcatgtcatgcacactcagctctccatctccatcggtgattcatcagaggagttgagtgaggtaggtagctatccgtccgttacacttacttagccatcgatgcacgcgtgcttcaatttatgattctactgcatccactgcaagagcccatggcgattggccgtcgtctctcctctcctgaaacctcaaactgaaggttaggttaggttagattagcttagcttaattggataagctcttcgatcgtctgctgaaccatggtcgtggtcatgccgatggatgccgcgcccaccacatcacaatcttgccttttggtttttgctgcagatatgctaaactcatctgtctctactcttcccttgcaagctgcaaaatccattaccaaccactaccggttgttttctattagtcttctcttcccccactccactactaaaagttagtagtaaaacaaagaagaagagtatcaatgactgattgactgactgatgaagagagatcatattggcctgccagttagttgttgcatctcagctttcttgcaaatgttcagaccttcactgcatgcccaataaccatatgaatgcccgtttatatgcgcaacatgaagtggaactgatggttccaattattgtgatatcttcttttattatggttggtttttctgtctggttctaacatgatgagagctagggagaaattatttatttatatatggatggacaatacagattatatttacagatttttggctggtccggtccttcttaacagctgatacagtgcatctcgtgtttagtcatctccagtccacaccacaagcagcagcagctacccggcaaaaacaagcagcagcagcagctagtgattgatgaagaagagaacagaggctggctggttggtatgcaaattccaattaagccaggctacaaccttcagagtgtggtccttaatttcctttgcttcatgcaggatttcagcataagcttgctgattgctgcctacatttgcctaaccaacagaccttctaagcctgccatgtggcccactcgccttgccgggcccacctgtcagcgagacactgtgcagttaacaaccccctctcctccatttgcatctagattgctagcaacatgattgatgtctgacctaatggtattttgtttccatgaggaagcaaatttcatttctttttttttttctcagctggcatctgttgtgcctcgtgacctgaaaatctgtaattttgtctcctcatcaggcaaggtattactctacattaggagaagaatggaacttaattatgcatggatcttctctacccttcatccagccctaccaatctgttttgtttttcatgtggtcctatgtatctgtgatatgcatgctactggtaatagtgtggggggaaaaaaagaaaagaagctgctcatctcagtggtgagaaaacacattgatgggcatatccactatgcacttgttgtattcattgcaaatgatgggcctgtaaaagccatcttttcaatttcatgtctcaggatttgttgctagcctttcatgtgataaacttgtaagcattgcacctggggctcattattgaaattctgaagctaacagtatcatctgcaatggggaaagaaagaaagtccaatgttcttggcttcttgcaaaaaggaataaatacatttgttcagggaaagacctgcaatcaggttctataattctcaattcaacctggcttttgatggattttattctttaagatgactcaaaagacctatcttttgatggtgcaacggttataattgaggtcacaagtagcatatgcttttcttttaactatactagttcatctttgctaatccttgtgcaagtaaatggtgtaccccatgcttgttgataagtttatgttacatccatatttgctgataaattttgctacaaaaggtaggataaaactttgcacatgggtacatctttgtacaaggaagactagcagccagcttactagaacgaaaaactacaaaaaggaccacatatttgtatcctgtgtctgtatgcacggtcgtgtacatccatatttatacggttggtgagaaaatgctgaagaatgaagcagagaaacttgtttgtttcccggcaaatatggtctatgaagcaaggttgtatgtactatactctactgaggaccagacaaagacgcatcttctcacctactagctatgctacctagcttcatttccagaacatattggtatatcttttgcaatagtatgtctgaataatacactaatcttgacgtagtagtagaccagatcaccagagggtccggtgccatggattgaggctacaagtgtcattgttagtgcaattgattatgtctagcatgtatagtgtacatgtatgatgatatagcccatgtctcgaggtgattaaagcttttaagctctcaaggttggaaaaaaaaaggtgagaccatgtgtgtgtacagtaatttcagagtaactgcaacggcaaactgaaacaagtgtgaaagttttcagttgtcaatttggggttcagttttgtttattggagagaatcctggagtcaagtggagattccaacaatcaaaatttaaaaacaaacatgacctgaaaatcaattcaagtcctctagaataaaactaatgttgtgattccttaacaccctcatttagctcagctaatgtaatcatcatcatcatcatcatctctaatccaatccacaaatccctccaaaggccagcttaaatatataggctgtcttgaggacaatgttgatttgttttttgcagaagcaaacatgagagtccctctctccccttccacattccacctccccatgtgatgtgaagccctcccctgtcccctccctacctccatctctctctccctctcttgaacactgagcctctttgcttacatacaattcagtagtgtagtaattcactgcagcagctgcatttgttttggtgctgcactcactcactcgtcttttggtttcttgggggtcaactgtgctgtgctcttccatctttcctttctcctcctcctctgcttctttgattgctttgcactgtttcagctgggtgtgtgcttctcctccattccttggctcctgcaacttttcactgttcttggcaggttcctgtgttgctttgtgttgttgctcttgttctttctgactgttctcttgttcttccataggatcggatcggtacaatacagccattccatccataaaggtggccaaacctcatctttcagattcagcttggttgttttgctgcgtgtgagcaagttttctgagcttttcttttgtgcaagaagcaaagaacaagacaagaatctggcttgcttgttctttatcgttagaaggaatctccgcttgctgctgcttcgtttctgcatctgtttctgttcttctaatggtgaatgaataatccctagagcgagagagagaaagctgtagatagagttaaagatgagagctctgagcagagtcggcgtcgggttggcggtggtgtccgcgctgctactgctcgcgctcgccgccgagctctactacctcttcgtctacaagcgccgccgctccgccgccatctccgacgccggctcctcgccctcctcttcttctcgcgagctgctccagcttttctgcttcaagaagccgcccgcgctcgcctcgacctacgcgcaggagccgcacgccggcgaggcggtgggggccgtgcccgtcgacgacgacgacgacacggtggaggcgcagctgatgcggctgggcagcctcgtcggccccacgcgggtgctcttcaccatcaaggaggagaccaaggaggacctcgagtccgaggacggccggagccggtgcgggaggagccggagcctcgccgagctgctgcattcgtcggagacgccgttcatgacgccggcgtcatcgccgctgccgatggacaagtccttcaaccctctgttcgagcccacggtggcggcggccgtgacggtgtcgccgccgcccaagtttcagttcttgaaggacgccgaggagaagatgtatcggcgggcgctcgccgaggaggccatgagggcgcggaggtcgccgcagacgaggtcaccggcggcggccggagaggaggacggcgggtacatcaccatcatggtggggaagaacaacaaggtcatccccttgccgtcgcctcccagcaatggtgatggtgatctgcagtagtgagttctttgcaaaattttaattaagaaggccttaattaactttgttcatccagtgttctagtgtagctctttgcctgtaattttctctctctctctctctctcttttctttttggtttatggtcttctgatcatgccaaattggatggttggatgtacataacatgaatattatcagcagccaagaacttcagatcaatatatttttcttcttctaatgtgtacttaatgacagtaattttgttgacgtttaacttggtgtaattaatgttttgatagagttctgtcattgttttttcagggtgtttgattgtaacaatttttatgatgtatgtactacgcggttagttatactacatgttacaaacattaaaggattatctgaaaatcaaaattccttcagtgacatgtttattaatctggtttaaccaactgtgagctcagatgaactttttccctttttctcgtgagctgtatgggtggggactgtatagaatactactgtgcactcaattcatccatcagaacagaggaatggagaaaataatatctgaaagctccatgctgacctgtctcaaagtgtaactttatactctcgactattagctaacttatatagggtcttcaaaacaaattccttgcaacttctctcaagttacttaatcaccttttaactgtcatcaagtcacacctcagtcacgcgattagctttagttagttcataatgcaaaattccttgcaatttttgacaagtcttcttgagtccttttgagctgtccttttagtcacaactttattcatactgcctttggaacaaccagggcacagagggaacaatgtattctaggcctttctataagtccaaagtgtggaattctttttatttccacagtgaaagctatcagggaaagatactatattctcattgctgtaattatgacttcatgtgaagtgattctgtttgcactttatccacactgcctttagttagtcttttcatccagccaactcttttgagttttcagttcatagtgcataccacaagccctgactgcctgaccctgtcatctttgtttttcttcatgtgttcttctctggtttatattgatttttacagtcaaagtttacttgagaggtgcagagaaaagattcctagaccaacatcagacttgcagtgtactttaatcaaatccgtaggctatttcttaggaatgtgattgcatttctgattataatcaactagcagtagtgtcaggttacatcatatcttctgattatagcactaaagttatgaaagaaatggaaagagaaattcacaatgtactaagactgtgtttagttcagcgcaaagtttagattttggttgaaattggagatgatgtgactgaaaagttgtgtgtgtatgataggttgatgtgatggaaaaggtccgaagtttagatccaaactttggatctaaacacagactaagtataaatgagttagtacctgtcatgtcctgtctggaattttcagaagtgcatgcataaatggacagagaaaaattctggcgagcaattctacggtccttgagaaggtaccatgaggtactaaaaaattagtgtaaaatttggtatctcatggtacctcatagtacctaggtatcaaaatgtaccaaatttataatagaaaaattggtatctcatggtatctcctcaagtaccattgctctattctggcagttaggcatttttattatcagtgccatgtttggttagtagagcactcatcacatgtactagtaggatcatatttggtctaagatacaaaagatgaatttgggcattcgcattgagttgtactccgcttctttcttagggcccctttgaatcgtagggtagaaaaaacggaggaataggaaaaatacagtattctgataggaattgaagtgtaaaacagaggattgcaaaacacaggaatggtcgtttgattggagcgcaggaaaaacgcaggaatcggatgagagagatagactcaaaggaaattttccaagaggttggagctcttgctaaatttcctccaaaatccacatgcaatgtgccattctataggaatttcataggatttgaaaagcttcaatcctttgaatcaaagggccaaataggaaaatttcctataggatttgaatcctatgaaattcctacataaatcctttggttcaaatgggcccttaacctgaaaccatcactttgatctgaatcctaaactgcagttggtgaaacctaccatttctgacaaccttttctcacttcactagctgaaattaaattacacagacttatctgaacatacatgtggcaatgacttctcctaccattccttgatcaatatatatagtcttgtgtacaccaaaagaagaagaaaaatactgtcttgtgcagacacatctactttcatgtatgtacagtgtttgtttcaataactgaaagccctagatagccctgttgacattgcaatactaaatcaaagtagtcactgtgccagtatgcaaatgatgatgggtatgttctaacttgagattagacaagtagggaggaagcaggcaaccgcaatttgctggctctctctgcaggagttaatgtcgatcgattgcgtacgtcctgatctggctctaataccccggcccctgacattagcatcaagcaaacaacgtaattaagtgtggtcataatcccccttaacacgtaatctgcttctataatcagaagaggtacagtgcttgtgattaggtgccgtacgtgcagtagattggtcgcctttctgtaggctttaagcgtcagaattgtctggtagcctaacaaaaatggggctcctggctggcaactgttgttgttgataagcatccaaaaggaaaaatcctcgccatgacaagattgtggtttgcagagcagtttgttatcatgtatagtaattaacagcctgcaaaatttgcaagaaaccaagacattagatttaatttgttggtgaggcaccatccgtgtattaattctccactgatgatgttgttgttctagtatagatggattaaattgagttgtgtgtgatatacttttatttatttatttggtgtcgatctcatccattttgacgtgttcgatcagtcaggcaaaattaggatggtggcgtttctagtgatgtgcaatcaactgtgtgtcaagtgttgtgcttcattcagtgcatgacctactacatatggctaattggctatctacgtaaacttacatacttacattacctacaactgcattaagggccctcattaattatttttttcgattaagagccctgattgattaagttgcgcggcactatatagatggttatatatgcataatgatttctttttttaagaatacactataaacacaagcactcacaacacacgtgcactcaccctcttgtaaagttttctatgtgctatgtttgtgggcatcgtagaatcatagacatgacgtcgtatttcgtaacctagcgctaaccctgaacgatcttatgaggaaatgcattcaagaggttgtcttgtgaatagagcaatagttccaaattggaaaaatctgttttcttcccccctacaatttctaaatagtacaatgtaatttctgttgtactacccgcttattttctaatgaatgaaatttagaaaaaaaagaacaattaactagctagctagctagtgtgacactgacattcgagttcagtacgagtcctaaagaaggaaaataaaattgagccaccgttccgaccattctgatctactggtcgggctcatcgacaagtgcgaataaaaaaatgtgtcattgtaaggattaaaaatattttttatatcaaatattcaaaatagttgatttttatactgctaggaactgccagtagtaatttaagtaaaaaataataattgaatttgtttgggcttaaagaaaaatcctagctcggtcacggggaatggcctggaaggaatagggtgcataggcagcctacacatagagtcgagtttgcaaggtcatattaatggtgttttcatatgacttaaaaaaacagcggaatttgcgggtaaatgatggacatggatggtcctttttgcatgcatgacaatatgatagcgtgttgacaacagcccatttgcctaattttgtggttaaggtgttgttcacatcgtcaccgaagaacacaactaaatgcttattatttcaaaggaccatgctccggaactcatgggttgtgattgacaatataatgcacccaaccatgcatctgaagttagctaaaccctactagattattgttttttgcagctacactgatatactccctcctattgtaaatatttaaaagttaagatatttaattggctaaacttttaaatctttgacaattgttatgtcaaattaagtttctaaaacctaacgagtttacgacattatggtagtattatggtaagtttataaacaccatttgttttgtattccaaatcaagtactcaagaaattaattgatggccaaagttttcaaagtaattagctagttttcaatctaggaagattactgtctcatgagaagtcacgatgcaagtttgacctcacgatcaacctgcgcaatatggtttatcgaaaaatgggatcgatcaggggatactatacaattagcgattaattatcgttagtcgtacttacggtgttaattagtccgtgacatgcatgtatggatatgacggtacgtgtaacgtacgtagctatatactatgtacgtattcatgtgagctggatggtgtaagatcgacggtgccgtatatacgtatgtttcttgcaacagcaaaagtacgtagcgtacgtggcctgttccaaccatcgatcgagcagaagctgctcccatctagttgcaagctcggttaattttggccctgtttagatgctcacaaaaaatttaatccctttcatagagacttatatttatgtgagtccctcccatccaaacaaccccttattattacgatcaattatgataatctcaaatgtttaaactttcactatttgataaatgaaaatttcctttgggcattttcaaaatatgtataattatccgaaggacaccacaaaatcgtgtcattaaagaggaaaaaaaatctgtaattggttgcccacatttaacaactgaatttagttctacatcgctgacatgaacaactgactcttaaccctcctcatcgtcaacagctgaggagccattgccttcatcagatctagttgcgtgagatgtgcctggcaaccaagggcaatcttgttatttttaatttatctctccaagcttttacttggaaatgataaaataatatctccagtttagtgtagccagttacacaagtctctcaacagtgacacgatcttaccgcatccccaagccaattacacaaaatttaaatgtcatatagtaaaatcaagacaattacaagtgtcacatacaacacgacaagaaatcaaaaaacaaaacaacaaggcaacataggaccaaccatttcgcttataactaattatacttggtaacgcttattagcaacaaaaataatttatgggtataattttatatatgcgttctttcttacttaaaagtaaaaaaatatataaaaaagtagtcttctagtagtacttagccgaaaccctttttctcgtacaagtttggttgttttggatggaatccaaaaatataccctaccaatattttgttagcggtttttgtttaaagccaaattattggcattgcaatgtctaacttggcacattctagattataaatcagggttttggtttcttattgatatcaaatcaaacaccattttatcctatcaaataattagtagtgctaaaacttagctaggataatgaaccaaacaagtccgttaagtagggtaatgaaccttactacatgggccgcggctttgggacatccacagggctgacaggcatgcagatgctgataaggaatggaatggaataagtccattttgcctccctcatctcttgcgcttgcgtgaataacatccctcaactggaaaaccgggtataacgcctccttcttctctgaaaaccagagcaaatcacctccctcagtggtttggctggcggtttcgtccgacgtggcgtcgttgacctgttgacgagctgactctgtgtggtgggacccacatgtcagtgcaaactctcctttccttcttcctcctccctctctctctcccttctctctctcccgtggcctctctctccaccttggccagagcaatggcggcagcggtggcagacgacgtcggagcatcggtcgccgtcgtaccaaagtagcgagagcacgcaggacgtggagaaggggagagagagattgagagagtcgtcctcgtcaccgccggtgccacgcgcgaagaagaaaaggaaaccgaggataaggggagagagagagtcgtcccgtcactgccggtgccgccgtcctagagatccctcgcgagctgtgtcccgccaccaccgccgtccaccaccggtcgccgtcccgtgctccttcgctgtccccgggcggagaagaaaggaagaccggggagagagggggcagagagagccatccgtcacggcgagctgcgccgccctggagcgttgcgatgctacttctggcttcttcctgcgatgctactgaggatgaagaaagcctctgtctaggtaattctttttcttcttttctctcactcactccatcagctgctagctttgctagctaggagtagctagctgcttgtgctcttgctgtcgagaggaggaagaaagactcgaggtggttggctgtcgtgttgtgcatggctgcattcagagccccgacggtgatgtcatcgacagcgtgccgctgcacctgcaaccggcgttcgaccacccgaagctcattcatttttgtttcaatttgcagtgatcgtttctatctccagcgacgtttcttgatcgtgtttgtgattgtgtgcgcgtgcaggttgagccggagccagaggagaggcccaaggtcggtggcgcggcggcggcgcatggggaggcggcggaggaggaggtcgtgttcccgatggcgtggacggacgacgacgagttgtgcccggaggggacggtgcccgtgcggcagacgacgaagcgcgacgtgctgaggtccagctcctctccctgtttggggatgaagcagcctcgtgccggcgtgccgctggtgtcgtccgcgtgaggaagaagatgggatgggggggc

SEQ ID NO: 926 - DNA, 2072 bp, Oryza sativa
attatacccggttttccggttgagggatgttattcatccaagtacatgagatgagggaggtaaaatggacttattccgaatggaatagctaaaaggaaaaagtacaccgaaggtccctcaacttgtcatcgagttacaaaatcatccccaaacgcaaaaccgggtataacgcatcccaaacttacaaaaccattacaaattaggtcccttagtggttttgatccggttttgtcctatgtggcagctgagccagcgtgggacttatgtggaccctacctgtcagtatgccacgtcagcaggtacctgtttcccctcctctcccttgctcctctctctcacacacactcttctctctgggaaggccggccggcggtggggaggaggtcgccgggcgaggaggtccgacggccggccggcgatgcggcggcggcggcaggcgtgcgcgcctcctcctccccggttactcccacgacgccgactacctcaccgcccttcccaatccctatctcatcgccgatgccgtccgccgggccccgccaccttcctccgccctgcagcctcgccaccctcactctgcccgacgcggtggagctggtctgcgtgctgaagcaggtggaggagaggcggctgcccgacacggtggagctggtctccctgagctcccatctgaacctgacaccgaaatggcatcaaagctgttggaattgtgaaggtgatcgacaggccgtcaggcccacgcatgtttcttctcgctgtaaacctcatcccaggaggtttgtttgtcaccaatctatcctgtaaaagagatcaccacaaaaacagaggaaagtcagatcctacatccattgttcagttccataatctcacccttatcaagcaaaaatgaaacaatatgattcaggttcagcaagagaaattctgatcccaaacagttcagcacaaaaaattcttatctcaaacaaaaaatatcacacagcaacacaaaaaaattgatacagtacgattcaagttcagcaagagaaattctgatctcgaacagttcagcatggcaattgctgatctaaaaaaaaacatgatacagcaacaaaaacttcccaaatgatcaatcacaaaaatgtaagctccctttcccctatatttctttagcaatcttctttgcatgccaaaagccttctttcttatccatcaccaaaacgaaacaaagcaatgcaatgatgatgcactgaaaagaaaaagctctcaacaacccggagcaggtgctgcgcaggatggagcaggagaggcggctcgtgcggatgggcaccgccgggagcgtgtccatccgcgtcctcaccagcggcggtggcggcgaggccgtctccttcctcttcaacggtgcctcgatggcctcctcgggagccgccgtcgccggccgcaccaccctccgggcgtgcgcgccgccgtgggggaagccgacgaatgcggcggcggaaggaggatgaggacgggagctattgtcactccttgctacgatgaggacggcctcgagtccgccgagagcggcggcaaggctcgagagtccacctctgcgcccggcccgccgccgcctcgtcgccataccaccctgccgctcgtcgccggctgcccagctcctctcccgcctcccgcgcgctgctcctcccctgtcgcccgccgccgcattcccaccttccgtcgtcatcttcaccaccggcggtgaagcaccatcagacgccgccacatctccggcgcccgtcgcctcctccatccctcccaactcgcttgagcggacacgagcagccgcaggagctcctccagctccggccaccggcgtggtgctcgtgctccgccgcggcactctcgccggaaaaagaacgaagagaagagagagagaggaggaaccgaggaagaggagagggaggggagagatgacatggcatatatgtgggggtcccacgctgactcaactgtcacataggacaaaaccaagatcaaaaccataaaggatctattgtgaacgggttttgattagttaagagaccccaaatattttttcagttgaggtacgattttgt

SEQ ID NO: 927 - DNA, 9954 bp, Oryza sativa
aaaccccttggctcgatagctacaaacttcaacgccttaatttggaaggcttgggcaccacgaaaatataaaatttttgcttggctaatcatctaaaatagagtctggacctccgaccggctacaaacgagaggctggccaaacggctccatttaccccttatgtcgtcaaacccaggagatggcaattcacctacttgcagagtgtcggtacacaagaaggatttggaagacccttgcgggctaggttgcgtgcgatcaactgcaccccaatcaatggcaacaagcacggacggtgcatgaatgatggaaaaataccatgaccttaagaggcgttccctcgaaggctctccgcacccttacattgcttgtggcattagagatctagaatgaaagaaatcacagaaccttccagcaaaaggagctctcgacgatcagcccgatggccaaaatcaaagaggaggccaaaacttgggctttggtgggcgcgaaaaacctagaagttggcttattctatagttagctagggccaaaggcctttgctttttctttctcttctggcttaggcctttgtacagtttactcctcttttattcaatgaaattagcgattctctgattcgttaaaaaaatattctaaaattaatagaaccatctaaaacgctggatatacattatgggcccctaaggtatgctactagagcaaagtgaggcttacatatcggcacctaatgcgcatacagtattgtgaaggaaaggattccctacattcaaaacattactatgaaaaaaaagctcaattgcatgtttatatataacaagtttagtgcaaaattttagggctcatttggttgtaaccaacgttgtcaagcctaatcttaaccttaataagatgtggctagtaatatagaagtgtgggcattaagctacttacttagaaaatcatcgccaaacgtaggaaccaaaacctgacaagtgacaagggcatacatgacgctgctcgtttaaaaaaaaaaaacaaaactaacaatggcatagctgcaaacctgcaaaaatcacttgggcctccacactgaggcctcccatggcccaactatcccaacccagcccaaccactgcaccgatccgggcgtccggccggccgaaacggcgagaaatccgtccgtgtcgtcgaaaccttttgaactcctcctcctcctcctcggcgcgcctgtccgtgcccgtgcccggcgtgcagcgcgccgcgcagcaaaaaaaaaaaagttcccgacaccagcactggcagcaacgcagcgtgaaaagacagaaaaagcaaccgaaccgaccacaccgcgcggcccaaatcatcccaaatcaatcccaatcaaccaatcgaccaaaccaaacccccattttgaatttcaaacgccattccagtatcccaccacctcctcctcctcccggcgagcagcgaaggcgagatagagcgagcgagcgagcgagtgcgagagatgaggaaggcgaccgccgcggcgtcgcgctacgcctcctacgactcgccgtcgccgtccccgtctccgcgacgcgccggcgcggcggcgacgccggggtacgggagccgcgcgctggtgccggccagatccggccgcgacctgcgtgccccggcggcgcagcacgggaacctcgggtccgtgctccgtaggctcatctccatggacaagaagccggcgaagaacctccccgtacctcccgccgccgccgccgccgccgccgcgaagaacggaagtggtgggaagctgccggggctgtcgcggaagctgttccagaaagggtcgtcggagcccaagaagaaggcgctgacggaggtcaagaacggcgggaacacgcggacgctcgccatggtgctgcgcagcgagcgggagctcctcacccagagcaaggagcaggaggacgagatcgccgcgctccgcctccagctcgagcagaaggacacggaggtacacgctgacacatccacacctccttccctctcctccccgcccaccgtcaatgccattgtgggcttactgccattgcgtcgagcaggttgagcgcctcaaggacctgtgcctgcggcagcgggaggagatcaggacgctcaaggacgccgtgctcttcccggacacgcagccggaccgccacctccgggatgagatctccacgctcacgggacagatccaatgccttgccgaagagctcgcgcaggcatgttcttgacgattttgcaatgccgtcacttcactaattctaattacccacctaactaaatctttcgcctgcaatggcttcactatgtacaggttaaggccgataaacacacgccaaggtcatgttttgatgatgaatactgctcttccccaagaacaccggtgcttaatgaggagactgctttctctctggtaattttcgcttgctctaccattcgtctgctacaattataatgtgtatgtatgttaagaaatactgaaaaagtttccagatgctccaccatttgattgctactatcatctggtttacttgtacttcataagttgccttcaaattataaagttagttccaactggtttgtactcgaaattgacaatctgcaatgcaaaggtagtgccttggctcatttgttaataacataattgaaagtcccatactagcattcttgtccagttctttacattagataggttaattcaaattgatcggcgggctgtcgcctgtgtagcgaaaaggatagggtaattccttttcacaaggtactcaacgagtactcctatgtgacaacaaagaaaccaataggctttttgttctttatagttaacacaaaagctctcctttttcacaagcacttgtatcacttaaccagaaggcacctataaatcccagtggagatgtagaagacaaatcacagatagcgaaaaatgccggtttgtactctacactatctcacgttttgacatatattctgtcatgggggcaatgcaacatatattgacacacacattcttgacctcactttgcttattatttagttatttctgattttcaatacatgctcttcacctaagtgatagtttgcaaacaaaatttgcagaagctagtcgttaccattttttatggttaaataatttggccatagattaagtcttatccttcctacaaactatcattttggtcttccttttcttttaaaaagttcctctaacaacataaagcctacatggcaatggactactatagtgctacttgtaatagaaactagaaagtaccataaaggcgcccctgtgcatgccagttattattgcgcctatcaaaagtttactaatgctgtttgctgcaacgcaggaatgtagcattggagaagatgacacaccaaactacggtagtccagatgaaatgttcagcaaggatcttaatccttgcctaactccatgcatctccaagagtaaatccgaggtattcaggccggtcttggtacaacttttactcttctactaatcctgtccatttacaccatgaagaattgccttctcctatgatcttatttctatccgcaagccaaagcaaagtgtggattctttttctcattcaaatcatgaacttgaacaggagtacgagcaaccgatcaattctcatcgcagcggcacgaaggccggacaggacagcctctcctgcggttcccgtagcaggccaatgtcgaagagctctgatcatcacaagcctacctcaggcaccaacagcaagcgacgagtatacagatccgaccaagacaagttccatcagaacctgttctagctttgccgtttaccacggccttttccccggcctcaatcacgcttccagcagtctcccctgtgaaatattcacaagcgtgtggactcgtttggtccattgatacatgtctcgagttgttgtaatggcgtcttggtttgtgctttgctgctttgcagtgtatgcttgcccctgctgtttcgaatgcttgtccaagtcatgtggataaactgtcttgagaagaggaaatagcagatgatgttttgcttggattaaggcgatacctctttttctaatttttgcacttaaggccagaatatggcaattttaactatgaagcgcaaaatgcagtagttgatgtgtggtgtgtgtcagataaatctgatggttgagttgttattcggagaaatttgattctgggagtatatgtttgttgaacatatttcagaattatgatgaaaatgattgaatcgctcaatttcggaatacacttcaggctgtcggaactgagacaagtcagagttcaaatcttggtatcagatctctctaggcgtttgcgggcattaatcgcaagtgaaaaaaaccagagccgtcagatctggaacggacggtccagatcccaggatgccgaatactagtactagtacaatctctctctctctctctcctcccccgctttcctctccgtgtcgcgatctgcgatggtcgtctcgtccgcgacaccccggccccaattccaacacgcgtgcccagcagccgcagatctctctccaaattccccaatccaaatccgccctcgcctcgccccgatcgatcccctcgattcgattcgatcccgcccgatgcgagtggaggcggcggcggcggcggcggaggccgtggcggcgtgcgcgcgagcttagggtttctagggtttgcgctagggtttgggggcgcgcccgcgatgggccggtctcgcggggtgcccaattccggcgacgatgaaacgaaccacaggtttgtttctagcagctgcttccccccgctttgcatttttcgctctggttgatgtggaggggagtgatccattcgttgtctggttggggtttgctgcaggtcgaagcggaggagggtcgcgtcgagcggcgatgcgccggactcgctctcggcggcctgcgggggagccggagagggtggtgggaagaaggcgctgtaccactgcaactactgcaataaggatatttccgggaagatccggatcaagtgctccaagtgccccgacttcgacctctgcgtcgagtgcttctcggtcggcgccgaggtcaccccgcaccgcagcaaccatccttacagggtcatggtcagtgcagcttcagttcacttcacttctagctccaagtcttaatgcaacgatgtagatatactttacttccttttttgttagcttcaggtgtctttgcttgggtgttatcctttattactatactaatcagctagtgctctgtaattcttacataattggatagcctaaaatagtagtgaagcttacagttgaaatatttttcactttggtgcttgccattcctgatgcatggtttatgttgtatgtgattttgcaccaggacaacctgtctttccctcttatttgtccagattggaatgcagacgaggaaatccttcttctagaggtacatttttctttcatttgctttatttactttctggctgttgggttttgactgtttacttgttataattaataaaagggaattgaaatgtatggtctgggaaattgggctgaagttgcggagcatgttggcaccaagaccaaggcacaatgcattgatcattatacaactgcatacatgaactcaccttgttatccccttccggtaattattttctcaaactgttaatttgtttagttcaactggtagtcgtctggtactccttaattcaatatactgtctcgtgatctcatcattgtaggatatgtctcatgttaacggtaagaacaggaaggaattgcttgctatggctaaagtacaaggcgagagtaaaaaaggtgagttgctatcatacttttcagttaatgtaaacagtcttttaacctgcaagttgtcaaatattctactttttgtttaacatttgaagatttcacactgatgggataacaaaaaacacatggtgttgtgtggtttagttttcttaacatgctaacatactacttgctaatcgccatacataatgtggttcagtggtttagccttttgtttagtatttgattgcgcacctatggtcctcatggatatatcagtatgttcggtaccctgatttttcaacatttaatatccaaaatatgaagggcaatattaaaacataaaatatagggtgctagttagtgaatgtagggtgctagttagtgagtgatctatgtcatgttctttacctggtgaattggcagcagcacaatactttcaattggatgtaagatccatttgggcttttgtttggatgtaagatctcacatccaaacaaaagctcggatctgatatctgtggatccaacagacacatagatcctaccctacatgcttttggcctatccacctgcatgacatacttccttcactgatttattgctattcccatcagaagcagctgggctgccaccacagcgtaccacagcgtgtaactgtagtactgtatacaaagaaacaaagactaggtatagatgtacaggttaataatcaaagggataagtccattttacccccctcaacttttcatgtagtctaaaacacacccactaacttgaaaaccgggtacataaccccctctaacttttaaaaccatgcaaaggaacccctcatgcaaacttaagtggatttcatctgatgtggcagtccaatcaacccaagaaaacaaataaaaaatcgatcagtgctcttgctctctctgtccatacgggattaccacgatgagcggcggagtgaggcagtgagctagagcgagggccatgagatagtgctgacggtgctggatgccgatagtgccgaggccgagctccgcgtccttccacctccgtcctccgctggtcgccagcacacggcgctgccccgagacagatctgggcacgcatggagcaggcgacgacgaggcagagctcaacctcgacatcaccggagctcgagcttgcgcttgcggcgcatggatgagaaggcgcttggggaggcggcagagggaaggagggaggttgaactagctgacggatggaggaggcgctccgggagccagagcttgagcttccctgtaagatcggcatcagcggtgagctcgatctccccctccccgtcacccttgcgagaaccggcgaggtcgagctccctttcaccctttcaagagccggtaagctccatacccccttcctcatcgtcgccccctcatccgcccctcctacaccgaccgccaacgagcacaagctcaagatccgcctcctctgctgcctctagagctcgatcttctccatgaaatcgtaccagcgagctcgagctcaagctcccccttcccgagcgactcctcttcagagccgacgcgtcacaccagcttgctggtggacctcgagctacttggggacgccgagttcatcaaaggcgacgaggcttggggatgaggaactcgagctcgacgaggtgccagcgcttgccgtagcatctccctagcatgcgtgcacatgaggagggagctcgtcggccatggctagagggaggatgccggggatggagggagggagctcatcgctgcttccgctccttagggagctcatccaaagagaggaggaagaagaagaggactggtgggaccctatgttgacgtggcgtccaaaatcgtccaaaaccagtctaaaaccgctatatgatgtaaaatgtacggttttactagttggagggtgtattatggccggttttgtagttcgaggtgtattttagacaaacataagagttcgagggtgtaaaatggacttttcccataatcaaataacagaaccttgcactgtatgatgactccaaactgtagggggaatccatcatttgtcactgcaaagattgccacacttggattagtccctgcttgtgtcatcatagtgttccaatcttagcaagggcacccctgtgacatcctggcccaattaggatgaggcctgtgtggcccatgtgaactgtgtgcgcatgtttagtaccaccttgctagtctagcaagggtggaaccaacttataaggcctcatccctccaaccatacgactcccgggttaacccttttacacaaagcgaggacggaagtgtaagtggggtggtatgtgtaagtgggcccgcccgtcggttgggctggctacgcggttatggagggagggctgttactacccccctctgaatatggatttctaattggtaattgctgccttgtgtaataattcaaatatgaaaagcagaaaaggagataatatttcactatattggctagtatttatacatgaccttttattatttgtataggaacttcagtgttaccaggggatttgacccctaaggacgagtctccattttctcccccaagggtcaagtatgctgttcttgctttacacttgctggcattactctgaaatttgcaataggttgtttaccaactttttaacttgcatagggtggaagatgcacttggagaaggtttagctggtcgatcaccttcacacatagctgggggtacgtctcaatagcacgcccaccttgaaccactaaactttcaatcaatatctccttatatttgtatgttttatgaaaatgcgttatcacattatgatgatgctgttgaatctgtccaggtgcaaataagaaagcatcaaatgttggccaattcaaagatggtgctaatgtagcaaaagttgaaggtataatcctaactgaacacaacagtcttattttgcattctacacatatcattcagcgttgcactggtgtctataaaacattacttacatttatcgttaattcgttataaccagtcatgggtgaccagatcaaacttaaacggaacaattcttggcatggactccgaagctctcaaatttcaacctttaggatatgtctaatcatgcttgtcacattcttaggaatggaactacaaaaaataacagcaccaaaattatgtttgccagaattttatactggcagcaaaatgaactaaagttacttttttatttatttatgtggggtgtgaagtgtttgtgggaaactcattttctttactgtgtttgtgggaaactcattttctttaccgtatcgaagtatacaccacgcatcctgaacttttcatgtttatgtacatctgtttactttaatattgccttgtttaacttgcatgtcgcagatggtcatgtggatagaagtataggtgtgaaaaaaccccgatattctgcagatgaagggccttctttgactgaactgagtggatacaattcaaagagacatgaatttgacccagagtatgataacgatgctgaacaggcactcgctgagatggagtttaaagaaactgattcggaaactgatcgtgaactgaagctaagggtattgcgtatttacttgtcaaggttggttaacagtgctgatgcaattattttaactgtattattgcagtaacttcattatggagattaagaagatcagcatctttttctgttcatcttagttattatgatgaaagccttttccattgctttagtttctaactaaatcagtacatatcttcgctttttttggtgatttgctaaatgcctgtcactgaattttctgataatccaaatatcctacttgaagttatgtctatctcacacagccatattatgcgttttggtccataaagagaattcatttctttgttgcatttgtaggcttgatgaaagaaaaaggagaaaagagttcatactggaaagaaacttactatttcctaatcctttggagaaggatctcacaaatgaagacaaggaagtttaccatcgctataaggtgttcatgcgtttcctttctaaggaggaacatgaagcacttgttaggagtgttcttgaggaacggaaaattcgaaggaggattcaagagcttcaggtatttatttattttattacatgtcaggtatttaatttg

SEQ ID NO: 928 - DNA, 1185 bp, Oryza sativa
ctgaaattttgtaaaaaaaaaatagtgcaagtactaaccgagcaagaatttaatatactagagattattgctttgttagtggtcaagccacatattatcctatatatttatatagttcatccctagttaatgatatttcctttcttctttcattaagccacatcaccctgattatttatatcctttggatgatagatctatgattcaaattgtctcttctttattctctcataaaaccatgtaatcttattttttttagtcttaaaattgtactatcagtttgctttagttttgataatcatattacatcttatttgtacatattatgcaaattaattttccatagcaatgcagtggagtattcatctagtccccacttagtttttgtttggtttgatcccacacttttaatacgccacgaaagtaaaggctccatcttttaccctatatggaattagctttactaaaatttaaattttaaaactaatttttaaagttgattttaagatttttcaacgaagattttttttaacatttgcttttaaaatcgctatagacttatatatagaaatttcaccaacaaattatcattatctgctaatacttcatatggcttagtggttatgcctcagtagcacctttggtcttgggttcgactccccgtgggagcgaattttccaggatttaacggtttgtgctttcagtaatagacgacgtatctatcgacagcgagacgcctatagtaacttcgtcaatctcaaggatttaccggcccagtctttaaaaatactcataggggtaggttttgcgtgcgtgcgtacgttcataggagtaagtgtgtgtattacgagtgtccgtgttgtaccgtgtaattcttaaaaaaaatgaccaacggatggaaaattgggtgcgtatgctaagaggacaaattgagaaggaatcttttgtttttggcttacatgtttcccgaattactaacagtttgtttttgaaaaaaaaaggaggaaagtttctttaaaagttcatatcaattcattttttaatttaaaataattaatacgattcacattgttttacatatcttcataaaaattttctttccccttcttccaagcacacgcttagtattgtagtatagcgagtcaactattatgagcacgatgtattactgggttttgtataaca

SEQ ID NO: 929 - DNA, 3793 bp, Oryza sativa
caagagtactccatagtcatatacttgtgtagttgtgccatccaagatgcgcgctgctgtgctctagcttttggacagattcatgttcactctaatgaataagtcacaaatcactgttgttggtagataaatgagagaatatgtcaaccacaatcgtgtctctgatttctgtttgcttgctactccagttgctaatgcacaacaaagtacaaatttcagctgctggcacatccaaatcaactcttcattccagactttcagtgaaaaaccagaccaagcattgcatttggtggtcaccgaaatcagatggatttctctccgacctggcactcttggaagtcctttcaccagaaaacgcttgtgagttgtttttgaaagaataaaggttataagttgtttttgaaagacaaaagggttatatgttgttcttgaaagaagtaaaacttgtattaggtcccgttctaaacagatttgggatgcatttttttattggttatgtttataattataatatttaatactttctcataaataaattgattatttaggagcattcatcagcaccatccatctatctatctattatcatgttcgttttgaaggccggaaactaccacattaatcaggatgcgcctacggattgggcgacccgatctagggctggggaaatcgggcgctgacgtcagcgcctgacgtcagctcctgatttacgtgtaaaactactttaaactgttttttctcttaaattacttatccaaatcataattcgattgcaccattaaattcgttgcaattaaatcttcaaaacaagaccacacatagatatattccgacgaaaaaatagcttattattgacttatttttaaatattacacaatgttctaccaggtatatcggaattgtttcactaagtaaatcgaaaatgtttcattcctttaaatcgggtgttgtttcaccttatataaaatcaatgttttagcaaatagtaaaagaatatttcagttcactgcaatattacaactatacattgtgaaacattgtgaatacactaggtgaaacatttttgatggaacaaaaaataaaccaaatttccttaatagagagttttcaaaatatgtaggttttttgttgcaaaagattattttaattcactgcaacattagatctataaatagtgaaacattgtaagtatactaagtgaaacatttttttgtgaaaaaaggatggagaagtgggtgggcccaataggtagcacatgagggaggggcgcgcggggggagcgcccgatccggctcccccacgccggtcacccggggacaagtattatcgtattaatcaggaataaagaaatatttaggttgttagattgtggtataatggtatagatttaagtatttaacatagaaaacaaaggctggagaccaaatcctgggatctgctatcaccccgactaaaaaaatagttgttttccgttttcttttcccttgctgatatatcatatatgctttccgatcaaagagattgatgtatatagggccctcgtctgtatacatgctttccacctgattatttcgttaattgaagattgtgtcttcacgatttggttcatgttttagggactatttgaatcgcatgatcgaatagaggattagaaaaaacgtaagtttctgaaatgaatgtaagtataaaatagagaattgcaaaactcagaagacacacacaagaatgatcatttgattgatccgcaaataaacgtaggaataagatgagagagatagacaaaaaattttctaagaggttgaaactcttgctaatctcctccaaaatcacatgcaatgagttattccataagaatttcatatgattttaaaagcttcaatcttttgaattaaattgctaaataggaaaatttctatttaaatccgatgaaatttctatataaatcctttcatggccttagatgttttcaaataaaacaaagtagctagacgccacaatcaaaccaaaagcttgcttgactatgtatttgattctagccacctggtagccagaatattacgattagtttgttaattaattgaagattttgtctccacaatacgattcttgattttaggcgactaagttcgacttttctaaaaaataaagaaagatagacgcctcaataaaatcaaacgtttgcttgaccacgtgtatttgattctaactacactttctgacgtatttgttagcattggtatttggtggtaacccatatcagatggctttcttgaaatatccccgtcaccagaaaaaaaaaagcttgtaggttatttttgaataaataaaagcttttatgtttttttaaagaaaagcttgtaggttttctaagctcatggagtagtattttaccaacttgcactttaaagttttgtaagctcaacgtaacttccaattatatgcacgagtaagttttttatgctcgcggtaatttactagctgcacttgtatgttttataagctcacaataatttactaactatgcactggtaattttctaaagtcaaaaataatttaataactgcactggtaagttttgtaagctcacgatattttactaataactatgcaggttgttttgtaagctcaaggcaacttgctaactgtgcgcatgttaccccactgatttcccctatttgtgcttggatagcttctagaacattgggaattatttccactatatactactccagtagtacacctttgctgagtaattatattactccccccatattttagtacatgatactgctaatttttatccggtaaaaattttaaaactttaaccatccgtagctctcaaaatattgggtttgaaaacatagaaacttttttttatttataagaacttttgcaataatattttttgaaaaaggaattttataacattataagtatgttagcaaaaaaatcagttagagcatactccctctgcctcataaaaaacaacatattaccggatgtgacatatttatagtataaagatgtgtcacatcctatcttatatttattttttaggggacggaggaagtacttttttcatccttgaaaaagaaaatcgatgaatataaaaaaattttctagttgtatgtgttaacggtggcaaattattatcccttcgcgttcacttttcactcaccctacacatacttttactatttcaaataccaatgcaattaccccactttatctaaccctaatacatttaatcgtacttttataatattttgatgtaataattgttcataaagataaatttattttatgataaataagaggttaaatataaacagaggcgagtagtactttatttatggaggcaatgcactgaggacctgtttggtacaactctaaggtcccatttgaatcgtaggtagaaaaaacgaaggaatagaaaaaacatatgattctgataggaattgaagtgtaaaacagagaattgtaaaacacaggaatggtcgtttgattagagcgcaggaaaaacataggaatcggataagagagatagactcaaaggaaattttccaagaggttggagctcttgctaaatttcctccaaaatccatatgcaatgtgccattccataggaatttcataggatttggaaagcttcaatcctttgaatcaaatggccaaataggaaaatttcctataggatttgaatcctataaaattcctacataaatcctttgattcaaaggagccctaactccgaaatttagctccaggagttaggtctagagtagagttgtgg

SEQ ID NO: 930 - DNA, 2059 bp, Oryza sativa
ctagagaataacaaaaggcacggtaaatcacttccttgaattcaaaaccttgttgaaccagtagctgaattgcactttcaagtgcaaactaaaagaaatacatagcttacataagggcctgttgctgttgatgacttggcacaaccaccagagataggtggtcgcacaaaacagttttgagcgcatcctgattcacgacttcttccatcatgtagaagcgaattgacagaaagagacgcctgatcccttgtgttgtggtgaaaacaaggatgtgcacagatgaggcttggacagactagcctgtcggttattgcatcagtgaaggaaagctggttctagttgagcaggctcacggatttgtttggttctcaccctggacaagcaagagctgcacagcttcagcaacatgaagcgccattgcatcaagatcccccttaaccttgtcagaaacatgcaacatggatgcatccaaatcgcaaggggttctgtctcgcagatgctcacccagatcacgcatcgcttgatttagcttcgagttcatgtcatccagggaccttgtttgatgctgcaaggactcctcacatgccctgatcttctcctccttcaagttgactttaaaaacgcactcttggtaatcaaccagcaggcaatccatgtctttctgctcttccttccaaatctctgtcaaggtattatcacgtacaaacttctcgacgtcagcttccagcagggtcaggcagcaattttctacttctgattcaagagatgcaatcttacaatcgatatcatcgtgtctgttcatgcttttaatttctttctgcaccatgataagctgttcacgggacttcttaagttcagataaaagctttgttcgctcctcctcagatctcagcagctcagatgccttaccaaaattcacaggcttcgacaatgtaggagtggaagtgtcgatattatcaatagcaaaaaggaccctttctgcctcctttctctgagcttcgaaagagcggagttttactttaagaccgtcgattttgcttctcaacgcggtttcagattcacgtgcttttgtagatgcaacagaaaattcttttttgagagtttggaggtgactcagttgttccttcttttgattcaataattccaagctgacatcaaacttggacccaacaagggctttggttttcaagtccaagttccagcatgatgccacaggcgagaaatacttgctttccaaagcttctttactctcctgtgattgtgacagttcagccttaagggcattcatgtcttcctggtcgtgcttcagttctaggcaatggtgctgaatgcttgctgaaagttcttctgccttagtactagccatttcaagaagtttaaaatactctactgcatcctgggtagttacaagcttgtcgtggacattcttcagtttgacacgaacaagccgcaggatttctttaaacgttgatattgcagagtcatgtacatgttttacttctagatcttcatcatctgttgcatcacgcatttcaacatcttcatattgagtatctactgtagttaaagaattgctaccctcaaaaaatttccttttgaattcatctctttcctgcatagctttctcatacagacccataagtttatcattttcttcatgcatctcgtccagttgaagttgcaaatctgtcaattcacttcttgaaaaattatccttgtgattgcactgtccatccattatcttggagtccgatacctcactggatgagttgtctgctggcaaaattgttgcactctctggcttgtcatctggcagcaccccattcgcagcagcccctccataagaatggctgctttgctgctcattcacaccttcaatttgaggaatggcaggatggcccccatcttgattcacctcaccattggcgatagcatgttcatagagctcaactaatctcttattatcctcaatcaaaactgtaagccttgttcttagttcctcattcgctttggccaacccaatagcagtttcatgagcttctgcttctctttgacttgc

SEQ ID NO: 931 - DNA, 4278 bp, Oryza sativa
ttgttgagacagattgagctgatattgggtgaaaggggagaaggctggaaccgtggatcttttagccatcctgagtgggtttccagacaatgtgaggaccaaggataagggtgaattgtgggtagcaatccattgcaggcgcagcatatacgcccgaatggtcagtcgcaatgtcaggctgaggaagttcttgctcagcctcccaatccctgccaagtaccactacctgatgcagatcggcggcaagctccacgctctgatcatcaagtacaaccccgaaggcgaggtgcttgacatcttggaggataccacagggcaggtggtaagagccgttagtgaagttgaggagaaggatgggaagctctggataggatccgttctgatgcccttcattgccgtcttcgattacgccaatgcatcttagcaaactttatgcctggatacaagggttaaaatgtggaatcccagaatgacgtttgcacaccatttaccactatcccgggtgacatttcataaatgccgctttcaagtaacaacctaagttgtttcatgtttcagttttttcgaagcagatgtagcttgcttacatttttagttcattttcacagtccatgactccatgttcgtttggtgccttcttattgcgctcgataataatttgtgaaattgccggattctctgatccggtgcagtctgttcactgttggatcctattgggccggtacaagccacttgtctctgatgcccttcttgtttttcatcttactctaacctctgatggggcatgtacagtttctctctacttttatcaatactccctccgtcccataataggtgacgtttttgactttttatttgcaatatttgaccattcgttttatttgaaaaattagtgcaaatataaaaaaagataagtcatatgtaaagtactttcgataataaagcaattgacaaacaaaataaataataattccaaaattctttgaataagacgatgatcaaacattgacaaacaaaaactcaaaaggacaagtaatataggatggaggtagtacaaaaccagcaatatggatctctcgaataagagaaaaaaagtgttcaggataaagtagcaattgtagtggcatggaacattattcatgctactgtaccttgagtgttatagatgtaaatttggacagtacatcattggaaattttgaaattttttagataatagattaatacccggcctctacatcccgcgggatacacgcagccccattggaaatttcgaatagacggtcaagagtacaattgtgacggcaggggatccagaatcacatataacatcctctgcttcctcagctccacctcttcatgtaagacatgcacgcacacacatcgctacacacacgtacactgcccatcgcaagtgtgctcctttcacatgctcagagaaatggaggctagcgataatttcaaatatctatgttatgaaggttctatcgttaacagagattcagtgttggaaccaatcatcgatcaggtgtggctgttttgttcatttgcaggcattttatgcagttgtcattcattctccgcggatccatctgggagagactgggaggctcttgaaataggatgcacactgcacacgggaatgaatgcactctccaccgcaatcttcagttccccaatggcgtgtccttgagcaaagatggcgctgtcttcgtcttctcgatggaaatcgcggcaggtccgtatgctgatcaatcatcttatccccattcgattcaacaactcttcacttggcttctgcttcatgtcagacactgatagttgcatctttgtcgagacttgagacaggttgagcagattctagtagaaaggggagaatgcagcggggcattttactatttatcacttttagatttgacatttaacaatataccgcttatatgtctatgacgtatggattctcgtgtgtctacgatatatgggtctagatgataaatcatcatatgtgaaagtagcaaattgttaaatatcacgaatacggcaagtggatcttttcggcttttcgccgtccctgcaacggtttctagattatacatgaggaccaacgacaagagtgaattctgggcggcaaatccaactgcaggcacaacatgtatgtcaggttgctgagtcgcaatctcaggctgaaccgctgaagaagttcttccctaccaacttaccaagttctccgagcttataggatgctggccaattcatcgccttaactgccatttttgccaggatgaaataggtgaaaatagggaacccgccgatgtctgttgcacctttgcacgctgctgtcccggacgatgaacaatctgaataaatttataaaattttggtcttgaagcaacgtggaattgcttccgtcttatagagttacagtagtgcatgtggcttgcggacatgtttaattgagttggatttgctattcacagcttcacacaattgaaaattcaggatcaatcgcactcaccatcaaaacgtgatctattagctaaagaaagattcgccacgtgatcttgtgctccggagatagcaactccgcactcaaaaagtgctatagcagtacgagttcccttccaccactacttaaaaaaaggtctttgcatacgggcgggagagattttcacatgcggttggcgcaaccgcatgcgggaaatcgtctttgaaaatcaccaactttgcatgcggccacggcacccacatgcgaaaatcggattttcgcatgcgggcgcttaagccgaccgcatgcaaagagaaaaaatcgccaaaaaaaaataaaattccaaaacaaaaaaaaaacctagcccgcaggcggcggcgccgccgcccgagctcgccagccgctcccgtgccacctacccccgctcccaccgccgcccgccccggtcccgccgccgcctgctcccgctcccgctcccaccgccggccacccccgctctcgccggatccgagcaggacgaggcccgccaccaccggatttggacaggacgaggcccgccgccgccggatccgggagggacgaggcccgcgtcgccgccccgtcgccgcccaatcgtcgttgtcgtcgggatcgtcgttggggtcgtcgtcgcgccgttctcggtcgcctccgcccaccggatccgggcgcccactcgtcgtcggggttgtcatcgtcatcgcagggtcggcggagacgtcgagccgctctctgctgcctccgcccgccagatccgggcgccctattgtcgtcaccgcccagtagtcattgtcgtcgtagtcggggttgtccgcatcggggtcgtcgtagtcgtcgcgcagctttcggccgcctccacgcaccacgccgctcccgccagacgccaccgagcgccttcagctgccgctcaccgtgcgccacgccgctgtcggccgccggcgccgccgctcgccatgcgcctccgcccgctcccggcgccgccgctcgccaggcgcctccgaaaggttgagagagaggagagaaagagtgagtgagagagaggaagagaaagagatgaggggaaaatatcagagaggggagagagagaggagagaggagaagagatgaaaaattttgaagtggtgaggagggaaaaaattaatctaaaattatgagaactttgaatcaaattttatgatattaaatgaactcatatgaaaaaattaccaaaaacaaagttgtagaactcgttgagatctaccaattttcttttggtcatttctccatccgagtttgattgaactatataaaatttgaactttataatataagaaattcaaataattttttcacgcagtaaatgatttcaaatagaaaagttgtcaacaataaagttgtataacttatcaagatcttcaacttttgtattggtcatttttctatacgactctgtttggaccgtttgaatttgaatttcaaaatatgacaactttaaataacattttcaaatacaaaatgatttcaattgaaaaagccatcaataacaaagttgtataactcatcaagatctataacttctattttggtcattttttcatccaacaaagtgatttgtaagattgttcacaaaatgcacatctcttatataggttgtataactcatcaagattctattttggtcatttcttcatccaacaaagtgatttgtaagattgttcacaaaatgcacatctcttatataagtttttatataagagatgtgcattctcttatataagtttttatataagagatgtg

SEQ ID NO: 932 - DNA, 2036 bp, Oryza sativa
acaaccccacgccgcctcgccctcgcccaccgcggcgacacctacaaagcccgcgacgagggccaatgccattggcgtgacaaggcggggagcgcgacgcgacgcgagggcggagagagcgagggaggggagaggaggaggaggaggttgatggcgtcgccggcggtggtggcgttcgcggtggcggtgacggtggcggcgctggcggcgttctgcgggacggacccgctgcggacggggagcatggtggacttcccgggcttcgtcccccacgtcgtcgagctccccgacgcgtcggagatgccgccccacgcggacacccgcgagcgcctccgcggcgcggagatccggttccgcggcgaggtgcagggccccgagagcgtcgcgttcgacccgctcggccggggaccctacaccggcgtcgccgacggccgcgtcgtgcgctgggacggcgcccgctgggtctacttcgcgcactcctccccgaactggaccgccgagctctgcggccacaaggcgtcgccgctcgactacctcaaggacgagcacatctgcggccgcgcgctcggcctccgattcgaccggaggacgggggacctctacatcgccgacgcctacttcggcctcctcaaggtcggccccgacggcggcctcgccaccccgctcgccaccgaggccgagggcgttcgcttcaacttcaccaacgacctcgacctcgacgacgacggcaacgtctacttcactgacagcagcatccactaccagagacggtccgtcgtgcaattcctcctcccaatcccctgctgctttctctgcttcactgtatccattgccttgcctgttacagtattagtttagtgctctttactccataaacactcatgcttagttgcttaattactgcggaattgtcaatgaaaaacttaggatccttgaatggtaaggttaggttggaatggttccttgtctgaactttaattgtcgtcgtagtcaccatcatgccaagacttttggacttcaattgcacaagtcttctagatattataatgttctttaaaccagtgagtacgactgaagaagaaatgcagagacatgactgtgttaaatcaattgcataaatccaagtacctggtaaccaattatgctctcttagtacacctccatatgcttcccactgaaagacaatatgctgatttcaaaacaataaagtggcttgtttccatacattttatgaccttcagtaacttcagctgatcttggggcttttgttttccgattgggaaagtataggagctttaccttttcttttcttcacgatcaattttgtgcaaagaaatgtctagttagtacgtcctgatcagttggatgtgctatcattatccatagtgtgtcaagtaatcctgagttgtggctgctggtatgcaggcatttcatgcaattggttttctctggagatccctcagggaggcttctgaaatacgacccgaacacaaagaaagcaacagttctccaccgcaacattcagtttccgaatggggtgtccatgagcaaggatggcttgttcttcgtcttctgcgaaggatcccgtggcaggtctgtacttctccatttcgttcagtgttctcctatttcaacttcataccacacattcgttgatacatccttgttgagacagattgagccgatactggctgaaaggggagaaggctggaaccgtggatcttttcgccatcctgcctgggtttccagacaatgtgaggaccaacgacaagggtgaattctgggtagcaatccattgcaggcgcagcatatacgcccgaatggtcagtcgcaatgtcaggctgaggaagttcttgctcagcctcccaatccctgccaagtaccactacctgatgcagatcggcggcaagctccacgctctgatcatcaagtacaaccccgaaggcgaggtgcttgacatcttggaggataccacagggcaggtggtaagagccgttagtgaagttgaggagaaggatgggaagctctggatagga

SEQ ID NO: 933 - DNA, 4109 bp, Oryza sativa
attaattaaaggggacgtagtaagaaatctaactgaacgatatacttacaaaatccagcaactcataatagagatgtcgagggcgtctagctggtatagttcgtagattcccttgaaattgatccagagaatgtcatctccttgcaagaagtctatgtccctgatcctcgctccgatcatctctctaccggtggcgcttatctccatgtacagctgatggaacttgtacatttgtgtgggtagggactgcaccagctcaggcttgacaagcggttaccgagttcgtacatgtatttcacttccgccttttcgattggtgcgactcctagcaattgatccgtagttagaccggtgtcagtaataaattcttctatcgtcatttcttcaccggtcaccaatggctcgatctcctggtttggttgctctccaagctgagggactggtttggactttctagaagatgctttcttcagcgttcgctcatagtccgataacttaatggcctccttggcaggtgcagacatacccctgaagaagtttctgacactcgggtctataggaatattcttttctggacttcgaggcttgaattgtctcttgacttctgatgccacgtaagcgtcaagctcctcttgcgtgcaatcgtaccccgggtccttgttcttggcggcgtcaactttcgccttcttcgttgcccatgtgtgggcaagcggtggagcttggggggcccttgactttgaaggtgccggaagaggagcccgaggaggagttggtgcaggagcctgaagaggagtcggtgcaggagcctgaggtagagacggtgctggagcatgaggaggagacggtgcaggatcctgaggaggagatggcggagccaaaggagatggtgcacgagacgctgcttgtcgcccagggaggatgatgtaccgcctatgccatagaataatggcatggcttgtgtctcgtagatgcgtctcaccgtctcctccagggtaatccaactcgaggtcctcgtacgcgccttcgaccaactcaacttcgaccttggagtatcctgctggaatcggcctgcagtggtaagtacctgaagggtccgttgggatggccatgcccgacgccaccttcatgtggtgagaggttatttattagtaatcaacatatataagcagcaactagcagaatggccaaatctaaaatatataaactacgagcttacctttattgataagttcttgaaaggaatatgcagctcacatggtgtccgctgagtgatgtcatcaacggggcaggtggattcgtcctgggtttgcatggcgtccatgctctgtgatcctacttgccccgttgaggcgcagctgctacggtttcctgacgggctcaccattgtaggaggaatggtcggctggggatcatgggaccgatgtgcggccatacgttcatcaaccttccttgccacctcctcttgcatgctgcactcgtagctcgataccctgaactctagatctgcaatcttcgcctcggtatctctcttgctcctcatctgactcctgtatgtgtggatgtcctccttgaacccaatcttccaaggaatcacccctttccctcgtgttcgtcctggatgctctggagtctgcagggcgagtgacagctcgtccctctctctgtccggtcggaacgtgccctgagaagaggcttccacttcgtctgttagtcgacgcgcagcctctcatatctgatcgccgaagaccagtaagccatcagctgggttgagcattccaccgtgagcatagtaccagaacttcgatcgttccggccaattagcggtggccggttcgatacccctctcaagcaagctagcctccatctcctcccacttcggcatcgcgacgctatagccgcctgaccccaagtggtgatggtacttcttcttggcggcattttctttgtttctttctatcatcgcctgcccttgttcacctgtcttatatgcaacgaactcgtcccagtgatcccttagctttgggaatgtgtcgaagttcggtgtctgcccattcaggatatatttctggtacagatctcccttgaagctctgaaactgttctgccattttcttcagagtccacctttgcactttgtcctctgtacccgcgggaagggttaatgtctcgagcattgtggttcacagcatctctttctccgaatctgggacaaagctctcatgatctccgcgtgcccttgttcttcgccagtacaccgtactgacaggcacgttatcccgcacaacccaaccgctgtgacgtacatagttcttggcggcttctgccggggcactaggtcgtccatcttcttccacttccgttatgatgtgccgaccctcaagcttcttcggggcacctcgttgcccgcgtgccctcttctgtccaatggagggttgacttccactaacctccttctcctggttcccctccacatccctttccacgtgcccctcctggttcccctctgcatccctctccacgttcccttcctcgttcaaatactggtttggatcctcgttcccctcttcttcattccagtactggctgcttccctccgcgattatatcgtacaatatctgttcctcatcgcgatcagccatttgttcatacaggaaacatctgctaagtcatgagacatttatgttttaacaatcttatattaaaactcaaataatcttatatgctaagactaaaatagtcatgtatgctaagtgtaactgtcgtatattagaaccctacacaatcttacatgctaagtctaattacaaatctaataatcttatactaaaactcaaatagtgatatatgctaagtctaggtgacgtatattataggactctagctagtcaataattatatactaagtctaattacaaatataataatcttatattaaaactcaaataatcttatatgctaagactaaaatagtcatgtatgctaagtgtagctgtcagtatattagaaccacacacaatattacaagctaagtctaattacaaatctaataatcttaattgcattacaaatataacaataatatatataattacgtctcttgcctgcgcgaattccttcgagggctagctctaccactccggcttgagggacgactccgacaacgtcttttctgcaagatacaaaaagatgtattaggataaacgcgaagtaacatatattgcatttgacgttcacgtttcgttcacgatatcgttcacgttcgcgttctcgttaaggtcacgtttcattcacctacgtttgttcgttcacgttcattcacctgcctataattgcatttcacgttcacgttcattcacgttcgttcgctcgttcacgttatcgttcacgttctttcgctcgttctcattcacattcgttggcttgttcacgttcgttcgctcattctcattcacgttcattcaccttgttctcgttcacattcgttcgctcgttcacgttctcggtgtggcggcagcgggacgacggagtggcggcagcggagcggcggcggggcgccgcgcgcggcatcgggccggcgcgtggcgcggcggcgtggcgccgcgcgtggcatcggcgtggcgcggcggcggcgtgcggcgcgcggcgcgatgccgtcgtggcgctacgcccggtggcggcgtttcgcggcagcggcgttgcgcggcggcggcgtggcggcgcgccgccggtggcgcgtggcggcggcgtggcggcgcggcgccggtgccgtggcgcggcgtcgtcgtggcgcggcgtcgtgtcgtgatgaggtaggcgtcagcgtctgaaactcagcggccggcggcaaccgagagggagagagagagatcgagatcggagagagagatcgagggaggcggcggcggctctcaccccagagatgcggcggtggcggaggaggcggaggcggcggcgacgacgacgagcgcgagacgacggcgagatacggcggcggcgtcggcgcggggatgccctaggcagtggcggcgaaggagaagccgagagagattgatcgggcaaaaacttctaagtgtttgtggagaagacgagggcgcgcattgggaatatata

SEQ ID NO: 934 - DNA, 1313 bp, Oryza sativa
ccagtttaattaaagtggatcatcactgtagacccgtggctgtctagggctctgggcatagcgaggtgtgcagcttcggcttcagtaatcagtgacccacgacggaaatctatccgtaaatcatgcctgacgagccaagttcaacgggccaataatcgagtagctcccccaattttgttcaccaataaccctgcagaactgtacgtttgtgatcgattttgtttggttcagtggagcattcttgtggagaaaccctatgtagtcccggttcgtaaccccttgtagtcccggtttctaaaccgggactatcaattcgggactaaagatcattatctttagtcccggttggtaacactaaagatcgagctgacctttttttttcatggccctgttgctgcatggtttatatatatatatatatatatatatatatatgtcatgcaaatgcatatgtgtgtgtatatgaccaaattaaaatatatttacattatagaaaatgtgtacacatgcatatagaaacatatgtagtcatgtattaattacaatccattatatgtcctagctagctacgattttgacgtagtagtagtcgctagcttagaagctaaggacttatgaattgtgtttccgtcgtagtagaattcacccttgggatcaaggatttgttcgttgatgaatcccatgagttgttcttgaaccgccgcgataaatttcttgtgtgtggtcaggttatccctcatgcgaataaactatatgaatgtatgaaattgattagtaattaaacaagaaatcgatacgtaatgaaaatttgaatttatttgtacgtacatcgagctctcttgtggtgatgatttggtctgcaaggcagtggcaatactcgcacacgtagtagccgcacaagttagttccctacttttgctttgtgcactacaaataaatgacaaacgacgagagatctaattaatatacacttgtatgtatttgaatcggagaaatataaatgtatagcatgtgtactcacaggaaatttgaacttccgcctaagtctttctctccagttgccgcggaccaaatgacggaaccaataccaagccctatatggagtttaaaactatgattcgtagtagcaattaacataacaagattttcttaattaacagaggaacttatgacagtacctgtctatagacacaaagaccttgtggaacgtgaactctatggtattcattgagtcatatacgttggcagatgcaggccgacaggtttgtacagtatgagcacacaccggaatctacaatgtgcgtgggatgcat

SEQ ID NO: 935 - DNA, 627 bp, Oryza sativa
ttctcccttcattgatctggttgcattatgttctgatgcacaagaggttgttttgcttctatgatgtccaggaatgtcgttctgctggatgccgtacattggctgaagcaaagattcacatagagcaaaagaggaaaaaggaacatgaggtgaatgcccaaaaagctaaggaaagtggtcagctcttatccaacactaaagtggtgcataagacgaatcgacctatgaaaatcgagtcagatggtaatttggatcagaagaaaggtggtgccagcttggattctactggcagggattctccaaaaaccacagggcatgcaggcactaaacattgggatgactgggatattgttggttttcctggggcagagctattaagcaccagtgtaagtatatttcaaatttcaatgttctaacattttacatttatttgtgcatattttatcttgtcattgccttgttcatactccctacagtaaataaatgatccatttttcaatttcaggaaaaaaatctatgctgtcagaacagattgctacccaaccattacctgaaaatgcaggaggttttgatgcaggaaatattcaagggtagtgtcgccaagaaggaagatgcccatgtattatt

SEQ ID NO: 936 - DNA, 1411 bp, Oryza sativa
ttacttgagtccagccagctacactcttagcaaggcagagaaggaaagtatgtttgaatgcttggagagcagaaaggtaccgtctggatactccacgaatatcaagcgaataataagcacgaaggagaagaagttcacaaacctaaactctcatgactgtcacgtgttgatgacacaactgctaccagttgtaataaggggtatccttccagacaatgtctgggcaacaataacaaagctatgtgcattcatgaacgcaatttcgcagaaggtcatcgatccggatagattagaagcccttcagaatgatgtggtgcaatgtctcgtcagttttgagttgatatttccacctttatttttcaatataatgacgcatctgctttgtcaccttgtgaaagagatcagtattctcgggcctgtgtacctacacaacatgtttcctttcgagaggtacatgggcgttctgaagaagtatgttcgtaaccgtgctcgtccagaggcaagcatcgccaagggttatggaacagaggaggtcatcgaattttgcgtagaatttatcgaagatcttcacccaatcggggtacctgaatcacgccatgaagggagactacggggaaagggaactctcggaaggaaagcaataatgacagtagacaacaatttattccgtaaagcccatttcacggttctgcaaaaatcttcattcgtagctccttacatcgaggagcacttggctctagttcgcgccaggaacatcggtaagtccgatgcatggattacatggcatgacattgatactttccccgcgtggctacgacaacatctcatgggtaacgagtcaatcaaccaacaacttgccttcctggcgaggggaccgtctgggtcgatcgcgacattccagggatatgagatcaatgggtacacattctacacgagagcccaagacatgaagagcatgaaccaaaacagcgttgttcgtgtcgatgccatgggacacgatggaacaactggcacgtattacggtaccatcgaggacatatgggaacttgactatggtcctctcaaggtccctctgttccggtgccaatgggttaggttgactggtggaggcgtaatgattgatgacagtgggatgacaacggttgaccttaacaaggttggatactcggacgaaccttttgtccttgccaatgatgtaacgcaagtctttttcgtgaaggacatgtctagcaaaggaaagaagggcagagggcctgacgagcctaagcgtcacgtggttctcccaggcaaaagaaaaatcgtcggagttgaggacaagactgatgaggattacgatcagttggatgggcaaccccctttcacggtgacgattgaccctagcattctcctatcaaatgaagacaccccttac

SEQ ID NO: 937 - DNA, 7237 bp, Oryza sativa
tattaataatgataatcaagcatgattcgttggtttggagtaccaaaaccttgccaagttttagcactagctaattaattagaatttgaattagtgtgagaaaaaaataatagcaaaccaaacatctatttatactatcattaaagttttcgaaattttgatacggcaaaaaaatcagcttcaatgatcattccaaacatacccgcaatctttcaagatcaaattaaccagatttaagagtaaattacatcagcggtacacaaactggctagataagtgtaatctagtgtatgaacttgtaaaatgctcgttttgatgcatgaacttatttggtgcgtgcgtacaagaccaaaaccgtacgacaatgttaatcttgctgattttgttattgattttaatgctatgtaaacaaatatcacgtagataaagatcaatttagcaaaacatataataatgcatattgattgcatgaagaaaaagataaaaaattgagtaacgatgcaagcgatagtaacaaaggaagataaagtagaaaccaaatttatacatataacctttctactatatgtgcaccacgcatgtcatgtaataatttataatgttcaacttgaaaaatcagccttgtcatgccattttggctttgggatgtacgcactaaacaagttcgtacaacaaaataagtgttttacaaatttatgcactagtagactgcatccactaagttgtgtatcgttgatgcaatttactccagatttaatctacagatatgagatatccaccaaggcccagcccattttgggcgctgaagcgagcactttccactacggcccagcccgctttgggatagcgaaagcgagaaccccagaagcccgtggaagcttcggaagcggcgcggcgcggcgctgggcgggggagaagaccagagcggcgaggaaggaggcggcgcccagcggggagagcgagcggctcgacgccgacggccatggcgctgctgatggatcccggggcgggaggccccctgacggagagcgagaaggccgacctggacgccatcgccgccatcaaggagtcggcggcggcagagtacaaggagaagggcaaccggctcgtcaagatgggccggagccactacgccgacgccgtcgactgctacaccaaggccattgcccagatggagccgctgccgccgccgccggtgccatcccccgacgcctccgtcctcttcgccaaccgcgcccacgtcaacctcctcctcggcaaccaccgccgcgccctcgacgacgccgcccgtgccgtccagctctctccctccaacgtcaaggtgccctccttgttctttgttggattcggcaaagaaaccttcgccttcgcgtgatgtgtgagattcttgtagctaggcgtactaccgggcggcgaaagcggcgattgctctcggcttgctgccggaggcggcggccttctgccggcgggggatcgagcaggaccctgctaatgaggagctcaagaaattgctcgcacaagtggacgcccaacagagtgagcaagatcgtcatagggccaaggttgcgcaggccgtgtccgctgcgaaggtctctcctgctccaaatttgggatttcgacattgctgtaattggtttccgatatgtggaattaaccagtgttatatgtatgtaggatattgttgccgctatagagaagagggggttgaagcttgggaaggcagcatatcaagagcttaccggtgtaaagaagccgaagttggatgagcagggtgtgcttcactggccagttcttctgctctacccggaggtcatgtcgagtgacttcatcgaggattttccggagacagatactttcgtgccccaccttgatgtcatatcctttctaaactatataatgttattatcttaagattaagtgcataataagtataggctatgtgatggaatcactgaatttgtgttgaacccttaagtactgtcaaacatgttctcagaaagttctccaccattaccatgggatgataaacacgcttacacacgggatgctgttgagttatattatcaggttcgtgtgtatgaattgaatttccttgaaaccaattacctgcctgctttctaattgttaaaagttggaaaatatgtctaaataacttgggctagacacttcattgttcatatagcattgtaacaatacattaatggcacaatggtgtgattaaacaactattaatgtgttaatttgtatttttggctaccaacagttccctgtgaattcaggtaaacaagtacgtctgtttgtcagcatataggacattatagttaacttgtaaaagctgcacatgtaagttgtctccatatttagccaatacagtttaacacatggtgcgtgattgtggattacacaccgagatggtttgatccctgtttttatatgtaaggtagagttattgtcaatatttcgaaaatcttagcctcacattatttttccaaatttggagtcaaatttggagataacaacgtctgattagaaagggaggcatggacaacacatattttgatgctagcaagttaatcatcattgtcatcatctggttcagtttgtgaagttcagtattgttgtggattgcttgtttttacagcttgctatacacagttgtttggcagattatctttaggatgtatgaatttcctatatcgatcgtccatcttctgtttgttgttgtgtaactgattctttactttgtgacattaggctggcgttggcacagttctgtccaaaagtgaaatattgaaaattcttttggaaggcactatggactcaaagtcacttcctgaaagcctgcttgatgaggaagatggagaaaatgatgatggcaagagcagcacaattacatcatcaggtttgtcgatgaacatattctttagcttgtcatactaaaagaaggcaatgtggtggtgatatatcttccacctgcacacccactccatctacattacatttttgttaattgtcttcttattatttgttcttctaaaatataaatttagattcgaaaggtgtaagacagccaaattgtcagatacatgtgtacatgctaatttccaattaaaactgtatcaacaatgccaagtgcgctgtaacaaaaatgcaaagggtggtgttcaatgcaaaataagtatcaacaatgccaagtgcgctgtaacaaaaatgcaaagggtggtattcaatgcaaaataaaaagttttgaacatgtatgattcatttttattggtagcaaatgtgcggttatttagcaagtaaaagaaatcaacatgttattataaccagccttcttgtacagctaggcaactcatgtacccttctcaaataaatactgttactgttcaacttttaggaagctgcttcggagctctccagtcttttgcacgaatcacatgtattacagtaaatggcattcattactatagtatttttctttaatgtgtagataagggttctgtgaagtggatcaatgtaaaagagggaaaaactcttcaagaagtgctgcagcataaagacttcatcatccctgcaattcctggtctggttcctctctccttgaacgatttcacatattacatataaatccggagtatttaatgaccccatctctttgcttgcagtgttctttgttgtttcaagaaaatccaccttttacagaaagttcaaggcaggaaactggtctttgccgtaatgcttagcgtgattcagtttggcacatttggaagatgattagtgcggtacgcgtatgatcagagaagaaaagctggccacctagtcattcttgtatggttttatatgttgctttatagaatgatgaggtgtgttctttcctgtatttggtacaattctcaagtattttcctatcctttgcttgagatgctcagtatgccgtttctggagaaacacactgagaatgtacttatgtatggacagctttgggcctgatttagcgcttggcacagtgatggtatcttgtacgccatatctaccaaccaattttagcaccaaacttttcttgtcaaataccttgtgtgaactgtaagattcaacctccaattccttggtgtgaaatccggcaacgttgatgtgttttctcactgcggtgatattcggattggaaccatcgacgatgttctcagttgacttgtgtgggagtgaaatctctcattcaggccgatcgagtttagtttcaaaatttttcttcaaacttccaatttttctttcacatcaaaactttcttacacacacaaactttcaactttttcgtcgcatcgtttcaattttaactaaactttcaatttcaattttggtgtgaactatacacaccctcgctgccttgtaaatcctttattcagcactatctcctccttggatacagctacaagcacgcatcatgcatgcagattggagtgccaagaactcaaacctgtgccacggtgatctgaacaaacgcaacacacatccagaaaactaaatcagcaggtagccttgtcccttaccagctcaacgcaacaactgatgcagagatgctgccggtgcggtggcaactggcaagatgtatatgtgtttgtacgccctggcacgcatgcggcacgcatggcgccggtgcagcgaaaccgggggcagctgtccggatcgcacatcctgggagggagggatagggatgaatgcttaccatgcggggggaagccagatgagacgaacgcaaaggtgcaaacgcgcgcaggagaaggggagaaagcgagaaacgtgtcgccccaagtagcgaacaaaaacggccgcccccgcgcgtggcggtgggtgggttccggccggtcatctctatcccgcgccgtccacgcgacaaaacaggggacgacgcaaccccggcgccttctgtggctgtgcgcgtatatatatagagcacgggacacgggagtgtgtgtgtgatcgatcatctggtggtagtgaaccgtgaacacacggcgcgacaggtaaactagtgagagagcgactgcgagatggaggagaagggcgcgtctcccgcggcggcggcggcgacgagcggggagccgggagcggcggcggggacgatgaaggtggtggtggccgtggacgcgagcgaggagagcctgaacgcgctgtcgtgggcgctggacaacgtcatcgggcgccgcgccggcgccgtttcggtcgtcgtcgtccacgcgcagcacggccccgaccacttcgtctaccccgtcgccgcgcacggtatcggatgtcagcacaccggctagaccatatatacaaactagtgttaacttttaccagttcacttcgcatttcacgagactgacacggcgtgtacatgtgcgtgtgtcacggaagcagccatagcctacgcccccgcctcggcgatcgagtccatgaggaaggcgcaggaggagatctccaggaaggtcgtgtcgcgcgcgctcgacgtctgcaagcagagagaggcaagcacgcctagccagcgctagtgttcacgtatagcgatctgaaaattctaaccgatagcgatgcatgcaggtgagcgcgacgggcgccatcgtggagggcgacgccaaggaggccatctgccaggccgtggaggagatgcacgccgacatgctcgtcctgggaagccgcggcctaggcaagatcaagaggtaaaaactgcgctcaaatcaatccacatgtacacacgcccacgccgcgaaatcgaacgaacggttgtgacattttttgctttcttcgttgtgcagggcgttcttgggcagcgtcagcgactacctcgtccatcacgcgtgctgccccgtgctggtcgtgaagcccaccaaggcgcacgacaagtgaactcgatctgctgctcctttgctgcctgatggatgtcctgtgaagtgaagacttggctatcttttgctactgattactcatggagccggtggctgctgttattacttgtgttgaaaataaaaggatatgttaagcttctgaggctggcagttcttatgtagatgcaacgtgcaaactgaaactaatacatggaactgccgttgaagcttctgagctcctgtgtagatgtaatgtgcaaaactgcaaactgaagcaaatacatgagtagtacttgtggatatagaactgcaatgtttccttcttgttcagtgtgaaaccactcattcagaaaagacgccctcaaaatattcggttcttgtgatgaagttgttaccctaaacacggcttacatgccccaaatcactgctttcgaaggccgaacattgcaagaaaccacaaatcctttaagcacaatcatgaaactaaaaggggtacattgtgtaaagtttaatccaacaaacacatcacaacggacagattcagggattcagtaaaacattgccgagattcctactgatgctattgcttcagtgacctacaaacaaaaatgcaggaactgtgaaagcatgaatccatccctaggcatcaagacttgaacatttgaaacagctaaacggtagcgccatcattttgctcccaaccgccaagtctatcttcgggatcataatttgtgaacaagcggaattcatttcctagcttgtttgaatgctgaggcttgaatccacagggacgcacatttaggagctcaaatgccctgtccctctgaacttcccctggcaaaacacgagaaacttgttacagaaaaataacttgatttgaactatgcatttcagagtttaaaaccagaaataccagaagacaaggcatgtgatccaccatatcacaatactgaacataaaaacagggatactaaatttacgtaaactagtgcacatcagatgacaatgatatgcagactaagctactgtagtacagtacgttgatttcatacaagaagagcagacgatgttttgctttgaaaacaacaagaaggtcatgatgttatagagaataccccagtagctactacaagccttcaactgaatatgccactctcgcgccctagtttacacacacttatagcctaatcagtagtgcatatcaaatcatttcaagcagttccagttaatgggcacttaacctcccggcaacaatttgctctagtttgatacacttgattgcagaaacatgatccaatcatcaagactaatcaatttacaatcatcacgaaagaaatcttggagaccaatggcattaaccagacacgaaattatca

SEQ ID NO: 938 - DNA, 5421 bp, Oryza sativa
atgtgactttttgtttgatacagcaataagatttgtataacaagtctgcaagaatgattcggagaagtaattgaaaatatgaaactgaattcaaaccaaaccttggatggttttacgttatgaaataaataatacaagttaatcaacaaaccccaaggtggagagtgacttattgatattggtagcttccttcaagcgttccccttcagcacctgagctcttttgcctgcaaggcatatatatcattcatgctgaataggagactcgaaactgtatgaaaagcaaggagacaaactacctctctgagcctgcaaggtcaactaggttaagccgagaaaaccggtgatggttgataccttgagattcccactgtatggtcaaaaaaattatttataatagcatgtgtatacatatgcaagcattaggttagccacaaatataaaccagtatatccatcaacatcaccatccttgaaactaatgacaggtaatatcactcttattacacaaaaaatacataaacaagttgaagcagttcagttcatataccttactctcgataaggcaagtgaaaacactatgagagcgactgcttgctctattcatattggtagccgccacctttctgtttgctgccccctgaaaagaaacatgtagtgtttggctaaagagatctagctagtgaaactagcattttatatgtgagagatcctttaataaatcaacttttccaagcataatgggcaactaaaaaagtacaatgtggcaacaatcacaagtaaaggcaaagtttggttttactgtttaaaactaaaatgctgaatttgatcgatttagcattactcaaggttataagaatcagtaaatggtattcgtttggtgaaccaccttgtcctatatttctgtataaaactgccttttaagttttaaccattttcctataaaaaatttcagactatatatattagatagcatgtgaacactatcgagtactgtgttttatctatattgccttgtgaacttcgcagtcatcaaaatagttgctagaagggcaaaacagaagtacctaaagtcaaagattggagattcagtcaacataattatattgttacatacctaataaatggccattgtatattggagtattggactacttatctacacattcttggaaagtatggaataattctcttttcatatatatatagtgttacgaatttgcaatgaacaatagcagcagagcatcaccacaacaggttttctttatgacagggacacagtgcatcaaataactgatcttgtaaccagttattgcctggctaaacatgtttccttattctttttgcaatggaacagtcctagtcattttgttcagaaaaatagcagtcctcttaagccagtcttaaagcacaaacctcaacaagttgttgcattgcttctcgagcattggaaacctcatgttctgtcaagttctcaacatggacaccctttttagcatcctctcttatctgcaaatatagctaataatatcactttttgaaacattgagatgtcaaaactgtgaacatctcctaacagcttcttaaaacacaactagcaaacatccgaggacacacaaataagccatgctttttagtactctacctgcaaatttactgaattcggatttagcaaatcaaggatctgctcattgtatatctccaaaaaagagcatttgcaagtaaacctgagtttttcttctttccttatttccttttcctggaacagcaatgttaaaatattttggctgagaagagtacaccactgtaccgcacaagaatcaacaaataatcaaaacttgccttctggattcttaaaaacagatgttcaaacacccgaggcgtcataccacaattcacattgtttcttcgtgtgccattttctatatcaccaagcattgtgtgtgtcttgccactgccggtctaccaaaattggacacccttgtaagcactaagcacagacattgaaatgcaaatttacaacagtatgcagactgctaccctggaaacctaagtatcttgaaatgtcaagtagaatcagtagcttacctgaccataagcaaacatacagctgttatagccagccatgcagttgtccaccatgggcaccccagcaaccttgaacagattctcctatacatccagatgaacatcattcacacatctcgcaagacaagtagataaacagatcgaaatgacacggagaaacaagggcgtgaagagtgtacctgcgtgacatactcgtccgcaacgagatcgaacttgaaccgcgactccgggtggcccgtccaggtgatgctctggcagctatcctgcctgacgcatctcttctgtccctgcaccgatatctcgccgctgctcagcggccgaacacggatcacaacctgttgttgcacccgcggaacaattagtggagctcgaacaaggctaactaggtgctcggcgaaatgctccgatgggcacatcgcgggcggcttgggcctgagctacctagatcgagaggcactactcgaaggataagcttgcgactaggcgagagagggaggcgaaccgaaccctaacctgcacgttggtgtccttccagaaggagggatcctcctggagctcgaaccccgcgggggcggagccgccgccgtggtcgtcgtcgccgcagtcggatggcatcgcggcgacgggatcccggtggaggcggcgatggcgcggcggcggcggcggcggtggaggtggaggtggaggtggaggtggatggggagacgagatgggggggatttgaaatggggagcggagacgaggagagacgctgctcgatttcgaattttggggttcagtccgcgcagcgcggggcacccaaaagcgaagcaatttgcggctggtgagtgggacccctttccaggtcaccaaattgaagtatcgtgacagttggatattcgtgaaagacttgcctcgagtttcaaatttcaccaaaaacagcgtaagaacagcagtttgaatttcagcgagtactgttggagctgaaatttccagacagacatggattttttttttacacgaacaagaaataccacgcattaccaaaaaaaaaagctgaaaaaatctacgagacatatcaaggtgagcatgcatgttcttttcaaatgcatggagcattggattaacgggcacgcttcgctaactcctaatgctgtggttttttaaaaaagtttctatataagaattttcttacagagttgttttaaaatcattttaaactctacggtatggaaatcatacattttttagtctcgaacaattttcacagatcaattcactattcagtcatctagtttttgtttaccctccctgtttcataaattagctcttatattgaattttatgtttactccctctgtttcaatatattttcccaatttaattaataatggtttttgtttcactactggtatctttaaaagggttgatatatttatattcactgtgtaatgtacttactagattatatggtatatttttagtccttataagtttattaacaaaacacgagtggtcaaactagaatcataacaagtaaaaatgccaagtgttagttttgaagctgcattaccttccatcatctgccttttgcttacaagtcattgccgatattttaattttataatttaattctaaagcttttcatcatagtttatttccaccattacttttaaatcactaagttcactataaaagttttgctatctttacaagccattttacggcctatcagttgtgaccaaatgatggggctggttatattggagtttggtcgcatggagttcaatcgccccatgctaaccatccgcatgcaaaatctgagcctcatcggtaagtaatatgtttggctgataagctagcctcggttatagttaagatggctataaaatttatacatcatgggtgatgataaaaattgcaccctagttagagtagtattgatgtccagtcaacttagaaattagtgcccagtatttctaaacaagcgattctcgatacactgttgacgaaaaaaatcgaacacaccgacctatgagatctgcttagcttctgtgcaggtccaaatcttgatgagatgcgggcgtaccagtcagtttaattcggtaactgacaatatatgcaaatagtatatcaaaacagccgatcggctgataagccgatggagtagttccagccgatagccgatgccgatagcgatagggtttaagtaatcggctatatgtccaatgtagatgatgatataaaggcaatcgactgttggtaataaagtataacaataatatagtccagtagaaaccaatcggctataaacaatatataataagcattgatccgaagattaaagcacacatcggctggaggtccgatatcatgaaatccacaagattagattaaacagtgaaacctttgttgtcatcggctaaatccaacttatatgtatatgcaatccttatgagccgatgcaacatccagataactcaccggctgaaactccgatgaaacccttattggcaatcaaaaagcaggctaaagattatggttctaagcacgacttagtagatcaaacttaactgatgcagcactaagtatgaaaagaaacataatatctaaacaatcaagccgttgactgagttttcagggtggtggatgtttaagctaatctaatctagcaatgcgatttagccaataccggcagaaaccctaaaacgagaagcagccgatagagctaaattgatatgctaagactagattaacagagacatatgataaataggtaggcaaatatatcatccaaaccagagcaatccaagaggtcgaatgtactgatgcagccttgaacgacgccgacgtaaacgatacaattgcctgggatggcggaacattggacttaccccttagtcggagatcgaacatcgatgcagcctcacgtcaggtgccaagtcccgccggacgataaaataaagtagaaaaggtaaaaggtggcgatgcgccaaattgtattgatcgtgaagataaattacatagaccctgggtgtacatatttatacccatgggttgatacaagtccttgtcggacaagaaagaaactttcctaaagataaaaggcaagataaagtccttataggacactaaacacacgttcctaaagataaaaggaaactaataaattattcctaattaatagataacttgtcatgccgtattctctttgaactcggtctcttctggataagcttcctttagtagatcaatttccttaaccgaatatatcaagaatccgacaactgacgacttgacaactctcatcggctaatcttaggacttcgaagccgatgctgactctaagccgatga

SEQ ID NO: 939 - DNA, 723 bp, Oryza sativa
cgctgccgtagaagacaggcacgatagtctagtaggctatatataccaaatatggaatggactgtaactactacgtggaaggaaatgtgtacgtggaggcgtggagctaccaatgttttctctgcatcatgcgctaccgtgtctgtgctagtctgtggcccatcatgcatgtagtggggcgtcgtgacggcatcgattgcacattgtatagcaccaatgcgtcaacgcgtgacggatctcatacataatctttgaccctttttagatcctactctaaaatttttcaccctgtcatatcgaacgtttggacagatatataaagtgttaaatatagacttaaaaaaaaactaattgcacagattgcgactaatttgtgagacaaatcttttaaacctaattgctccatgatttgataatgtggtgctacagtaaacatttgctaatgacggattaattaggtttaataaatttgtctcacggtttactagtggattctgtaattagtttttttaattagtgtctgaaccccatacgacagcctatataataccccatgcgacacgctaaaactttgcaccctggatttaaacacccccttttattgagatcaggtacagctatacttgcaactgcacaaaatttttaccatccgtttagatgatcaacggttcagatcaaatactacagtaataacatgaacagtatcttgatgctttgggaaag

SEQ ID NO: 940 - DNA, 671 bp, Oryza sativa
ttagtggagaccaaatgatggggctggctatatcgaactatggtctcatggagttaaatcgccgcatgctaaccatccgcatgcaaaatatggccctcatctgcaagtaatatgttagactgataagctatcctccggtatagttaagatggttattacattaatacatcatgtgtgacgatagaaattgcaccttagtcaaagtcatcatagagcacagaggacattatagatttaggacggagatagctaaacaggcgagtctcgatacactagggcacaaaaaaagctgacacacacgactatgagatctgcttagcttctgagcaggaccgaagcttgatgagatgccaccggaccaggcagtttaattcgcatactgacaatgtatgcaaatagtatatcaaaacagccgatcggctgataagccgatggagtactagcagccgatagctcgatgccgatagctatagggtttaagtaatcggctatatgtacaatgtacatgatgatataaatgctatcgactgtgggtgataaagtataacaataatatagtccagtacaaaccaatcggctataaacaatatataataagcattgatccgaagattaaagcacacatctgctggaggttcgatatcatgaaatccaccagattagattaaaca

SEQ ID NO: 941 - DNA, 1650 bp, Oryza sativa
catgattatgaaattaccattcctcgtgactgcaaggagtagtacttacagagtaatagcgttcgcaaaagagaagcaacaagtatataagtgacttatgacggaaagtgggggattaagtcagtaaataaatttcgtaataccagggaatcttatggaaaacaaacaataaaatagtgaaacactgacatataatgataagtgaaccagagacaaacgaaatagaaaatacttatcttacctgaaaagtccatgcatctggtttgcccttttggtttccactgttttggagactctcagcttaccagattcttctttcaccacttttacttcacctggatagtttagtgataactctcccaatggacccttagcttttataaattgctcctctaatgtaagagtaacatttgatggaacttctatcggtttctttccaattctagattccttgcactcaattgtttttctgacaaaaccaactctgccagcagggataacatgaagacaaatcccttgtctctttccaaggaagcctgttcttgaattgctgattcatatcaaagaaaaatccatcaaaactctcatataacattggtaaaaaaaactcccatataatacccaaaggaaaaaaccattacattaaaaatgcattaatttagttttatacagtaagcgaaaaaaatatgaaaagaatagcataaccaacacaaaacagtttacaaaggccagccggcgaaactgcataatagtaaacttggattataacatgccatgctcaccttgaacatttcaggcaacatatcaaccatgtagttcggagccgctttactcttagtaataacaaggtaaaatcatcagaaaaactaagtttttacaaaggcatataaaattctgcctgaaattaggataacatgtcatgatggatcaatgtactaattcactcaaaactgttgccaagttagatctttagatctgatttttcacacaatttagaggtatggttccccataaaaaaaaagaggtatcgatatttttatcatggccattattttgttcacaaaggcaatcataattaacaagatcaacttcatgattcattattaccatcatgttatgtgaatttataaggttccagatatgaaataataaacacattagcaacctattggaagtaaattatcaaatacggtagcttcttcttttccttttttttttttgccgaggtggccaaaggaataggccgtcccaattttattaggatgagagatggtgttacaaattttacaagatcgacattaaactgttgaggctgggccgagacccaagagcagaggggaggggagaacaactttttttttttgacatgaggggagaacaacttagaaaaagaaaccgccttatggcaggcactcagccgacttctctaaagatgctggcttccctccaaatcaggatctcttctctaatatctctgtaaaatatggtagcactgcattcaaggtattggtgtattgtgctaactgattggacaactatccatgcttccctggaacttagcattcctgtaagatagggcaccacacacacccacacacacacacaaaaaaaaaaaaaaatgatcccttcatcgacagaacaatcccggtt

SEQ ID NO: 942 - DNA, 8233 bp, Oryza sativa
aaatgcatgtgttggaggatcaagtcgggtgcgatctgattcaggtagataaccgggcagtgcaatccttgctgccttacatgagcaagttcatgaaactgttgacttttgctctgaagatcggggcgcatttcattgtcgggatgggggagatgatacctgacctgagcagggaggtagtgcacttgctggactcgtcagtcatgtatggtgcaaccacatcagccttatcattgggggcattaggcgcagcggcaatgtatggaaaagcgaggaataacggcagccagagtggcacaaatgacatggaggatgatatgaaaacggccagacagtggcttgttgatttcttgaaaggtcaagggattttgacagggatggacatagcacagagatttggtctgtggcgcgttaggtacagagatgacggccacattgcatggatctgcaggaagcacattgttgcgagagcagacgagatctttgaactgccactctgaaccatccagggtgcagttggtttcacggccacaaggtgcctatctgatgtccctgtccttctgtactgatgatgacaactgacgagcttgcaattgtaagggatggtgccattgctgattacaaggatcgcatatggtaggtacctatcatatgctctgttccagtttctatcactctgcttctgtcaatggtgtgtttttacatttttcctctttacttcgttgttgtggattcacgctagtagaaatattaagtttctgacggcatattgtttcctgttcaattgctgatttgaggagttcgtttatctttcttcaattataatactacagtactgcttcatctctgatgattaactactagcagaattctgtttcagcatattcagattgacatgatcttatataaactacctatagtatttccttgcagaaaaaaaatgccacattattacactaaagacacaggaggtgacactataatgactgtatcagttatctgatgccagtatgaattcatggtttttcccaaccctaacccaaatgcttgctacctgagtgcaacttcagtttctatcactctgcttctgtcaatggtgtgcttttacatttttcatctttgctccgtaattgcggattctctgatgattaactaccatcacatctctgtttcagcatattccagaatggcatgatcttatatgaactactagctactatatcatttccttgcaggaagccaatttgttacactcatcacacgggaggtaacagctgacaactattaggactgtatcagttaactgacaccaggctgaattcatggtttttccccaatccaaacccaaattcttgctacctacatacaccaccgtgtgcagctccggccggcgagctcagaacaccgggcatcccttgacggcgatccccggcgcggtggggcaggaggcgagcgggcagtggtcgaccgccgtgccccaccacttgagctcatggtgggcgttctgcagggcgaagaagatgagcacccccatgaaggccgtgccggcgtcgagcgccgccgacagcacgtagttgtacttctgccaccaccccttgcggtacttgaacacgaagtagttgaagatggtgcccgtgacgagccagctcgcgatgttggtcggcgtcgccggcggcatcccggcgaacccgtaggagatgacggggacgttgatgagcgcgatccacttcttctccgggaacgccctgctgagcagccacaccggcacgggcagcacggcgccggcgaggaacagccacaccaggttgcggtacaggccgtggcggccgaacagccgggcggggccgatgagcccccagatcaccgacgcgtcgaacgtgacccggtacttggggcacgtccacgggctgtccgggtgcagcgcctccacgtcgcagatgttgtcgatgctgcccagcatccaccacgccaccgccaggttcaccacgccggcgaccaccgtgcccaccagctgcgccgtgtacatgcaccgcggcgggatcttcatgtagtgccccagcttgaggtccgcgaggaacgacagcgcgtgcaccgtgctgatcctcccgtagatcttgaacagcaggttcgcgatcggcttccccggcagcgcgtacccgatcatgaactgcgcgatgatgtcgtaccccggttgctgcaaccacaacaagtttttttctaacacaatcagagatggacaacgacgaatcgacgatgattcatggtgagatcgatggatggatggatgcgtgcctggttggtggtggcctggatgacgccgatggggagggtgacgacgaaggcgagggcgaaggcgaagagcatcccccaccacggcagctgcacctcctccctgtacacgaacgacatgaccagcgacacggcgacgctgccgacgagcagcacgaggaaccaccactgcggcacctgcttgtaccgccgcatcagcttcgcgtgcacgtccatcttcgccgccgcggagctcatcgccgacctgctctgcctccagatgtccccgccgtggaacagcgccacgtgcacgatcgtcgccgtgaacctcaggaacccggacccgatggagatggcgaacagcgggctcaggtacagcttcccgtagctctcgtacgccgccacgttgaggtcgaactccctcgtgagcaccttggtggtgtcgtacttctgcccggacgccgtgaacagctggttggagaagattgggaacttcctcgcgtcgaacgtgtcgaacttccagtagcagagcggcacgatgaggtagatgaacatgacgaagcccgcggcggtgttggcgatggacgaccacggcgccaccagcgggctcccgtggtacgccgagatgccggcccagtccagtgtgaaggcgccgacgccgaggccgtggtagccggagcccacctgctgcgccgtgatgctgtgcggccacgcccagcacgcccacgagaagaaggtcaggatggggagcaggtagcccggcagcgcgtagtaggcgaagctcgcgaagaagaagatgaggaagaagcgcatccgtgtaggccccctcgacgacgaccccttcccgccatcgccgccctccttctcgtgcaacgcccttcatgtactcacagagatcattagttagcctgcatagttaactggctgatcttgcttaattgagagatttacgacgtgattaattaattacctgaagagtgagacctgggctaaattcgatggccaccacatgtcagccgggtcaaccaggtacctcctcagcatcccggcccaaccatagcccagtatctgcatgcagcaagccaagcatgacgtcacttagctgtgctactacacttatactatctaccacgatatgaattttcatgtctcattgtttgtatatcgtctaaatagttattaaaaaattaataaatatagtttttctagattcatagcgcactcagattaaattgcgtgagaataactcctgttcatgattagttaactatattgttttctttttttactttgggatggattagttaaacgactagtctaatcatgatgcaagaataatctcatactcctatttatgactagtagtagtactgcttagttttgactcgtgcacggaccatccgtcaccatatacccaatcttttttgcatcttagtgccagcaatccgacaggaatgctaaagttgcccactaatacgaaaatttgcaagaggcacatgcagccgcatgctagacgaacaaaatcacgccaattatttgtagggcctcctagtacatggatggattcacggtgacgttatatgccaacatgaggttttctttcaatttcaacttcaacgctgcatgattggtggcaactcgtacgcgagataaagcaacgcaagaacgtctgattggttcagtatttgtcacatcttttggaggaaaacatacaagtcgcaatcgcgcgacaaattcgccaaaaaaaagaagacacgagtcaattcttatttcttagtaccagtcagaaccagtcagaagcaagcaatcgaactgagggaaaaagatatggttgaagtggttttgttgattgtttctttgtgattaattaactaattaagcattcaattaaggtgctacgtaaaatcatggttcaaaattccggaacgtcatttcggacccaatatgatgttatttcgaccgaatttttaaatttaaattttatctttttaaatttggcaatattttatttaaatttgactaaattttgttcaaaacttcggcaatttcggatcaaaatttcagtatatcggcaccctcggaaagaaccgtggaaaccgaaagattaaacccagcgtaaaaccggagtaggtgtggagggagacctgtgtggtgaggacgatgaggagggcgcagaggaagctgagggactgcttgtagtaggccttcatgacggtgatggcgccgatggagtaggcgtcgccgccgccataggagacgccgcagttggcgaagatggtgatgatgacgtgctccttgatgttgaagggccccgggttgaggttgaagctgccgaggcggccgccgaggaggcgcacctcgcggctgggcagcacggcggccatgaactgccccgcggggagcaccaggatctgggccaggatccccgagatggtgagcggctgcgtgcggtaggtgaagaaggtgttgaggaagatgagcacgacgcaggacgcgagccccagcgtccacgcccggaatgtcatcaccggcgtcgtcgggtcgtcggtctccggcaccaccagcgccacctcctccaccgggcacctctccccttcccccttcgccgccgccgccgccgccgtcgccgcctgctcctccgccgccaccggcgacttcaacgacgccatctccctagcctcgatctccttcctcctccgcctcacaagtcgccactacaagcaaagcgagctaagctagctgcgaatgatttgtaaagaaaataatttgccagtatctggagaggaaggtagtaacgctttcggggattcgatttggatggtagcacttgaccgcggcgcgcctctatttatattccaattcgcgtctccattttttttcccacctcgtacttatagttattagctggggttttagtggcttgattactcggtacatctcggctaggggaatcgtggccgtccgtgggtgggatcggacggtggaggagagtgccagctgggcacccggcgggcacgcgtcggcttaacccccgcacgcgcgcggcgcgcgtgggcacatgttacgcagccgcttaatctaatcagcgcttttaatttccttccaaattgtgaattcatccttggtctcagtggaaaaagacgcattgcttggcaaagcgagtggtcagtggtggctttgtgggtgccctctctctgacaaaacacactagtactacatgagcatgcgcattagtcagttgactcaaattaacatggcttatttgtgatcttgtccaaactatgctactaccagaagtgtccaaacacatggcttgtccagaagaaaaatattggaggaaaaaccttggatggagcttcgatgggaatctggtggtcatggtgtccgtctaattaaagaagatcagagcttgatggatgtgttttcatatagactgattcctcatccggattggattggcatatttgtaggtttgctcggccagaaaaagcagtgctcccccgttgccctcacagataacccaagcaaaatcttcttatctgtttatcgtaacgcgtggtaatatattcgtcatccgcgtcactgttcgaaaagatttcgtacttgtgctcgcgcccaacggctggctggctggcttgccggctgccgcgcatccggttcttttttttttaacggaaaaacggcacaagatagtgccttttcattgaatagagtgggagaaaatacaacccctgaggataaaaagaaaagctgttacagtacactatagaaggtatggggcgaactctcgtagacgcttagcccctgctagaacccataggccaacctcatctttgatttttgttagcaggaagctcgttgccatctctttatggtcaaaaatcctccgattcctctctttccaaatctcccaaaccactaacaggatgagggatctaagtcccttctttggaacaccgcgcgtgtttgccatgttttcccaccactactgcactgagtgggcttcctcccaattcaccggatccagcagcagatggcccacccaagtggcgacaaggtgccaaattctcttggtgtatctacaagtggctacaaggtgcaaggccatctcattctcacagcggcatagggggcaatgttcgttgttttgccaacccctggtcgcaagccgatcagatgtccaaactctgttctagataatgagctaagcatggaatttacatttctcgggtgcccacactttccatatcaaggagttgaaatttgtgttaggtgtcccatagcactgcgcttggtaggctgaagatgacgcgtatcgcccgttgctggtgaatttccaagcgatctgatccggttcgccattggctaattgcacattccgaactgcttcccacagggcgactagctgctcaatgaggctgactgtgatcgttgactgcgtatgtatggtcagatcttttatccaagcgtcaccctcttttccttgtcgcagagttttctttctgtttttggaaatcgcatagactagtggcatgaggtctttagggcgacgcccatctatccaggcagagctccagaagcgtgccgtgtttccatcacccactgttatttctgttgaggcggcgaacaggtctctgtcaatttcgtcacaaggtgtatcgagaccaacccatggtttggtcgggtctttccacttgtgccagagccacctcaacctcaaggccctcgtgaacttgtccaaatttagaactccaagtccaccctggctggttggcaagcatgtctttgtccaattgacctaacattttccccggtaataccttccgtgccggcccatagaaagcgtcttcgctgtttgtctatctgctccagagattccttcgtaatttttagagcagttaggaggtaaatcggctgcgacgtaagcacagatttaacgagcgtagttcttccagccgccgccatgtgttttcctctccaggtagctaccttccccgagattttgtcaaagaccggttgcaagtcccccttcctctttttttcctatcaatatatcacctagccactacgagttaatgggtctcgtttgtcatcctctccctacgtgtttactctacattgtaatcattgtggttgtattgcgacatccttttctatctaaacgttctcaggttacatgtccgactcgaactcttatctcttactccctccgtttcaggttataagatattttgattttggtcaaaatcaaactgtttcaaatttaaccaagtttatagaaaaaaatagtaatattttcgatccaagataaatttattataaaaatatatttaattattaatttaataaaattaatttgataatgtaaatattactgtacttatctacaaatttagttaaacttagagtattttgattttaactacctgaaacggagggagtaccatgtattccaaatttaagttcaactataacaaaaataaaactcgatgtttcacacctattttacacacgaagatcggtggtcgcggctgtgtttctcggcgtcggcgcgtggcttcgagatggcagcgttgggagcagcatgcagcgtgtcatgctgccatgtacagttgcagacaacagtattgccattgcagtacactgaggcatgcaggtggtggtgccaaatcacttttgggcatggggatcgggcgatcggttcggtaagccggcagtcagctttatacggtggtggtgtggtggactggtggctcgttggaaatgttctccgatcacgattggctgatgattgacgaatcgaaccatgattaattgccgagttttctgacaaagaaaattcccaacttcgtacgtgtctcagatattcagacgtgcactcgataatatgtaaagaaatgcgcccttcacagttcacagcgaacttacatcggcatcggcacggcatgaatgggggccatctgaa

SEQ ID NO: 943 - DNA, 628 bp, Oryza sativa
cgatgtttaggctttgtacggtggtcagccttatgttcgaagtgcttgcctttcttccgtaccgggtggtttgctgcaaggaatcgacgatgacccatgtatacaaccttcctacagtgcttaagatacgtactttctgttttatccatacagtgagagcaagccttgtaccctttgttggactgtccggataggttgctaagtgcaggccaatcgttgatggttacgaacagcagcgctcgtaggttaaactcctcctgtttgtcctcgtcccacacggggacaccttccttcttccacaacagtttaagatcttcgaccagtggtcttaggtacacatcgatgtcgttaccaggttgcttgggtccttgaataataatcggcatcattatgtacttcctcttcatgcatagccaaggggggaggttgtagatacacatcgtaacgggccaagtgctatggccgctgctcatctctccaaaaggattcatgccatccgtactcaaaccaaaccgtatgtttcgtgcgtcctttccaaattctttaaattttctgtcgatgtttcgccactgcgaaccatcggcggggtgtctcagcataccgtcctgttgacgctcttcagcgtgcc

SEQ ID NO: 944 - DNA, 620 bp, Oryza sativa
atgtagaggccacatacaatactttcattatgtaaaaaaaaggtggagttttacagtggtctctattggtagtagaatcaatctagacagttcatgcaatactgcaaaacttgcagatttggtcgttgctgcggacaacgactctctcagagggccatcttggttctttcaactggaggtgggagagttcggggtcgtactccacccgatcagcttaccttgccctcttctcgggcaggatctcgtttcagcacctaccaatctggcgctcttttgccccacctcagtgtcacgtcgctactttctgtggctggtcgctcactggcgctactggacgactgaccgattggagaagcgtggcctgccgcacccaacctattgtgtcttttgtgaccaactggaagaaacagttgatcacattctgattgggtgccttgagtccctatagctgtggtggactgtcctttcaagccccggcctccctcagtgctttccctctgacgctgattccttctttgagtggcactgctcctgtcggctcaaagttccgagggagcatcgtcgtgggttcaacacgattgtgactcttggcggttggtctatttggaatgaaaagggac

SEQ ID NO: 945 - DNA, 548 bp, Oryza sativa
cttcctatacacgctcggtgttttttatcctccctctccatttcatccacaatggcaccgacagtctccccctcgtcggccactccacctggttgaatgcccactggagctactacgcccccgtcctctcgtgcgttgacctcctccacagaagtctcgtttacttcagcacttggtccctcaccatcatccatgttcgtctgcacacctggatccttcgggtgaacaaacggaaccaaagctagaggccacccacattgcaatgcattttccaaataccatctccacactcgagagttttgaactggcattagttcccaataaaaaccctcagttgcccgacttactataacattgattgttatgtcacttgtttgtggatcaactctcaagcccctcattaaccatccttttatagaaggtacactcctctcagccggtctatcaattcccctttctgatacaataaaatctgacagatctaccccagttggcccgtaacgaacgttttctggtccatgggggtaccgagctcgaattcgccctat

SEQ ID NO: 946 - DNA, 603 bp, Oryza sativa
caaaagatagcgacagatatcaagaagaccaaagagatgctggatgagaataacccggatgagcgtaagcagatattatctaatatccagaaggagataactgcaattgagaaggcaatttcccatgtcaaggatgataataagattcagctcggcactgcagataatagtgagtgtgagatctcttatgctaaaaaggctgcagagtgtgctgttacaaagccaagtgacccgaagcatgctgcaaaaggtatgaatactgatgaattagaggcgaggttctttccacatcataaattgttgagagactgcaaatcgtctagcgctactcaacaggaatcgtccatggctgtcaaaaaggattgtaacacagatatggaactttcttcccttgagcctcaagaagatgagaatagtatagccatggagtttctggcttccttagatggtgaagaaagcggcttcttcaagaaccgcagagcgaagaacttggaaaaaaccatcatctgtgaagcagcagatgttagcagcaagacatcgggccaaggttcctcaaataatccggtaggcccaaaccatgacaaagaaattgaattgcttgct

(The sequence listing continues in the following parts.)
